United States Patent Application Publication US 2005/0228172 A9 - sequence listing, part 207

SEQ ID NO: 937748 - DNA, 740 bp, Homo sapiens
gagtgccaatttagctgcaggaaaataaaacatcaggtaaattgctaaggtttttgactccaatcccaggctcccagacaacatctctggacatgcatggggcctgggggaactccctgccctgaaaggaagggtcttaggcaagacccagtgccatgctggcttcaggtctgacccagcatagttcastggtggtcgccacagggtgtttgcatcaccacaccccccaattcatgtgtctcagcacacagaaagagaccccatttgtttgagaaaaagtaagggaaaagaaccagagtctctctctggtaatctagagaattcttctgactgttatacaagaccacaaggtagtacctctacaagtttgcaaaaaccacagtgttattgggcttggggcccaagtttctttcaaatacctggagggacttcccaagaaggacaggcataaacaagcccagactgtgaatactaaagtaaatagctaattcttcaatgcccagatgcaaacatctacaagtatcaacatcatccaggaaaacatgaccttaccagatgaactaaataaggcaccagggaccaatcctggagaaacagaaatatatgacctttcagacacagaattcaaaattgctgtgttgagggaactcaaagaaattcaagataacacagaaaagtaattaagaattctatcagataaatttaacaccccatccaggagggaggtggggggcagcccc

SEQ ID NO: 937749 - DNA, 675 bp, Homo sapiens
gctttctttttttttgagatggagtcttgctctgtcacccaggctggagtgcagtggtgtaatctgggctcattgcaacctctgcttcccatgttcaagcgattctcctgcctcagcctcctgagtagccgggattacaggcacctgccaccacacctgactaattttgtatttttagtagagayggggtttctccatgttggtcaggctggtctcgaactcccgacctcaggtgatccgcccacctcggcctcccacactgctgggattacaggtgtgagccgccacacctggcagcctttctttttgaggtgatgaaaatgttctaagatggactgtgctgacggctgcacagctctgcgaatacacaaaacaccccactgttctcgcatattctgaacggtacactgcaggtgagtgacttgtacaatatgtgaattacatctcaataaagctattgttcgaaaaagcagcagccccagcaaacagtgaatcggggcagcagaggatggagccctctcctcctcctggggggacagatggcgcggccccccggggttcggcacccttgtctggtgccctgtgctgtggggctccaggagcccgccgggcggccatcgccggggtgacggctgaaaggcgggattgaaagccttggaggggcctccgtgggtt

SEQ ID NO: 937750 - DNA, 675 bp, Homo sapiens
gctttctttttttttgagatggagtcttgctctgtcacccaggctggagtgcagtggtgtaatctgggctcattgcaacctctgcttcccatgttcaagcgattctcctgcctcagcctcctgagtagccgggattacaggcacctgccaccacacctgactaattttgtatttttagtagagatggggtttctccatgttggtcaggctggtctcgaactcccgacctcaggtgatccgcccacctcggcctcccacactgctgggattacaggtgtgagccgccacacytggcagcctttctttttgaggtgatgaaaatgttctaagatggactgtgctgacggctgcacagctctgcgaatacacaaaacaccccactgttctcgcatattctgaacggtacactgcaggtgagtgacttgtacaatatgtgaattacatctcaataaagctattgttcgaaaaagcagcagccccagcaaacagtgaatcggggcagcagaggatggagccctctcctcctcctggggggacagatggcgcggccccccggggttcggcacccttgtctggtgccctgtgctgtggggctccaggagcccgccgggcggccatcgccggggtgacggctgaaaggcgggattgaaagccttggaggggcctccgtgggtt

SEQ ID NO: 937751 - DNA, 690 bp, Homo sapiens
tccattgaattactttcaaacttttgtcaaaaactagttaggcatgttcttatggatctatttctatggtctttattctgttccattgatctatgtgtctcttcaccaatatcactgccatgcttactttatactaagccttaatatcaagtaaaatgattctcctactttatttttctctgtcaagattgttttagatgttttagtacctgttactttccatatattttagaataaatttatttttacaaaaaccttgctgggattttgatagaaaatttattaaacctatagatcacagtttgaggaaaattgacatctttactttgttgagttttcaaatctayagcatggtatttttctccatttattagatatttgatttctttcataagaatttcataattttcattatatagcctctaaacctgttttgttaaatgtatatctatttcatttcctttcatgcaattgaaaaaaatagacatttgttcttatttttattaatttttaattgacaaatagtaattgtgtacatttatgaggtgcaatgtgacatgttgatatacgtacgtgtacgttatagaagattcaatcaaactaattaacatgtctatgaccttgccaacttatcatttttttgacgtgagaacattaaaaatcttttagcaattttaaaatatgcaatat

SEQ ID NO: 937752 - DNA, 643 bp, Homo sapiens
agattgtggccagactacctctttaggtcagcccatggcccttttctcctcactgggcagggcctccacgcaggaactccagcaacttcagccaagggcttagggacagaactctgattgccctgagcctgagcccctagagggaagagtgaccatggtttccaacagacatagtctttcctcctgctgccactaaggaatgtgggcagcccagacaaatgggtctccctgcagtacagcacacccctttcaccaagaaacagccaatgtgctttggtaagtggatcccagatcccatacccccaaactgggtgacacctcccaatagaggtcgccagrcaccttatacaagaacgttcctactggcatcaagacagtgaccctcgaggacagagataccaaaggaaggagcaagtatccatttttgctgttctccagcctccttgggtaacatctccaggtgcaaaggagcccagatgaataggtcctgaagtgacccccagcaaattgcatcagccctgcagaagagggtccagactgttgaacaaaacaaacaaacaaacaaacaaacaaacaaacggaaagccacaacaacagcgtcaaccaaaaattcccaactaaaacaccatccaaaggtcagcag

SEQ ID NO: 937753 - DNA, 643 bp, Homo sapiens
agattgtggccagactacctctttaggtcagcccatggcccttttctcctcactgggcagggcctccacgcaggaactccagcaacttcagccaagggcttagggacagaactctgattgccctgagcctgagcccctagagggaagagtgaccatggtttccaacagacatagtctttcctcctgctgccactaaggaatgtgggcagcccagacaaatgggtctccctgcagtacagcacacccctttcaccaagaaacagccaatgtgctttggtaagtggatcccagatcccatacccccaaactgggtgacacctcccaatagaggtcgccagacaccttatacaagaacgttcctactggcatcaagacagtgaccctcgaggacagagataccaaaggaaggagcaagtatccatttttgctgttctccagcctccttgggtaacatctccaggtgcaaaggagcccagatgaataggtcctgaagtgacccccagcaaaytgcatcagccctgcagaagagggtccagactgttgaacaaaacaaacaaacaaacaaacaaacaaacaaacggaaagccacaacaacagcgtcaaccaaaaattcccaactaaaacaccatccaaaggtcagcag

SEQ ID NO: 937754 - DNA, 593 bp, Homo sapiens
tattctgctgttaatgcttccaattatattatgaatatttttatatactttaagttctagggtacatgtgcttaacatggatgtttgatacataggtatacatgtgccatgttgctttgctgcacccatcaactcgtcatttacattaggtatttctcctaatgctatccctcccccagccccctaccctccaacaagccctggtgtgtgatgttccccaccctatgtccaaatgttctcattgttcgattcccatctatgagtgagaacatgcggtgtttggtgttctgtccttgtgatagttttctgagaaygatgatttccagcttcatccacgtccctgcaaaggacatgaactcatccttttatatggctgcatagtattccatggtgtatatgtgacacattttcttaatccagtctatcattgatggacatttgggttggttccaagactttgctattgtgaatagtgcctcaataaacatatgtgtgcatatgtctttatagtagcataatttataatcctttgggtatgtacccagtaatgacattgctgggtcaaatggtatttctagttctagatctttgag

SEQ ID NO: 937755 - DNA, 597 bp, Homo sapiens
ttttgccatgcagaagcgctttagtttaattagatcccatttgtctattttggcttttattgccattgcttttggtgttttagtcatgaagtccttgcccatgcctatgttctgaatggtattgcctaggttttcctctagggtttttatggttttaggtgtaagatttaagatgagagtgggggctgggcatggtggctcacgcctataatcccagcactttgggaggctggggtgggtagatcacaaggtcaggagattgataccatcctggctaacatggtgaaaccctgtttctactaaaatataaaaaattagctgggcatggtggcaggcacctgtagtcccagctactcaggaggctgaggcaggagaatggcatgaacctgggaggcagarcttgcagtgagccgagatcatgccacttcactccagcctgggcgacagtgtgagactctgtctcaaaaaaaaaaaaaaaaaaaaaagagagagagtgggtgccaatattcaacattctcaaagaaaagaattttcaacccagaatttcatatccagccaatctaagcctcataagtgaaggagaaataaaatccttta

SEQ ID NO: 937756 - DNA, 601 bp, Homo sapiens
cttaaggcccagtgtctcctaaatcagcttgtggtgaatgctgcctggcttggtactcaccctcaggataatgggctcccttctggcccagggcatgtccaaaaatgctgtttaagagccaagtcctggaatcatagaccccaagagccttcctggtgytctaccctactgtggcaaagctgatacctatgctgtaagactaagtcccttttatttttccctccagttttctcaagcaggagtttcaccctgtagccaccacagctgggaatgtcttgtcacctgaatccagcaagtctcagagtctcacccaaggcccttaatatagtatctgagtatcgctgctggttactcagggtccaagggctcttcagttagcagatgatgaatcttgctgggactgggtccttcccttcaaaggagcgggtttccttatggcttagggtatgtccaggagctagggcctggaaagggggcctcattactctgaccagtgccctatcctgctgtggttgaggtgggcgtggtggtacacacttgtaatcccagctactcaggaggctgaggcaggagaattgcttgaacctgcgaggtggaggtt

SEQ ID NO: 937757 - DNA, 601 bp, Homo sapiens
cttaaggcccagtgtctcctaaatcagcttgtggtgaatgctgcctggcttggtactcaccctcaggataatgggctcccttctggcccagggcatgtccaaaaatgctgtttaagagccaagtcctggaatcatagaccccaagagccttcctggtgctctaccctactgtggcaaagctgatacctatgctgtaagactaagtcccttttatttttccctccagttttctcaagcaggagtttcaccctgtagccaccacagctgggaatgtcttgtcacctgaatccagcaagtctcagagtctcacccaaggcccttaatatagtatctgagtatcgctgctggttactcagggyccaagggctcttcagttagcagatgatgaatcttgctgggactgggtccttcccttcaaaggagcgggtttccttatggcttagggtatgtccaggagctagggcctggaaagggggcctcattactctgaccagtgccctatcctgctgtggttgaggtgggcgtggtggtacacacttgtaatcccagctactcaggaggctgaggcaggagaattgcttgaacctgcgaggtggaggtt

SEQ ID NO: 937758 - DNA, 623 bp, Homo sapiens
  misc_feature 538: n = A,T,C or G
gttttcatagttttgggttttacatttaagcctttaatacatcttcagttgatttttgtatatggtgtaagaaagaagtccagtttcaattttctgtatatggctagccagttctgccatcaccgttcattaaataaggaatcttttgcccattgcttgtttttgtcaggtttgttgaagatcagatggtcataggtgtatggccttatttctgggttctctattctgttccattggtctatgtgtctgttcttgtaccagtaccatgctgttttggttactgtatccctatagtatagtttgaagtcaggtagtgggatgccttcagctttgttctttttgcttaggattaccttggctatttgggctcttttttgttgcatataaattttaaggtgtttttttttctaattctgtgaagaatatygatggcagtttgatagaaatggcattgaatctatagattgctttgggcattatggccattttcatgatattgattctttctatccatgagcacggaatgtttctccattgnttgtgtcctctctgatttccttgagcagtggtttgtagttaaccttgaagaggttctccacttcctttgttagctgtattcttag

SEQ ID NO: 937759 - DNA, 638 bp, Homo sapiens
ctatctgtcatctgagattatttttgttggaagattgttttattactgattcaattttgtttctcattattgatctgttcagcattttaatttctacttggttcattcttgggaggttgcatgtttccaggaagttatccatttccttcaggtgttctagtatgtgcacatagatgtgttcatattagcctctgatggtcttttgtactgctgtggtatttattgtaacgtcacctgtattatttctaaatgtatttattttaatcctctcttttttcttttcttggttaatctagctagcagtctgtccattttgtttatcttttcaaagaaccaactgcttgtttcattagttctttgtatatatatatttggtctcaatttcatttagttctgctstgatcttagttacttcttttcttgcgctagttttgggtttggcttgttcttgtttttctagttcctttaggtgcaatattaggttgttcatttgagatctttctaactttttgatataggcatttaatgctataaaatttcctcttagcactgctaaacactcaataaagacaatggtgcaatactttaaaaaaatcccaaaataagaaaattgtgattccagactcatacaccaactc

SEQ ID NO: 937760 - DNA, 689 bp, Homo sapiens
atgtagtcaggtaaaggaagaacagaagggggttaaaattgattgatctaaaaaaattaagtcgggccaggcaaggtggcttacgcctgtaatcccagcactttgggaggctgaggtgggtggatcacctgaggtcaggagtttgagaccagcctggccaacatagcgaaaccccatctctactaaaaataacaaaaattagctgggcatggtggtgggcgcctgtaatcccagcgactggggaggctgaggcaggagaatcgcttgaacccaggaggtggaagttgcagtgagccgagatcgcgccattgcactccagcctgggcaacaagagcaaaactccgtctcaaaataataataataataataataawaataaagtcatagtagcaaaaaaggagtaatataggccccaaacaagaacttcagagaaatacacgtcaaaagagggaaagagaaagagaaatgaacctagcccaaatgaatgcaacaataagattacctctctcaaaacgacccatcttcagcccattgagtaggtctgtgagaggaggtataaatccttggagttctttacactgtaggaaaataggacaaaggctgtaagaagacaaaaaactgcccacaccagcagtggctcttccttcacctccaaatctgggagtcaatactgtcctcacagggtcctt

SEQ ID NO: 937761 - DNA, 599 bp, Homo sapiens
ttgccttctcgaccctgtcattcttttcttctttcgtcttttcaattcgccccatctgcccctggcctcatttctgtacatggctttgtatctagtggccgcaagatgcactatgtgtattttcacatggaaatgtccatggccagagtgaggaactgaaaggatgtctttttgaaatggaattaggaaaacacctacttttgtttacagaagggaaagatgaatggaacatcatcgaggatcttgcaagagccctctctgatacagaggaagcctgtaaaccattttctattctttctcttggccacagacattcctttaaacatgtgctgaccttctgcttcgaggtctccttgaggacactgtttcagaaatctctgttgcaatatttgagcggatcactcaaccctttccactcttaatttttctctaccrtctcaccttaggcaatataaagtcctggttcacgctcaggaacgagagctgacccagttaagggagaagttgcgggaagggagagatgcctcccgctcattgaatgagcatctccaggccctcctcactccggatgagccggacaagtcccaggggcaggacct

SEQ ID NO: 937762 - DNA, 553 bp, Homo sapiens
gagagaccccatctctaatgaataagtaaatgaataaaaattgcagtaattaagacaatgtgtatattagtctgttttcacattgctgataaagacatacctgagactcagcaatttacaaaagaaagaggtttaactggacttacagttccacatggctggggaagcctcatagtcatagcagaaggcaaggaggagaaagtcccatcttccatggatggcaacaagcaaagagagaatgaggaagaygcaaaagcagaaacccctaaaaaaaccatcagatctcgtgagactttttcaataccatgagaacagtatgggggaaaccacccccgtgattcaattatctcccactgggtccctcccacaacatgtgggaattatgggagtacaattcaagatgagctttgggtgaggacacagctaaacaatatcaatgtggtatcaatgtcatgagagacaaacagataaaatgggaaagaatacaggccacaaatagacccacacatatatggactgcttatttttgacaaaggtgcaaaaaaaattcagt

SEQ ID NO: 937763 - DNA, 476 bp, Homo sapiens
tgtaccctgcagagccacagagtcagagatgcccaaggcctagggagcccaccctttgcatcagcatttcctggatgtgacacatggaatcaaaagaagattttggggctttaagatttaatgactgcccagccaggttttggatttgcatagggcctgtggcccctttgttttggccaatttctcccatttagaatgggagcayttatccaacgtctgtacccccattgtatcttgggggtatctaacttgcttttgattttacaggctcagaggtggaagggacttgccttgtctcagatgaggctttggacttggacttctgagttactgctggaatgagttaaaaatttgggagactgttaggaaggcatgattggttgtgaaatatgaaaaggacatgagatttggaagaagccaggagaagaataatatggtttgtctctatctctccacccaaagctcatcttgaatta

SEQ ID NO: 937764 - DNA, 616 bp, Homo sapiens
gaattcaagcgaggaatgacacttgggacacatcaacacgggctaaggtcccattccttgtaacatattataaaacatgtagcacataaacctgccccatcaagggaaccagtgtaattggtgcaccttctctcgtagcatttaaggtgttatctctataaatacagtgcattttgctttaataaaaaatgaattttccagaacagtgacagtattgaccttacatattatccaaatagaaattrtaatgaaacaagtcgaacagtgagtagttataatagatatgcaaatattggtcttttcttaaaggtctttcggcctactcacacgtgtctcttatgtgtctgagagggtggattcagcctgcatttataatctaggaggacacagaggaggaagggagagggaggaggggaagtctgtcaaacaatcacagaggataagaatccaggaagattgtgctagagtccatagcttcagaaatgggctttggggtaactgttctgtgttcagtgtgttcacatgtgcagtatcattttatccacacctgtgacacaggtatggctgctgttattttatgaatgagaaaaccaaggctcataaacatgtgtaactt

SEQ ID NO: 937765 - DNA, 702 bp, Homo sapiens
ccccccaacccccggacaggccccggtgtgtgatgttcccctccctgtgtccacgtgttctcactgttcaacccccacttatgagtgagaatatgaggtgtttggttttctgttcctgttttcatttgctgagaatgatggtttctagtttcatccatgtccctgcaaaggacatgaactcatccttttttatggctgcatagtattccgtgaagtatatgtgacacatttcctttgtccagtctatcattgatgggcatttgggttgtttccaagtctttcctattgtgaatagtgctgcaatgaacatacatgtgcatatgtctttatactagaaggatttataatcctttgggtacatacccagtaatgggattgctgggtcaaatggtatttctggttctagatccttgaggagaaccagagattttttttagttactatttctaaaggcatgggtaggttaagaaaactagcaagggaggatgagacacccaagactaaccaccgtgsgaagtcataaggaaagcttagcctgaagggccaagaagatgaaataatttttgcagatgctaagtgaaactgaggcagtgaaggaggggcctttgggaggagctgtagcctagaggaaggaagccagtgccagacacgtggccagagaggccatagaggcagggctctgatctctctcacttctcagcc

SEQ ID NO: 937766 - DNA, 599 bp, Homo sapiens
cttttatttctttatcttgcccaagtgctttggccatgacttctagtattattttgaataaaagtagtaaaagtgagcatccttgtcttgttctagatcttagaggaaaggcattcaatttttccatgttcagtacaatggtagctgtgggttttgtcatatagcctttattattttgaggtatgttccttctgtatgcagtttktggagcattttatcataaaaggatgttgaattttctaaaatgctttttcagcatgtatcaaaatgatcatttttttcccttggtgctgttaatgtgatatatcatgtttattgatttttgtgtgttgaaccatacctgcatccctgggatgaattccacctgatcttggtgaattatcttttcaatgtgttgtaaaatttggtttgcttgtattctgttgagaatttttgtatctatgttaatcagtgacattggcctgtagttttctttgtttgttgtgtctttgcctggttttggtatcaagttaatgctatccttgtagaaggagtttggatatattccctcttctttaatttttttgaagaatttgagtagaattagtgttagttcttta

SEQ ID NO: 937767 - DNA, 599 bp, Homo sapiens
cttttatttctttatcttgcccaagtgctttggccatgacttctagtattattttgaataaaagtagtaaaagtgagcatccttgtcttgttctagatcttagaggaaaggcattcaatttttccatgttcagtacaatggtagctgtgggttttgtcatatagcctttattattttgaggtatgttccttctgtatgcagtttttggagcattttatcataaaaggatgttgaattttctaaaatgcyttttcagcatgtatcaaaatgatcatttttttcccttggtgctgttaatgtgatatatcatgtttattgatttttgtgtgttgaaccatacctgcatccctgggatgaattccacctgatcttggtgaattatcttttcaatgtgttgtaaaatttggtttgcttgtattctgttgagaatttttgtatctatgttaatcagtgacattggcctgtagttttctttgtttgttgtgtctttgcctggttttggtatcaagttaatgctatccttgtagaaggagtttggatatattccctcttctttaatttttttgaagaatttgagtagaattagtgttagttcttta

SEQ ID NO: 937768 - DNA, 650 bp, Homo sapiens
acatttccaaaacccctatgtcaacgaatgggttttggaaatgtgatcagcctcatatttaatatcgggagatacacaatagataaaaaatgttgcctttggaaggatgtgacttgaataatgctgcaaaaggtggaacacaatttgagtgagttaagaagcccagggtagttattttggaagttgcagatttgctagcctgctatgttgagatatctctgaagacaggggctcaactccaccaggacctgaggtctttgcttaaataaccccacataaggcccttgtttyttccaaggaccaagagaactgagagctctgtttcctttttttttttctttttcttttttttttttttttgagatggagtctcgctctgccgcccaggctggagtgcaatggcgcgatctcgactcactgaaacctctgcctctcaggttgaagcaattctcctgcctcagcctcccaagtagcagggactacaggcactcaccaccactcccggataatttttgtatttttagtagaggcggggtttcaccatattggccaggctggtcttgaactactgaccttgtgatctgcccacctcggcctcccaaagtgctgggattacaggtgtgagccaccacgcccggctgagaactatg

SEQ ID NO: 937769 - DNA, 650 bp, Homo sapiens
acatttccaaaacccctatgtcaacgaatgggttttggaaatgtgatcagcctcatatttaatatcgggagatacacaatagataaaaaatgttgcctttggaaggatgtgacttgaataatgctgcaaaaggtggaacacaatttgagtgagttaagaagcccagggtagttattttggaagttgcagatttgctagcctgctatgttgagatatctctgaagacaggggctcaactccaccaggacctgaggtctttgcttaaataaccccacataaggcccttgtttcttccaaggaccaagagaactgagagctctgtttcctttttttttttctttttcttttttttttttttttgagatggagtctcgctctgccgcccaggctggagtgcaatggcgcgatctcgactcactgaaacctctgcctctcaggttgaagcaattctcctgcctcagcctcccaagyagcagggactacaggcactcaccaccactcccggataatttttgtatttttagtagaggcggggtttcaccatattggccaggctggtcttgaactactgaccttgtgatctgcccacctcggcctcccaaagtgctgggattacaggtgtgagccaccacgcccggctgagaactatg

SEQ ID NO: 937770 - DNA, 600 bp, Homo sapiens
atttcaggggacagagtagaatattggtagttgtgtctagaaatttggcaggattcaagtattgagaaggacttgtacgttacgctacagagtttgaatgttatactataaaacaaaatggggaattaaccactgaaggattctgagtagaagaatgacataacaaaatttgcattttagaaaaataactctggcagtgttgtggagggtggaactgaaggatgtaaaagcagtcttcatttatgaagtcacatgttcattgagtttagcagataccaattaaacacattaaaatcttgaaataccaacttttgaattagtgtgcaattgattgtgctgttcttctgtgtatattgactatattaaatactcaagaatctgattttcggtctsggctacacagtatctgaactcccttataaagttagtacctggcatctttgcttctcaggtaggcagtgggcagtttttcttttcttttcttttctttttttttttgagacggcgtcttgctctgtcgcccagactggagtgcagtggcacgatctcggctcactgcaagctccgcctcctgggtttgtgccattcttctgcctcagc

SEQ ID NO: 937771 - DNA, 547 bp, Homo sapiens
cgtctggtcctgggcattttttgggtggtaggctattaactattgcctcaatttcagaacttgttattggcctattcagggatttgacttcttcccagtttagtcttgggagggtgtatgtgtccaggaatttatccatttcttctagattttctagtttatttgcatagaggtgtttatagtattctctgacggtagtttgtatttctatgggatcagtggtgatatcyccttgatcatttttcattgtgtctatttgattcttctctcttttcttctttaatagtctggctagcagtctatttattttgtttatcttttcaaaaaaccagctcctggattaactgatttttttgaagggtttttcatgtctccatttccttcagttctgctctgatcttacttatttcttgtcttctcctagtatttgaatttgtttgctcttgcttctctagatcttttaatgtaatcttttattgtgatgtttgggtgtcaattttggatctttcctgctttatgttgttctccaaactggttattccagtta

SEQ ID NO: 937772 - DNA, 692 bp, Homo sapiens
taccaattcctataaccttttttcaaggttcttagcttccttgcattggattagaacatgctcctttagctcagaggagtttgttattacccaccttctgaaacctacttctgtccattcgtcaaactcattctctatccaattttgttcccttgctggtgaggaatkgtgatcctttggaggagaagaggcattctcgtttttgaaattttcagcctttttgtgctgttttttcctcatctttgtggatttatctacctttggtctttgatgttggtgaccttcagatggggtttttgagtggacatcctttttgttgatgttgatgaaattcctttctgtttgttagttttccttctaacagtcaggtccctctgctgcaggtctgctggagtttgctggaggtgtttgtctgggtatcaacagcagaggctgcaaaacagcaagaattgctgcctgttccttcctccagaagcttcatcccagaggggcacccgccagatgccagtcagagctctcttgtatgaggtgtctgtcaacccctgttgagaggtggtgtctcccagtcaggaggcataggggtcaggaatccacttgaggaggcagtctgtcccttagcagagctctagtgctctgctgggaggtccgctgctctgttcagagccggcaggcaagaacgtttaagtctgctg

SEQ ID NO: 937773 - DNA, 692 bp, Homo sapiens
taccaattcctataaccttttttcaaggttcttagcttccttgcattggattagaacatgctcctttagctcagaggagtttgttattacccaccttctgaaacctacttctgtccattcgtcaaactcattctctatccaattttgttcccttgctggtgaggaattgtgatcctttggaggagaagaggcattctcgtttttgaaattttcagcctttttgtgctgttttttcctcatctttgtggatttatctacctttggtctttgatgttggtgaccttcagatggrgtttttgagtggacatcctttttgttgatgttgatgaaattcctttctgtttgttagttttccttctaacagtcaggtccctctgctgcaggtctgctggagtttgctggaggtgtttgtctgggtatcaacagcagaggctgcaaaacagcaagaattgctgcctgttccttcctccagaagcttcatcccagaggggcacccgccagatgccagtcagagctctcttgtatgaggtgtctgtcaacccctgttgagaggtggtgtctcccagtcaggaggcataggggtcaggaatccacttgaggaggcagtctgtcccttagcagagctctagtgctctgctgggaggtccgctgctctgttcagagccggcaggcaagaacgtttaagtctgctg

SEQ ID NO: 937774 - DNA, 632 bp, Homo sapiens
tctgtccttctggagcatcatttctgtctcctagtaccaaacaaagcaagcaggctccttagacctgcatggaagccttcacacgtcctgctccccaccacacccacgcagaggaggcagggttaagcgaaggtgagaagttgaggcagacatggcaggaagtgtgattcagatcaatatgtgacatttgctgacactcacattctaatgatggcctttttatgctcaggtttattcggcagcaggccaccagcctttctctcawcattccttttaatcatgtttggtttttatgtgaaaaaataaataattcacagactgatcattcccaaatctgaatcatagtttatggactccaatttgtgttttcataaccctcagtttgtctactgcatcacaaacagaggactcttttttttttaatcttgaaaatcagccttgacctcagtcttaagtcagagtcagggagaacatcaggtaagcacccttcatttttctggcccctgaaaaattaaagagaaatcccacctcttccttactcataatcctgaacagaaaaacagaactgtatcagtcaccaaccaccgtaggcattagtgaacaaactaaaaaatgtccttcttaacaataaa

SEQ ID NO: 937775 - DNA, 608 bp, Homo sapiens
aagaaaaataaaaaaaatttacagataactgaaaattaaataatatactccaaaataatcactggttcaaaagtaaatccaaagatgaattagaatatgcttagtatgaataataacaaaaatacaatgtgccaaaacttatgagatacagtgaatgcatatgaaaatgcaagaaacytaaatagcagaaatcatcttgaaaaaggacagtgttggaggactcacacttcctaacttcaaaacttactatcaagaaactgaggaaggttggagcaagatggtggaagagaaggcttcacttatagtccccttaccacccccaactgcaagggcaccaatttaacaattatctaaacaaaaaaacgcaccttcataaataaatcaggtgagcactcacagcacctggttttaatttcatgctgaaagaggcactggaagagggtaggagaaacagtcttaaatcacagataccacccccttttttcatcccttgacagtagctgagtggtgcagagaaagaatcatgtgcttgagagagggagagaacagcaactgtgagacagacactgcattgaactcagtgctgctctgacatagcagaaagcaaa

SEQ ID NO: 937776 - DNA, 637 bp, Homo sapiens
gtttcctgactttttttttttttttttttttttttttttgagacagagtctctctctgtcgcccaggctggagtgctgtggtgcaatctcggctcactgcaagctctgcctcccaggttcacaccattctcctggctcagccttccgagtagctaggactacaggtgcctgccaccacacygggctaatttttttgtatttttagtagagacggggtttcaccatgttagccaggatggtcttgatctcctgacctcgtgatctgcctgtctcggcctcccaaagtgctgggattacaggcgtgagtcactgcacccagcctgtttcctgactttttaatgatcactattctaactggcgtgagatggtatcttattgtggtttttatttgcatttctctaatgaccagtgatgatgacatttttttcatgtttgttgcctgcataaatgtcttctgttgagaagtgtctgctcagatccttcgcccactttaatgaagttgtttgtttttttcttctaaatttatgttctttgtagattctagatattacccctttatcagatggatagattgcaaaaattttctcccattctgtaggctgcctgttcactctgatgttagtttcttttgctgtgc

SEQ ID NO: 937777 - DNA, 678 bp, Homo sapiens
ttcttccttctggtgggttcgtggtctcgctggctcaggagtgaagctgcagacctctgtggtgagtgttacacctcttaaggtggcgcgtgtggagttgttcgctcctcctggtgggtttctggtttcactggcttcaggagtgaagctgcagaccttcgccgcgagtgttacaactcataaaggcagcgtggacccaaagagtgaaagaacaaaccttccactagtgtggaaggggacccgagtgsgttgccactgctgtctggggcagcctgcttttattctcttatctggcccccgcccacatcctgctgatttgtccattttacagagagttgattggtctgttttacagagagctgattggtctgttttgacagggtgctgattggtgcgtttacaatccctgcgctagacacaaaagttctccacctccctgctagattagctagatacagatgtcgactggtgtatttacaaaccctgagctagacacagagtgctgatttgtgcatttacaaaccttgatctagatacagagtgccgactggtgcatccacaatcccttagctagacataaagattctgcaagtctccaccagattaactagatacagagtgccaattggtgcatccacaaaccctgagctagacacagggtgctgattggtgtgttta

SEQ ID NO: 937778 - DNA, 642 bp, Homo sapiens
gtgttgtcttggatagccaccatcacaatcaagatacacaacagtaccatagccgtaagagtcccgcatgttaccactttatgaacatacctattccctcttcccccattcctaatccctcacaaccagtaatctgttctccatttcaaaaatgatgtttcatcaatgttgcatagatgaaatcacgcaacatgcttaagattggctttttttcactcagcataatttcttctaagctatgtgtgtgttgtttttctgtttttactgttagtagtatttccacagtataaatgtactacaatttgtttaatcattcactcattacagaacatttgggttgtttccagtttggaactattataaataaaactgctatgaacatttgcatatctatttatttatcttagtytctactctattatttatttctaaaagttctttcttgttctctcattgtttcttttctatagcaccttcttcttgttttataggtttaatatctttccttatctttgcagattttaattttaaaacaaatgttttcttttttttttttttttttggagacaggatctcgctctgctgcctaggctggagtgcagtggcttgattgcggctcactgcaactccgcctcctgggtt

SEQ ID NO: 937779 - DNA, 642 bp, Homo sapiens
gtgttgtcttggatagccaccatcacaatcaagatacacaacagtaccatagccgtaagagtcccgcatgttaccactttatgaacatacctattccctcttcccccattcctaatccctcacaaccagtaatctgttctccatttcaaaaatgatgtttcatcaatgttgcatagatgaaatcacgcaacatgcttaagattggctttttttcactcagcataatttcttctaagctatgtgtgtgttgtttttctgtttttactgttagtagtatttccacagtataaatgtactacaatttgtttaatcattcactcattacagaacatttgggttgtttccagtttggaactattataaataaaactgctatgaacatttgcatatctatttatttatcttagtctctrctctattatttatttctaaaagttctttcttgttctctcattgtttcttttctatagcaccttcttcttgttttataggtttaatatctttccttatctttgcagattttaattttaaaacaaatgttttcttttttttttttttttttggagacaggatctcgctctgctgcctaggctggagtgcagtggcttgattgcggctcactgcaactccgcctcctgggtt

SEQ ID NO: 937780 - DNA, 561 bp, Homo sapiens
tctaaattgcactggcctaggtgatagaacaggaagaatggagcaaggaaccagagctcacagctctggaatggaaactgactcatgtggaaaaacagccacccctcagcagattttttttggcttcttttatatagaaagtatatacttaaatatggcaaatagcttgctacttctctaagcaccagtttcctcatctgtagaggggttagtatcttctttataaacttgttaagagacttacacaaaaataacttgttaaatgcctggcatagtacctcttccctatttagttgccccctccrttatatactcagcaagttcagaatgaaagtttagaatgtgaagagttaaagaaaaagcaaaatgtaaatgccctggcagagcttcacaagaaaatttgctacagagtggaattcagctaaaaaaaaaaaaaaaaaaaaaaaaaaatcctctgatttacaatttccttcaaagacatctagtttctgaaataacaaaaggactgtgttgttatgtgaaattaaagccataaaagttagagcaaagctctagaatatt

SEQ ID NO: 937781 - DNA, 553 bp, Homo sapiens
ctgcctcagcctctcgagtagctgggattgcaggcatgcaccaccacgcccggctaattttttgtattttagtggagatggggtttcaccatctctaacttgaactcctgatctcaagtgatccacccgcctcggccttcaaaagtgctaggattacaggtgtgagccaccgcgcctggcctatacgctttttctgttaaaaaatatttttaagttttaaacttttgttaaaattgagacagaagcaaacacattacttastaggcctacacagagccaggattatcagtatcaatcccttccgcctccacatatgtcccactggaaggtcttcggggcagtaacggacatggagctgttatctcctaacatgccttcttctggaatacctcctgaaagacctgcctgaggctatttaacagttaactttttttttatatgtaagtaggagtactctaaaataacaatataaaatgtagtacaataaaataataagccagtaacgtagttgtttattatcaagtatgtactgtacataattgtatatgctaga

SEQ ID NO: 937782 - DNA, 598 bp, Homo sapiens
tttgcagaaattgacaagccaatcctcaaattcaaatggaaatacaaggggcccagaacagccaaaacaatcttgcaaataacaaagttggtggattcacacttctcaattttctaagcttcctacaaagctacagtaatcaagactgtgtagtactgacataagaatggtggacatgtagatcagtggaatagaactgagtctagaacatacatttatgggcaactaatttttgacaagggtgtccagacaataacacaatggggaaagaacagtctcccccataaatggtgctgagacaagtgaacatccaaatgcaaaagaatgaagttagacrctaacctcataccatatacaaaaattcaccagaatagatcaaagacctaaatggaaaagctaaaagtacaaaactgttttaagtaaacataggcataaatcttcatgaccttggtgtcttagatatgattccaaaagcacagcgacaaaagaaaagataaagtggaaatcacacaaattaaagatgtttgatttccagaataccctaaaagagaacccagagaatgagagaaaacttctgcaaatcatgtctgataagagt

SEQ ID NO: 937783 - DNA, 598 bp, Homo sapiens
tttgcagaaattgacaagccaatcctcaaattcaaatggaaatacaaggggcccagaacagccaaaacaatcttgcaaataacaaagttggtggattcacacttctcaattttctaagcttcctacaaagctacagtaatcaagactgtgtagtactgacataagaatggtggacatgtagatcagtggaatagaactgagtctagaacatacatttatgggcaactaatttttgacaagggtgtccagacaataacacaatggggaaagaacagtctcccccataaatggtgctgagacaagtgaacatccaaatgcaaaagaatgaagttagacgctaacctcataccatatacaaaaattmaccagaatagatcaaagacctaaatggaaaagctaaaagtacaaaactgttttaagtaaacataggcataaatcttcatgaccttggtgtcttagatatgattccaaaagcacagcgacaaaagaaaagataaagtggaaatcacacaaattaaagatgtttgatttccagaataccctaaaagagaacccagagaatgagagaaaacttctgcaaatcatgtctgataagagt

SEQ ID NO: 937784 - DNA, 650 bp, Homo sapiens
agggagggaggggcagtgtttgagcagagagagactgcccgccctctcagagtggggaaggggaggtaggaaggaaaggttatggcattgctgggcagcgtcagatgcccatctgaggtttgtggtcacagattcaaagtgagatcagtcagcagggttacaagggtttctccagcaatactcagaggcctgggtgcagattccaggaagaccaatagatagggttagccaggacagaggttttgctggaagagagttaaggacatttgtaaggaaatgattacaatccatatgatatagtttggctctgcgtccccacccaaatctcatctcgaatkgtaattgccacgtttgagggagggacctggtgggaggatcatgtgggcggtttcctccacgctgttctcatgatagggagggagttctcatgagatctgatggtttataagcagtgatttcccctgtgagttatctctctcctgctgccatgcaagatgtgccttgcttcccctttgccttccaccatgattgtaagtttacaaagaactccccagccatgtggaactgtgagccaattaaagctctttcctttataaattacccagtctcagtgattctttatagcagtgtgagaatagactaatacacca

SEQ ID NO: 937785 - DNA, 650 bp, Homo sapiens
agggagggaggggcagtgtttgagcagagagagactgcccgccctctcagagtggggaaggggaggtaggaaggaaaggttatggcattgctgggcagcgtcagatgcccatctgaggtttgtggtcacagattcaaagtgagatcagtcagcagggttacaagggtttctccagcaatactcagaggcctgggtgcagattccaggaagaccaatagatagggttagccaggacagaggttttgctggaagagagttaaggacatttgtaaggaaatgattacaatccatatgatatagtttggctctgcgtccccacccaaatctcatctcgaatggtaattgccacgtttgagggagggacctggtgggaggatcatgtgggcggtttcctccaygctgttctcatgatagggagggagttctcatgagatctgatggtttataagcagtgatttcccctgtgagttatctctctcctgctgccatgcaagatgtgccttgcttcccctttgccttccaccatgattgtaagtttacaaagaactccccagccatgtggaactgtgagccaattaaagctctttcctttataaattacccagtctcagtgattctttatagcagtgtgagaatagactaatacacca

SEQ ID NO: 937786 - DNA, 629 bp, Homo sapiens
gtgggggagattacaaagtacattgatcagttaggatggggcaggaataaatcacaatggtggaatgtcatcagttaaggctatttttacttcttttgtggatcttcagttacttcaggccatctggatgtatacgtgcaagtcacaggggatgcgatggcttggcttgggctcagaggcctgacattcctgccttcttatattaataagaaaaataaaataaaatcgtgttgaagtctyggggcagcgaaaatttttggggatggtatggagagagaatgggcgatgtttctcagggctgctttgagtgggattaggggcggtgtgggaacctagatcgggagagattaagctgaagggagatcttgtggtaaggggtgatattgtggggttgttagaagaaacatttgtcgtgtagaattattggtgatggcctggatacggttttgtatgaattgaaaaactagatggaataagaaaaggagaaaaacaggtacaaaaggtctaagaattgggagaacctaggacgtctaattagagagtgcctaaggagattcaacatagtcctgccagcaaagattatttatttacttcaagagttaagagtggcagtttggggatagcacgag

SEQ ID NO: 937787 - DNA, 629 bp, Homo sapiens
gtgggggagattacaaagtacattgatcagttaggatggggcaggaataaatcacaatggtggaatgtcatcagttaaggctatttttacttcttttgtggatcttcagttacttcaggccatctggatgtatacgtgcaagtcacaggggatgcgatggcttggcttgggctcagaggcctgacattcctgccttcttatattaataagaaaaataaaataaaatcgtgttgaagtctcggggcagcgaaaatttttggggrtggtatggagagagaatgggcgatgtttctcagggctgctttgagtgggattaggggcggtgtgggaacctagatcgggagagattaagctgaagggagatcttgtggtaaggggtgatattgtggggttgttagaagaaacatttgtcgtgtagaattattggtgatggcctggatacggttttgtatgaattgaaaaactagatggaataagaaaaggagaaaaacaggtacaaaaggtctaagaattgggagaacctaggacgtctaattagagagtgcctaaggagattcaacatagtcctgccagcaaagattatttatttacttcaagagttaagagtggcagtttggggatagcacgag

SEQ ID NO: 937788 - DNA, 629 bp, Homo sapiens
gtgggggagattacaaagtacattgatcagttaggatggggcaggaataaatcacaatggtggaatgtcatcagttaaggctatttttacttcttttgtggatcttcagttacttcaggccatctggatgtatacgtgcaagtcacaggggatgcgatggcttggcttgggctcagaggcctgacattcctgccttcttatattaataagaaaaataaaataaaatcgtgttgaagtctcggggcagcgaaaatttttggggatggtatggagagagaatgggcgatgtttctcagggctgctttgagtgggattaggggcggtgtgggaacctagatcgggagagattaagctgaagggagatcttgtggtaaggggtgatattgtggggttgttagaagaaacatttgtygtgtagaattattggtgatggcctggatacggttttgtatgaattgaaaaactagatggaataagaaaaggagaaaaacaggtacaaaaggtctaagaattgggagaacctaggacgtctaattagagagtgcctaaggagattcaacatagtcctgccagcaaagattatttatttacttcaagagttaagagtggcagtttggggatagcacgag

SEQ ID NO: 937789 - DNA, 782 bp, Homo sapiens
aaagaatagtaaagaaagcatgtttgagatccagaacagaataatgggtagtagagggaggtattgaggataggagagcatatgggtttggcatcacggggtggataggcaaaacaatttggttgataaggggcagattctgaactaaccagtaagccttgtctggtttttggacaggtaaaatgggggaatggtaaggagagttcataggctttaaaaggccatgttktagcaggcaagtgataacaggctttaatccttttaaatcgtgctgtgggatgggatcttggcattaagtggggtaagggtggttaggttttaatgagatggtaaggggtgcatgatcggtcgctaaggagggagtagaagtatcttatacttgtgggttaaggtgggggaatacaagaggaggacgcaaaggaggctttggattgggaagaagggcggcaacgagatgcagctatagtccaggaatagtcagggaagcagataatttggttaaaatatctcggcctaataagggaactgggcaggtggggataactaaaaaagagtgcataaaagagtattgtctaagttggcaccagagttggggagttttaagaggtttagaagcctggctgtcaatacccacaacagttatggagtcaagggaaacaggcccttgaaaagaaggtaatgtggagtaggtagcttccgtattgattaagaagcggacggacttaccctccactgtgagagttacctaaagctcagcgtccgtgatggtctgtggggcttcc

SEQ ID NO: 937790 - DNA, 782 bp, Homo sapiens
aaagaatagtaaagaaagcatgtttgagatccagaacagaataatgggtagtagagggaggtattgaggataggagagcatatgggtttggcatcacggggtggataggcaaaacaatttggttgataaggggcagattctgaactaaccagtaagccttgtctggtttttggacaggtaaaatgggggaatggtaaggagagttcataggctttaaaaggccatgttttagcaggcaagtgataacaggctttaatccttttaaatcgtgctgtgggatgggatcttggcattaagtggggtaagggtgrttaggttttaatgagatggtaaggggtgcatgatcggtcgctaaggagggagtagaagtatcttatacttgtgggttaaggtgggggaatacaagaggaggacgcaaaggaggctttggattgggaagaagggcggcaacgagatgcagctatagtccaggaatagtcagggaagcagataatttggttaaaatatctcggcctaataagggaactgggcaggtggggataactaaaaaagagtgcataaaagagtattgtctaagttggcaccagagttggggagttttaagaggtttagaagcctggctgtcaatacccacaacagttatggagtcaagggaaacaggcccttgaaaagaaggtaatgtggagtaggtagcttccgtattgattaagaagcggacggacttaccctccactgtgagagttacctaaagctcagcgtccgtgatggtctgtggggcttcc

SEQ ID NO: 937791 - DNA, 588 bp, Homo sapiens
tgttctttagaaatgcctctcagagtctttaatatgctcatgctgattgtggatatttaagagaaagaggtttaagtatcccttactcatctcatttagcccctatgtttttcttcatagcatctctcagggccaggtgttccaaaaaacatacttggaaaagcccaactctgctactcttctccattgcctgtttgagactaagaattctttcattagctgactttccttctatgcacccattcctcattcttctccccaatattacttgcccatttctytgttctattccttcacccttccttctcttcctccttttattctctttttggaaatttaaaattactattgagcacctggaaaggtggcttcgagatctcaggctctggtcaagactctgagaagagatcaccaaagccctctgctctcttgagaggtttacattgagaaagaggaggcgggatggagaggagaactaaataagtaagcaaatacatgtacaagtgatttttttttttttttgaggcagagttctcgctctgtcacccaggttagagtgcagtggtgcaatcatggctcactacaacc

SEQ ID NO: 937792 - DNA, 628 bp, Homo sapiens
gctacccattgcaagtggactttaaaaaggcaaagttacacatcatctggcttctgcttgcctctctgaatttatctccctccatgttccccccactatgctccaattatgttagctttaagttagctatcttgtttttttttttttggtttttttgtttgtttgtttgtttttgagatggagtctcgctctgtcacccaggctggaatgcagtggtgcgatcttggctcactgccacttctgcctcctgggttccagtcccagcctcccragtagctgggattataggcacacgccatcacgtttggctaattttgtatttttagtagagacggggtttcaccatgttggcaggctggcctccaacttcttacctcaggtgatccacccacctcggcctcccaaagtgctgggattacaagcatgagccgtcgcgcctggcctatgttagctttcagttagattctgtagaagatacacactgttgatggcctatccttatcctgcctgcagttgaagagttttcagcattctgacagtttctcatctttagcactgtgtctctttttgtgtttgcctgagggctttcttcaggggtttgcttgacctccacaggtgcaacctagaa

SEQ ID NO: 937793 - DNA, 695 bp, Homo sapiens
aatgtgctgagagcgggctcaggttgccacaggcatggctggagactaggaatagagccttgctcactgacccatttcatgtctaggcttccaactgagactacagtttcattacaacctatatgcgcccataggtcctgcctgcggcaatgacgtctctcgggtcagtaaggggtacttggaactggaatatcacccctatctggaagaccaggtggaggcttatcaccttcacagtaaggtactcactgtccacgtcaagagccaagccaaggtactgttcctccaatgagtraacagcactgctgtagggctggcctaagtcaggcagttcaagataacctgaaggagtcgaataacatctatccagtgagtcctgcaagacttcaggctctttctcatccagcagctccctgctgagcctggaaaagtaggaaaaagtaaagaataagtcagggggaatcagaaaccacacagccccagctagatttcatggctaacataaggaactgtttaaaaagaaaaaggacagatccattaatgaggtaatgaattattgcctttatgttgggatagaccagggccaggtagaaaagaatgaaagagaaagacagggagagggagagagagagagaggagaaagtgagctcagcgaattggccgggtgacacactgatgaaggggtcaaaggacac

SEQ ID NO: 937794 - DNA, 748 bp, Homo sapiens
tgtagagaacatgaattctggagtcagatagacctatgtactaattctgcttcgaatactagtgctgctgtcttcagccttttacataaactctttgagccgctctttacttatccatagcatgtactccgtataccccaygcagactctcagaagaagctctactgtttatttccttgcttttccttttgtgaaatactattcctctgacctgaaatctgtcaaaagtccccacctgccactactgtccccattaaaaagtacctcagtcttttatgtcaaggctatataatcctgatttctaatgttgcattaaaactttcttgtgattattcacgttttgccctcttatgaaattgtgcactacttaatcaaaagaaggttcctgtctttccattttgtgtctccagacacctatcagattgtctagcacagagtatatattgcctaagtttcaaccgaactaaattactcatggcccactgtgagagttgagcctgaagtcagtaaggactgttatggggattcgcagagggcaggggatgtttgagctacacagatgctctgggtagcagtgcaagtggtgcagttgactttcaatttaagctccaaatgcagaaacgcgaccaaaagatcttcaaaactttctccgaccacatagcatagagagaaggcagccgtcagaacaaaggatcataggtcccacagagagaactcagacatgttgtgcaggttagagacagggagc

SEQ ID NO: 937795 - DNA, 431 bp, Homo sapiens
aaacccaacctcaatcatcttggggtttcccagggatcttttccttggatccttagcccctgtcttcaccacaagcacccacccacactcggtggcacttgtagctgagaatagcaccacctctgcataagagaaattttagagaagacaccagatcctccttccggggsatgataggatgagggccaccagggcctgtccatccaggctaagctgagccagtgccctaggcaggcctgaagcctcaaaggacagaatgagagaatgagccctgacacatgaaagcccccaatggcccacaaggcttttcctttcctcgatgtctgatttttcacaactgtcctgcaaggctcagaggacagaaagtattatcttgtttgtttgtttcacagataaggaaacccagttcagaggggtaaagactcccccaa

SEQ ID NO: 937796 - DNA, 615 bp, Homo sapiens
ttgcttattttaccgagaaaacacaggcaactagaggggaatttccatatgttcccatcacccccatctaactcctagctacatcagtgctcacacctctgctttctctgttaatgtggatgcagtctgtgatctagcagacccattcttattatgcagtagattccatcccttcccatcaactcaaagaaatttcccccagcaattcttccattctatattctgcatcaccaatattttttattttatttatttatttatttatttatttattactagatcaggaataattttgccatcccccttccacaagagacatttggcaatttctggagactcttgtggttatcacaacccaggaaagaagcagggcgcactactggcctctagtggacagaatgctaagaagctttctaaacatcttacaatgcagrggatggcccttcttaacaaagaattattctgcctaaaatgtcagtcccaaattggagaaaccctgtactaggccattcctataagcacataaacacacacacacaagtgctattatttctcccattttaaaaatcaccctcccgtgactccacatacccttccaatttcaatcctatttcc

SEQ ID NO: 937797 - DNA, 599 bp, Homo sapiens
ttctgttagtaatttcttgtttaatgtcattgtggtatgagaacatacgtgttttgacatctagccttttaaatttgttaagatgtttcttatggcccagaatgtggtcagccttggtgaatattccatttgagcttgagaaaaatctgtattcttccgtgattggttgaggtattctataaatgtcattttgttcaagtagagtgatagtcctgatctagtcaactacatccttgctggttttcttctttcctratctctcaatcactgagaggggtgaggggtgtgttcagcctccagcaaaaatagtgaatttgtcaaattttttttttagttttatcagtttttgcctcatatattctgacactctgttgtcaggtacatacacatttggctttattatgtcttttttggacaattgactcatttatctatgtaatgctcttcttcaatcctgataaattatcttgctctgaagtctgctttgtctgaagttaatgtgactacttcagctttctttagtttacttttagcataatatatctttctctatcctttcactttttaaaaaatttcaacagttttttaatgaaattcat

SEQ ID NO: 937798 - DNA, 599 bp, Homo sapiens
ttctgttagtaatttcttgtttaatgtcattgtggtatgagaacatacgtgttttgacatctagccttttaaatttgttaagatgtttcttatggcccagaatgtggtcagccttggtgaatattccatttgagcttgagaaaaatctgtattcttccgtgattggttgaggtattctataaatgtcattttgttcaagtagagtgatagtcctgatctagtcaactacatccttgctggttttcttctttcctaatctctcaatcactgagaggggtgaggggtgtgttcagcctccagcaaaaatagtgaatttgtcaaattttttttttagttttatcagtttttgcctcatatattctgacactctgttgtcrggtacatacacatttggctttattatgtcttttttggacaattgactcatttatctatgtaatgctcttcttcaatcctgataaattatcttgctctgaagtctgctttgtctgaagttaatgtgactacttcagctttctttagtttacttttagcataatatatctttctctatcctttcactttttaaaaaatttcaacagttttttaatgaaattcat

SEQ ID NO: 937799 - DNA, 600 bp, Homo sapiens
ccaacaactgatatcctaattttattacttaatgctataccataagtaaccattttcattattgctataaatagtttttagagccagtatatttctcaccatcatagtgtatcattgggtatatttcttctagtttaatagtcctatgtcattgatatttaggttactttcattttttcctactctaagtaatgctacaatgtgcattttatgcatccagctaatttttttaatatttaagattcttatcttctgatagatacctagagtggaaataagcattcagagagttccagatttttttggttcttttttctaataaataaaaaataaataataaatttataataaataaaaaaataaatatttttctaaataaaaaataaattttatttattttttaaattcagagasagggtctcgctctgttgcccaggctagagtgcagtggtgtgatcatggcttactgcagcctcaaattcctaggctcaagcaattctcccacctcagccttctaagtagctgggactatagacacgtgccacctcgcccagctaagttttttattttttgaagaaacagggtcttgctgtgttgccc

SEQ ID NO: 937800 - DNA, 589 bp, Homo sapiens
cccagctactccggaggctgaggcaggagaatcacttgaacgcgggaggcggagcttgcagtgagccgagatcgcaccagggcactccagcctaacgacagagtgagacaccgtctcaaaaaaaaaaaaaaaaaaaaaaaaaaagatgttctattagatyagagtgtgccctaaatccagtgacttgtgttcttatcagaaggccatggaaagacacagaagacacaaggggaaggacatggtgcgaagacagaggcagagagcttggagtattgcagctacaggccaaggaacgccagagattgctggcaaccacagaagccaggagaggcgaggaaggattcttccctggacccttcacagggagcacggccctgctaacatgttgatttctgacttctggcctccagagctgtgagcgaatacatttctattgttttaaatgacaccatctctgatcattggttacggcggcccctaggaagctaatacatggccctatgaagctggggctcagacctccgagaagggcacacggctgctgctgatctgtttagggggagcaatgacgttagcgctgaggggaaac

SEQ ID NO: 937801 - DNA, 590 bp, Homo sapiens
tagctgggcatggtggtgcatgcctgtagttccagctactccagaggcggaggtgggaggatggcttgggccccagaggtcaaggctgctgtgagtggtgatcacaccaatgcacaccagcctgggggacagagcaagaccctgtctcaaaaacacaaaaatacaaaaaacttgcaggctccaaaactacctgaacttcaacctaccttctttcaatacaatgcccagaacatagtctctctcaatgacccagtcaagcttaaaaaaaaaaaaagaaaaaaaaagcatcaccacttctctcttcaaaatctagccttgatatatattttgaggggatgcattctgaagtgtgtcagcatgatacatcrtatcatctgcaacttactttcaaatggcttaggaaaaaaatatggtatctgctgtctatttatctacctacctatctatcaagagataagcaaacatgatgaaataataacagttgttaaatccatgtgaggggtatttggctgtttgtgtgctatttttcagcttttctgattgagcttacttttttaaaaaggcaggaaaaagtatgtggccttgactgt

SEQ ID NO: 937802 - DNA, 751 bp, Homo sapiens
ccaccagaagttaggaagagacaaggagggaatccacccagagttttagagggagcatgacaccttgtttttggtcttctaggctctagaactgtaaaataataattctttttttgttgttttgttttgtttagagacagggtttcctctgttgcccaggctggagtgcaggggtgggatcatagctcactgcactttttttttttgagtcagagtttcgctcttgttgcccaggctggaatgcaatggcacgattatgtctcactgcaacctctgcctcccaggttcaagcgattctcctgcctcagcctcccgactagctgggattacaggtgcccaccaccacgcccagctaattttgtatttttggtagagaccaggtttctccatgttggccaggctggtmtcgaactcctaacctcaggtgaaccacccgccttggcctcccaaattgctgggattacaggcatgaccccccgtgcccacttttgaactcctgggctgaagcaatcctcccgctttggcctcccaagtagctgggactacaagtgcatgacaccatgcctgactaatttttctattttttaaattgtagagatggggccttgtcatgttgcccagctggtcttaaactcttggcctcaagttagcctcttgccttggccttccaaagcactggcattacaggcatgagccactacagcctccagcctaaatttctgttgtttttagtcacatgatttgtggcact

SEQ ID NO: 937803 - DNA, 751 bp, Homo sapiens
ccaccagaagttaggaagagacaaggagggaatccacccagagttttagagggagcatgacaccttgtttttggtcttctaggctctagaactgtaaaataataattctttttttgttgttttgttttgtttagagacagggtttcctctgttgcccaggctggagtgcaggggtgggatcatagctcactgcactttttttttttgagtcagagtttcgctcttgttgcccaggctggaatgcaatggcacgattatgtctcactgcaacctctgcctcccaggttcaagcgattctcctgcctcagcctcccgactagctgggattacaggtgcccaccaccacgcccagctaattttgtatttttggtagagaccaggtttctccatgttggccaggctggtatygaactcctaacctcaggtgaaccacccgccttggcctcccaaattgctgggattacaggcatgaccccccgtgcccacttttgaactcctgggctgaagcaatcctcccgctttggcctcccaagtagctgggactacaagtgcatgacaccatgcctgactaatttttctattttttaaattgtagagatggggccttgtcatgttgcccagctggtcttaaactcttggcctcaagttagcctcttgccttggccttccaaagcactggcattacaggcatgagccactacagcctccagcctaaatttctgttgtttttagtcacatgatttgtggcact

SEQ ID NO: 937804 - DNA, 751 bp, Homo sapiens
ccaccagaagttaggaagagacaaggagggaatccacccagagttttagagggagcatgacaccttgtttttggtcttctaggctctagaactgtaaaataataattctttttttgttgttttgttttgtttagagacagggtttcctctgttgcccaggctggagtgcaggggtgggatcatagctcactgcactttttttttttgagtcagagtttcgctcttgttgcccaggctggaatgcaatggcacgattatgtctcactgcaacctctgcctcccaggttcaagcgattctcctgcctcagcctcccgactagctgggattacaggtgcccaccaccacgcccagctaattttgtatttttggtagagaccaggtttctccatgttggccaggctggtatcgaactcctaacctcaggtgaaccacccgccttggcctcycaaattgctgggattacaggcatgaccccccgtgcccacttttgaactcctgggctgaagcaatcctcccgctttggcctcccaagtagctgggactacaagtgcatgacaccatgcctgactaatttttctattttttaaattgtagagatggggccttgtcatgttgcccagctggtcttaaactcttggcctcaagttagcctcttgccttggccttccaaagcactggcattacaggcatgagccactacagcctccagcctaaatttctgttgtttttagtcacatgatttgtggcact

SEQ ID NO: 937805 - DNA, 586 bp, Homo sapiens
ttttaaaacaatttttaagagcgtctcactctcttgccctggctggagtgcagtggcaccttcttagctcactgcagcctcgacctcctaggctcaagtgatcttcctgcctcagcctccctcgaccatctgggctcaagcaatcctcctgcctcggcctcccaaagtgctgggattacatctaccacacccagccaataaaatgttttctaaaaatatgtttaagtatattgagcactcaacatggcttatcacgtagtagtgctatattatacaagtgtctatgtatttgttattttacttactactttyaagtaacttcttttgcctaggcatcaggttaaaccatgtgagctaagaagataggtctaggcagaattataatgccagtactcacctagcttggtgtcatgaaatgcccttttggttctgaaatttagattctattagtgggtgcagtaagataacttgtatattgaacaaatgcagatagaattcattttgccaacctgatccttgttttaaaagacaatatcagccaggcgcggtggcttatgcctgtaatcccagcactttgggaggctga

SEQ ID NO: 937806 - DNA, 607 bp, Homo sapiens
aaggtttgtaaatgcaccaatcggcgttctgtgtctagctgatctggtggggacttgcagaacctttatgtctatctaagggattgtgaatgcaccaatcggcactctgtatctagctcaaagtttgtaaatgcaccaatcagcactctgtgtctagctcagggtttgtaaatacaccaattaacactctgcatctagttaatctagtggggacgtggagaacttttgtgtctagctcagggattgtaaacgcaccaatcagcaccctgttaaaaacggaccaatcagctctctgtaaaacagaccaatcggctctctgtaaaatggaccaatcagcaggatgtgggtggggccagataagagaataaaagcaggctgcccgagctagccccggtaatttggttagtttgtttcatatgatgtgagatatttgtcttttttttttttgttttttgggttcagattgttgttgggagtttcagcggttttttgcwaaagtctgtagatttttctgaatctaatgtgggttgtgagcccttgaaaaagaacagagaacttcagatatggtactttaagtatgataacatgaactgtgaaggtctgcagc

SEQ ID NO: 937807 - DNA, 588 bp, Homo sapiens
ggtgcatgcctgtaacaggtgttacacctggctaatatttgtatttttagcacagacagggtttcaccatgttggtcaggctggtctcgaactcctgaccttaaatggtctgcctcagcctcccaaagtgctgtgaatacaggcatgagccaccgtgcctggctgaaacattattctcgatagctgaaaagcagaaacaactcagatgtccatcrgctaataagtggatgtgggtatgcaaacaacagattattattcagccttaaaaatgagtaagttcttttgcaacatgcaacaacatagctgaatcttgaaaacatgatgctgagtgaaagaagccagccacaaaagatgacatattgtatgattctctttttaagaaatgtccagaatgggcaaatccatagatacagaggacaaattggtggttgccagggactagagggaagagggaatgggaagtgactgctaaagggtttagggtttccctttggggtgatggaaacgttctggaattacacagtgatggttgtacacctgtgtctgtacccaaaaatcactgaactgtacactttaaaagggtaaatt

SEQ ID NO: 937808 - DNA, 641 bp, Homo sapiens
actacaatggaataaatttaaaatctgtaactgaagaaaaataaaaaaaatttacagataactgaaaattaaataatatactccaaaataatcactggttcaaaagtaaatccaaagatgaattagaatatgcttagtatgaataataacaaaaatacaatgtgccaaaacttatgagatacagtgaatgcatatgaaaatgcaagaaacytaaatagcagaaatcatcttgaaaaaggacagtgttggaggactcacacttcctaacttcaaaacttactatcaagaaactgaggaaggttggagcaagatggtggaagagaaggcttcacttatagtccccttaccacccccaactgcaagggcaccaatttaacaattatctaaacaagaaaacgcaccttcataaataaatcaggtgagcactcacagcacctggttttaatttcatgctgaaagaggcactggaagagggtaggagaaacagtcttaaatcacagataccacccccttttttcatcccttgacagtagctgagtggtgcagagaaagaatcatgtgcttgagagagggagagaacagcaactgtgagacactgcattgaactcagtgctgctctgacatagcagaaagcaaaactg

SEQ ID NO: 937809 - DNA, 835 bp, Homo sapiens
ttctgtagagtaaaagcctcacaactataaaggacattagtgaaaaattaggacgatttgaatatgggctgttttagataatatccctttaattatttatgtctgtaatttctatccacaatattttgtagcttgagatgccatttttgttggaattatttttaaatatctaataatctaaaatgtgtcattttaaaattttgttttcaatttgattctagtgcctagaaatataatttactttttgtattgactttatttagtgactttgctgaattgatgtattaattctattagtttctagatattaaaaaagtagatatctaatcatgttacatgtgaataatgacagctatatttcctcctttccactgcttatactatttgtcctattcttaacttacagcactggtgcaatmctctagtataatgttgtatggaagtattgataaattaacattctttgtttatttctgaacttgggtgaaagtgttcaataatccactgtaaaatatggcatttgatgtggcttttggtataggtaaaacattatcagtttaaagtgattcctctgtcctcattttactgatatttttatcatgacttaatgttttataactcctacaaatcaacaggataaagaggtacaaccactaaaaaaaaaaaaaagaatgtcgccaagactcaaatacaaattcacaaaagagcatctctaatggccagtatcaacatcaattatggaaaagttatcaacatcattaatggagaggaaaaaggaaataagaccaaaagaccaagatgatatgaatttacacacacaacagaagggctaaaa

SEQ ID NO: 937810 - DNA, 780 bp, Homo sapiens
gagacaggagaatcgcttgaacacaggaggtggaggttgcagtgagtgaagatcataccactgtactccagcctgggcaacacagcaagactctgtctcaaaaaaaaaaaaaacaaacaaaaaaattctcagtggaaacaaaacaaccttctactggaagaagatgccatctaaaactyccatagctggagaggagaagtcaattcaaagcttcaaaagacaggctgaccctcttgttaggggctcatgaggctgatgacttaccctcttgttaggggctcatgaggctgatgactttaagttgaagccagtgttcatttaccattcagaaaaatgtcaggcccttaagaattatactaaatgtactcttcctttgctcagtaaatgaaataacaaagcctggatgacagcatatctacttacagcatggttcactgaataatttaagtctactgttgagacctactactcagaaaaaagattcctttcaaaatattattgctcattgacaatgtacctggtcacccaagagctctggtggagatatacgaggagatgaatgttgttttcatgcctgctagcacaacatccattctgcagcccatggatcaaggagtcagctcaactttcgaaatctatttcatgaggctacagttgccacagatagtgattcctctgacagatgtgggcaaagtaagttgaaaccctctggaaaggagtcaccattctagatgccactaagaacatttgtgattcatgggagaaggtcaaaatatcagc

SEQ ID NO: 937811 - DNA, 780 bp, Homo sapiens
gagacaggagaatcgcttgaacacaggaggtggaggttgcagtgagtgaagatcataccactgtactccagcctgggcaacacagcaagactctgtctcaaaaaaaaaaaaaacaaacaaaaaaattctcagtggaaacaaaacaaccttctactggaagaagatgccatctaaaactcccatagctggagaggagaagtcaattcaaagcttcaaaagacaggctgaccctcttgttaggggctcatgaggctgatgacttaccctcttgttaggggctcatgaggctgatgactttaagttgaagccagtgttcatttaycattcagaaaaatgtcaggcccttaagaattatactaaatgtactcttcctttgctcagtaaatgaaataacaaagcctggatgacagcatatctacttacagcatggttcactgaataatttaagtctactgttgagacctactactcagaaaaaagattcctttcaaaatattattgctcattgacaatgtacctggtcacccaagagctctggtggagatatacgaggagatgaatgttgttttcatgcctgctagcacaacatccattctgcagcccatggatcaaggagtcagctcaactttcgaaatctatttcatgaggctacagttgccacagatagtgattcctctgacagatgtgggcaaagtaagttgaaaccctctggaaaggagtcaccattctagatgccactaagaacatttgtgattcatgggagaaggtcaaaatatcagc

SEQ ID NO: 937812 - DNA, 688 bp, Homo sapiens
tagcacaacatccattctgcagcccatggatcaaggagtcagctcaactttcgaaatctatttcatgaggctacagttgccacagatagtgattcctctgacagatgtgggcaaagtaagttgaaaccctctggaaaggagtcaccattctagatgccactaagaacatttgtgattcatgggagaaggtcaaaatatcagcatcaataggagtttggaagaagctgatttcagcgctcatggataacttttagggattcaaaaattcagagcaggaagtaactgctgatgtggtagaaactgtaagagaattagaattagaagtagagcctgttgtgtgactaaagtgctgcaatctcatgatcaaacttgaagsaatgaggagttgcttcttatggatgagcaaagaaagtggtttcctaagatgaaatctgttcctggtgaagatgttgtgaacattgttgaaatgactacaaataatttagaatattccataaacatagttgctaaagcagatacaaggtttgagagaactgaatccaattttgagagaagttctgctgtgggtaaaatgctattaaagagcatcatgtgctatagagaaatcttttgtgaaagcaaaagccaactggtgcagcaaagttcattgttgtcttatttgaagaaattgcctcagccactcaaactc

SEQ ID NO: 937813 - DNA, 554 bp, Homo sapiens
ggaaaggagtcaccattctagatgccactaagaacatttgtgattcatgggagaaggtcaaaatatcagcatcaataggagtttggaagaagctgatttcagcgctcatggataacttttagggattcaaaaattcagagcaggaagtaactgctgatgtggtagaaactgtaagagaattagaattagaagtagagcctgttgtgtgactaaagtgctgcaatctcatgatcaaacttgaagcaatgaggagttgyttcttatggatgagcaaagaaagtggtttcctaagatgaaatctgttcctggtgaagatgttgtgaacattgttgaaatgactacaaataatttagaatattccataaacatagttgctaaagcagatacaaggtttgagagaactgaatccaattttgagagaagttctgctgtgggtaaaatgctattaaagagcatcatgtgctatagagaaatcttttgtgaaagcaaaagccaactggtgcagcaaagttcattgttgtcttatttgaagaaattgcctcagccactcaaac

SEQ ID NO: 937814 - DNA, 688 bp, Homo sapiens
tagcacaacatccattctgcagcccatggatcaaggagtcagctcaactttcgaaatctatttcatgaggctacagttgccacagatagtgattcctctgacagatgtgggcaaagtaagttgaaaccctctggaaaggagtcaccattctagatgccactaagaacatttgtgattcatgggagaaggtcaaaatatcagcatcaataggagtttggaagaagctgatttcagcgctcatggataacttttagggattcaaaaattcagagcaggaagtaactgctgatgtggtagaaactgtaagagaattagaattagaagtagagcctgttgtgtgactaaagtgctgcaatctcatgatcaaacttgaagcaatgaggagttgcttcttatggatgagcaaagaaagtggtttcctaagatgaaatctgttcctggtgaagatgttgtgaacattgttgaaatgactacaaataatttagaatattccataaacatagttgctaaagcagatacaaggtttgagagaactgaatccamttttgagagaagttctgctgtgggtaaaatgctattaaagagcatcatgtgctatagagaaatcttttgtgaaagcaaaagccaactggtgcagcaaagttcattgttgtcttatttgaagaaattgcctcagccactcaaactc

SEQ ID NO: 937815 - DNA, 634 bp, Homo sapiens
aatggaggcctcaagactgaattcaactatgtggccaattattcaatctatcatgcttacatcatgaaacaccaataaaaactctagacaccaaagctcattggaactttctggttggtgaagatggtattgaataaatggacttgctgcctgacacacatgggaagccaatactgtggcactarcttttgagaaaagaaaggctttattgcaagaccagccagcaaggagacaggagatgcagttcatatctatctgactgatttgggatctggggcaagttctaagggttgggagggcaagagaaaggatttaggaatgttgacttggcagagtctgatgggagaacttcaaacaaaccatttacagtaaggattttagtcccagatcttctgggccaacagatcccttttgaaagagctccagcattcaggttccagtcatttcccagtcttttggttccccagagacgaatccttgtaccaggtgttgttaaaggtcaaacctttttctattgcgcatgcctggcctatgtgacttgaagttttcactccgttatgcctacaaggtgacttggcgtcctgttatcaacagaataggcctactttgggctggtgctatggtcacaaacaca

SEQ ID NO: 937816 - DNA, 638 bp, Homo sapiens
agggatggctccttccagctgagcaagaaggagcctctttgtttagggtgaaagtaaacagaactccttgtctttaaatcagtgaagatggaatgtttgtaatgtcaacaccgttcactctaccctgcaaatgaacaggaaagtcaatctggctagtgagctctgtctggatttcgcargcttctatgaaaactgcttgcgctgcctctgggctccgacgcatgacggcacggaatttcccagggctggccccacttaagggtcaggcttgttttgctagacctggtttccacttgatccttttcttcaagataactcacctgcccagtgataaacgtatggcccagcgtccaccctctcaaaagcaatttgtctctggaatcctctcttccaagctgccataaaatcactatggggtttgcaacatgagggagacttgctttctaatcttcataaaggttttaccccaaagctctcccatctcgtctggagctgttcccatcatacccctccaccttctcctaataagcgcttggattcctacagagaaatagccagcattgccccatgttggacaaacagcagagtccgcctcaaccagagacagatcaggcgctaaggagggcagaggctggaac

SEQ ID NO: 937817 - DNA, 638 bp, Homo sapiens
agggatggctccttccagctgagcaagaaggagcctctttgtttagggtgaaagtaaacagaactccttgtctttaaatcagtgaagatggaatgtttgtaatgtcaacaccgttcactctaccctgcaaatgaacaggaaagtcaatctggctagtgagctctgtctggatttcgcaggcttctatgaaaactgcttgcgctgcctctgggctccgacgcatgacggcacggaatttcccagggctggccccacttaarggtcaggcttgttttgctagacctggtttccacttgatccttttcttcaagataactcacctgcccagtgataaacgtatggcccagcgtccaccctctcaaaagcaatttgtctctggaatcctctcttccaagctgccataaaatcactatggggtttgcaacatgagggagacttgctttctaatcttcataaaggttttaccccaaagctctcccatctcgtctggagctgttcccatcatacccctccaccttctcctaataagcgcttggattcctacagagaaatagccagcattgccccatgttggacaaacagcagagtccgcctcaaccagagacagatcaggcgctaaggagggcagaggctggaac

SEQ ID NO: 937818 - DNA, 626 bp, Homo sapiens
aaatatacccttgaccaatgccttgcaaaatagatttgtaagggcagcacctgcatctttgatgacccctgtaattgctcttctctgtatgtaagatctaacagtgggaaatgcagccgctcaactagaaaatttaaatacaatgggaataattggtttctggggtggcaaaatttaaatacaatgggaacaattggttctggcaggggccaagtggcagcactcaaccatcaaaggccaggtgggtgtaactaccrtaatggacagcagaggcaaagcagcaatcagaatagtctgattcatgtagagctctggcattgggtaattatttatggtgttcctagaagtgaaattgataggaagcttactgcattcctacttaatttatacaagcagaaaacttttaggtcgaatggacaaaagactaatttgaattataaaaacagagaatcacagactctcaatcagcttccagacttgagccagtttacagacccagaaccccttgaataagtgggaggctgggtcccattgaagaaggactccactacattacccacagtttatgtggtgagtcttctgccatccttccccaaggagacctccagccttttaccagggtaact

SEQ ID NO: 937819 - DNA, 690 bp, Homo sapiens
aaattttaggtcgaatggacaaaagactaatttgaattataaaaacagagaatcacagactctcaatcagcttccagacttgagccagtttacagacccagaaccccttgaataagtgggaggctgggtcccattgaagaaggactccactacattacccacagtttatgtggtgagtcttctgccatccttccccaaggagacctccagccttttaccagggtaactgtcactggggaaagggaaatgatcagacatttcagggactactggacactggctgtgagcagacattgattccaggggacccaaaacatcattgtggtcctccagttaaagtaggggcttttggaggtcaggtaattaatggagctttagctcaagtttgacttagagtgggtccagtgggtctctggactcaacctgtggtcatttccccaatgcataattggcatagacatacttarcaactggcagaacacccacattggttccctggctggtagggtgatggctattatggtgggaaagaccaaatggaagccaatagagctgcctctacctagaaaaataggaaatcaaaagcaatatcacatccctggagggattgcagagattagtgccaccataaaggacttgaaagatgcaggggtgatgattcccaccacatcctcattcaaatctcctatt

SEQ ID NO: 937820 - DNA, 596 bp, Homo sapiens
ctgtagtcccagctactccggaggctgaggcaggagaatcacttgaacgcgggaggcggagcttgcagtgagccgagatcgcaccagggcactccagcctaacgacagagtgagacaccgtctcaaaaaaaaaaaaaaaaaaaagatgttctattagatyagagtgtgccctaaatccagtgacttgtgttcttatcagaaggccatggaaagacacagaagacacaaggggaaggacatggtgcgaagacagaggcagagagcttggagtattgcagctacaggccaaggaacgccagagattgctggcaaccacagaagccaggagaggcgaggaaggattcttccctggacccttcacagggagcacggccctgctaacatgttgatttctgacttctggcctccagagctgtgagcgaatacatttctattgttttaaatgacaccatctctgatcattggttacggcggcccctaggaagctaatacatggccctatgaagctggggctcagacctccgagaagggcacacggctgctgctgatctgtttagggggagcaatgacgttagcgctgaggggaaacggaggct

SEQ ID NO: 937821 - DNA, 596 bp, Homo sapiens
gattccagaaatcctagggcccttaggaattacactaaatctggctgggtgtgatggctcacgcctgtaattccagcactttgggagaccaaggtgggcggatcacttgaggtcaggagtttgagaccagcctggccaacatggcaaaaccccatctctactaaaaatacaaaaaattaaccaggtgtggtggtgtgctcctgtaatccctgctactcaggaggctgagtcaggagaattgcttgaaccagggaggtggagcagtaagctgaggttgtaccactgcactccagcctggatgatagagcaagactccrtctaaaaaaaaaaaaaaaaaagaattatgctaaatctgttctgcctgtgctctataaatggaagacaaaagcctggatgatagcacatatatttataacatggcttactgaatatttaaagcccactgttgagacctactgctcagacaaaaagaatcttttcaaaatattactgctcattgacaatgcacctggtcacccaaaagcttggatggagatgtacaaggagattaacgttttcatgcctgctaacataatgtctgttctgcaactcatgga

SEQ ID NO: 937822 - DNA, 584 bp, Homo sapiens
ggatcacgaggtcaggagatcgagaccatcctggccaacacggtgaaaccccgtctctactaaaaatacaaaaaaattagccgggcatggtggcaggcgcctgtagtcccagctgctcaggtggctgaggcagaagaatggcatgaacctgggaggcggagcttgcagtgagccgagatcgcaccactgcactccagcctgggcaacagagcragactccatctcaaaaaaaaaaaaaaaaaaaacaataaaaaaacaagacatttagatagtgcatgagtagctacaatggacaacataaattatgtttcttgttattatttgtgtttgtattctaaagaggcatttgcctgccaaactatttcagtctgatattttcaaaactcttctaataaaaaagatactgagttatgtgacattttgatgttctgatgatgatcgttattaaggcagggcattgtttcattgagttgtttatagtactgtaagaatataacactgatctattaaaaacagatgcagtgttgtcatgaaatgggatatatgaaaatatgttaaagcctctaaatgaaaaaaagataaag

SEQ ID NO: 937823 - DNA, 763 bp, Homo sapiens
tggtgtggactcacaggccaaccaccacaggctttggaggcacacagaggaccacagaggcagagcctcatttcccgctggatcgtcctctgcccggtgctagggattccatggtgtcattcaagagtgctgcgacattttttattctttggtatctaggaatctgcgacttcccacttttctttctcattctctgtccactctttaaggcctggctggagcccttccccttcacgaaaccccttttgtccactccagcccacacagtctccccagtccactttttttgcagcccagattcatttagcctttattatgctcagtttaggcgtcactctgttttactctctaagagttccctaggcattctttttctttctagcaagatgataaacttcttgaggacaagacsttctgccccaccacccccctcctgacctggggggataaatgaagggttttggtagcaatcagggaagctggcctacatgctacctgcctgcgtatgtaatggtggctgatggttcaatattaatggatactgaataagcctggcacctgctggagacagcgatgacatttgctctcacagcagatgacagggtgattgatggcaggcatctctgggtggaagcgatgagttctccaggggcgatgaaggggttagactgggtgcttagggccctcaagggacctcaagggaatgtagagaagcctcaggcaacccagggtcaggggtgaggggaccaggaagagaaagtcc

SEQ ID NO: 937824 - DNA, 583 bp, Homo sapiens
ccctggtctgcttatacacagccttttctctcctctgccaaccctgagtcaacaagaccaatcccttctcttcctcctcctcagcatacttagcatgaagacaatgttgggaggccaaggcgggtggatcacgaggtcaggagatcgagaccatcctggctaacacggtgaaaccccgtctctactaaaaatacaaaaaattagccgggtgtggtggcaggcgcctgtagtcccagctactcaggaggctgaggcaggagggtggcgtgaacccaggaagacggagcttgcagtgagcggagatcgcaccactgtactccagcctgggcgacagagcgagactccgtctcaaaaataagataaaaaaataaaaataaaatgaatacaatgaagargacctttatgatgatccaattccacttgatgaatagcaaatacattttctcctccttacgatttttttaaataacattttcttttctctagcttactttattgaaaaaatacagaatataacacatatacaaaatatgtgttaatccactttatcttatcagcaagccttctggtcaacagactagta

SEQ ID NO: 937825 - DNA, 617 bp, Homo sapiens
tgaacccggagtggcatctgagcatgaggtggtcgtaatgtctggagtgaaatctaatttggagtttgcacagtggttatctggagattgtcctggtttgcaaggaaaccacagtaaagtatggggcataaggtggcatcattaagatggggcatcagtgtgacagctcrctcttaagtagtgcaggcagagaagttctccgtaatgtgcttgcaaccactctgttcattctgattgtttcatatttcttttactagttgaagatagaaattgaagaaaaacttacttttcagaaattgatgtgaatacctccataaatggctgcagagctcctccccttcctgcaaagccagggcctccaggcatttccttctcatccctcagcctcaggcagcttctcctgccccctcctcctctgcaggcagcccccaggcccctctagagaatgaagcagctcaggcccagagtcccttcatcacctaaatatatggcctaatccagatgagactcagatctgtgaagggttggatttccatgggcacaggagctgagggagggttctccttccgcgtggggcttgctttaccacacagccatcgatggtcgcccaggcctga

SEQ ID NO: 937826 - DNA, 547 bp, Homo sapiens
ggttcaagccattcttctacctcagcctcccgagcaaccagaattacaggcatgcaccaccacgcccagctaattttttgtatttttagtagagacagggtctcagcacgttggccaacctggtctcaaacgcctgacttcaggtgatccacccrcctcagcctcccaaagtgctgggattacagaggcctgagccactgtgcccagcgggagcttgacctttaaccatgtggctgtaccttctcttggtctctgccttccagggaacaggaattttagggtttatgtgctagtcagctctaaaaatcatattaggctgggcgcagtggctcacacctataatccgagcagtttgagaggccgaggcaggcagatcacttgaggtcaggatttcaagaccagcctggccaactttagtctctactaaaaatacaaaaattagccgggcatggtctgggcatggtggcgcacacctgtaatcccagctacttaagaggctgaggcaggagaattgcttgaacgcagaaggtagaggttgcagtaggtg

SEQ ID NO: 937827 - DNA, 547 bp, Homo sapiens
ggttcaagccattcttctacctcagcctcccgagcaaccagaattacaggcatgcaccaccacgcccagctaattttttgtatttttagtagagacagggtctcagcacgttggccaacctggtctcaaacgcctgacttcaggtgatccacccacctsagcctcccaaagtgctgggattacagaggcctgagccactgtgcccagcgggagcttgacctttaaccatgtggctgtaccttctcttggtctctgccttccagggaacaggaattttagggtttatgtgctagtcagctctaaaaatcatattaggctgggcgcagtggctcacacctataatccgagcagtttgagaggccgaggcaggcagatcacttgaggtcaggatttcaagaccagcctggccaactttagtctctactaaaaatacaaaaattagccgggcatggtctgggcatggtggcgcacacctgtaatcccagctacttaagaggctgaggcaggagaattgcttgaacgcagaaggtagaggttgcagtaggtg

SEQ ID NO: 937828 - DNA, 777 bp, Homo sapiens
agcctgtatcttggcacttggcacatcatggatgctcaaggaagatgtgttgaaaaaatgaataaatgaattaatgcagaaacagagtctcatacacccagtaagagacatagggacacaattcaagtgagtgtaccctcttctgtcttcactaacaacctgcctctcataaagaggtatcaataaacaagagttccttttccttctctcagcaggcatgtatccactgagcacacattttgcttttgcatgaacagatgaatgcacaaagtcttgtgatggattatcatgactatctaggttgaatactttagagacgaagagttcatggagcttgcttacagttcacttctgcaacgttcaatggaatgtctcccaaacccaaagaaacatggccagagaatttgtcttttggtgactcagcctcaaaggttgcccagggttcaaaaggaaaactgaaggcggtcattttgtcagggggtctcgcatgcttcttttattagggggtcttatggcacagtggtgctgcgagggtgaaatgcttaagcctaaggggtagctttggtagagaggtwccttgtggagaggatagaccagaaatcacaaggccatgccaattttgtaaacacaatttacactttttgtttagttttgttttgtttgagacggagtctcactctctcacccaggctggagggcaatggcacaatctcagctcactacaacctccgcctccagggttcaagtgattcttctgcctcagcccctcaagtagct

SEQ ID NO: 937829 - DNA, 573 bp, Homo sapiens
cgtcttcctctgccaaaaaaagagaaaaaggtatgttgacatccgaacccccagtatcttattagaatgtaaccttatttggaaatatggaaataaggtcattgcagatgcagttagttaagatgaggtcctactggagtagaactggcccctaatccaacaaaatgggtttcgtgttttttattttttgttgatttttgtttttttgtttttgagaaggagtttcactctcatcacccaggctggagggcagtggcttgatcttggctcactgcaacctctgcctcccgggttcaagcgattctcctgcctcagcctcccaagtagctgggattataggtatgtgccaccacacccagctaatttttgtatttttagtagagacagagtttctccatgtwcgccaggctgggcttgaactcctgaccttgggtgatctgcctgcctctgcctcccgaagtgctgggattacaggcatgagccaccgtgcctggccaatgggtgtctaataagaagctggccatgtgaagacagagacactcagggagaaagccgaatgtcaatgaaggcaga

SEQ ID NO: 937830 - DNA, 573 bp, Homo sapiens
cgtcttcctctgccaaaaaaagagaaaaaggtatgttgacatccgaacccccagtatcttattagaatgtaaccttatttggaaatatggaaataaggtcattgcagatgcagttagttaagatgaggtcctactggagtagaactggcccctaatccaacaaaatgggtttcgtgttttttattttttgttgatttttgtttttttgtttttgagaaggagtttcactctcatcacccaggctggagggcagtggcttgatcttggctcactgcaacctctgcctcccgggttcaagcgattctcctgcctcagcctcccaagtagctgggattataggtatgtgccaccacacccagctaatttttgtatttttagtagagacagagtttctccatgtacgccaggctgggctygaactcctgaccttgggtgatctgcctgcctctgcctcccgaagtgctgggattacaggcatgagccaccgtgcctggccaatgggtgtctaataagaagctggccatgtgaagacagagacactcagggagaaagccgaatgtcaatgaaggcaga

SEQ ID NO: 937831 - DNA, 755 bp, Homo sapiens
ataacttgagataagcaaatgtgggaaatacgaacaacgatcagatgcatgagacaagtgcatggatgatcactgtgctactctttccgtctttccctatgattacagaagtccaaggcagcttggaaatatgaaggcgtgcctggctgtctggtgggaactaagggtctaagccatgcaaagcccacgtcagaatggcaggacaaaggaagccgctgtcggacagcaggcttcacacaggtgaaaaatgagttttacaacagtacatgccaaagatcttggggttgctgagcctagcttgatggacagattgtgttagctgtgagatcattggttatattgatcaagatcaaggtaatagaaatgccagtgggagctggctctggagtgtgggtttccccaggagaacacagcagacctcccagaaccatgcatttcttattagcatattcagtgtgagatgaagcatcttacttagtttcgcatttgatctttgtatgaaagtgctttaaacaaaattacacacactgatataccccagcattaaccttcctagaggataactttgttctgtgttcaaaagtatcagtggctctccattrcctactgaggaaaacaaactatttagtgtagcgttgtgggccctccctgatctccccaaaccacctttctagccttctttgctttagttccttactgggcctgtgatcagccatgctgggccgcttgccattcttctaaattcagcttctgtt

SEQ ID NO: 937832 - DNA, 718 bp, Homo sapiens
ccagggtgtcttcaggaacaagggcaggtcccttgctgccatcctcacactcacaggcagttcatggggtgaaaggcaacgtgccagccccacagtcaaaggagcctgggcctgaatgggagctgtcccttagtcatgygcgcaggctgtgcaggcccggcacgcagctcccttgttcattcagccccacccctgaaaggcatttccagaatttaggtcactactgttggcagcgttgcttcatacacaaacactctgaggttaaagtttatgaagggtgacctgtttatcaaccactgagttccagcagcctccgcttgcaaatgtgaattctgatcttgggctagggtgggctggtcacagctctgactgcagtaggggatatgggggtgggggtcgcatgctggcctggggttcctgctgtctacccagcctgcagcagagaggcctggggctttgagcatgcctagagcgggttgtacttccagatgctcccgaacttcaaaagcaagggtcagtggggaacagggcgaccagggctttaaagcagcctcaggagcgaggaaaacctgcctgaaacccaagcagtgaagcaagaggggacccagcccgaccccgccttgctccagatcctcctgtgcccagggcggagaggtctggctgtggaccccgcactcagatctggggattgcagtgggatccaggcaatgctggggcg

SEQ ID NO: 937833 - DNA, 596 bp, Homo sapiens
cccttcacccttctggaacttggtttcctggtctataaaatttagggtaaggctgaatgacttctcagaccttgaaactggagtttcactatagctttcctttacaaaccggattctgggggtatttcaaaccatttagtttgcacatattacttaaaggaactctctgtgtgaaaaaaaaaaaaaaaagtctatactcctttgtactagactataaacaggtgagttgggtccattgctgcctccaaaaatagtacaattggtattttctataaatattcagagcattttggcygggcacagtggcttacacctgtaatcccagcactatgggaggccaaggcaggcggatcacctgaggtcaggagtttgagaccaccctggccaacatggtgaaaccccatctctactaaaaatacaaaaaattagcttggcatggtggtgtgtgcctgtaatcccagctactcgggaggctgaggcaggagaatcgcttgaactcaggaggcgaaggttgtagtgagccgagatcacgccactacactccaacctggacgacagagcgagactttatctccaaaataaataaataaataaac

SEQ ID NO: 937834 - DNA, 596 bp, Homo sapiens
cccttcacccttctggaacttggtttcctggtctataaaatttagggtaaggctgaatgacttctcagaccttgaaactggagtttcactatagctttcctttacaaaccggattctgggggtatttcaaaccatttagtttgcacatattacttaaaggaactctctgtgtgaaaaaaaaaaaaaaaagtctatactcctttgtactagactataaacaggtgagttgggtccattgctgcctccaaaaatagtacaattggtattttctataaatattcagagcattttggctgggcacagtggcttacacctgtaatcycagcactatgggaggccaaggcaggcggatcacctgaggtcaggagtttgagaccaccctggccaacatggtgaaaccccatctctactaaaaatacaaaaaattagcttggcatggtggtgtgtgcctgtaatcccagctactcgggaggctgaggcaggagaatcgcttgaactcaggaggcgaaggttgtagtgagccgagatcacgccactacactccaacctggacgacagagcgagactttatctccaaaataaataaataaataaac

SEQ ID NO: 937835 - DNA, 629 bp, Homo sapiens
tggtggcttacgcctgtaatcacagcactttgggaggctgggcgggtggatcatgaggtcaggagttcgagaccagcctgtccaatatggtgaaacctcgtctctactaaaaaatacaaaaattagccaggcgtggtggcacgcacctgtggtcccagctacttgggaggctgaggcaggagaatcacttgaacccaggaggcagaggttgcagtgagctgagatcaygccactgcactccagcctgggcaacagagtgatactccatctcaaaaaaaaaaaaaaaaattatggaggaccccaaggaacttcagtttgttagaaactaacactaaacttttaaaaaatacttattttatgtaaaaataactatgataaacttattatatattaacagaaataacatatttggaaagaagaataacagtgttttacatgtttgcaaatctctttaaaatgcaacatgtagtctttcaaaagctcttctgtacactcatgaaagagagtgaaaaacatattaatatttttattaaaatagtttccatttcatggatcccttgaaagggtcttggggtatccttagggatcccagaaccatacattgagaaccactggcttaggtaatttgc

SEQ ID NO: 937836 - DNA, 640 bp, Homo sapiens
ccaggccaggcgtggtggcttacgcctgtaatcacagcactttgggaggctgggcgggtggatcatgaggtcaggagttcgagaccagcctgtccaatatggtgaaacctcgtctctactaaaaaatacaaaaattagccaggcgtggtggcacgcacctgtggtcccagctacttgggaggctgaggcaggagaatcacttgaacccaggaggcagaggttgcagtgagctgagatcacgccactgcactccagcctgggcaacagagtgatactycatctcaaaaaaaaaaaaaaaaattatggaggaccccaaggaacttcagtttgttagaaactaacactaaacttttaaaaaatacttattttatgtaaaaataactatgataaacttattatatattaacagaaataacatatttggaaagaagaataacagtgttttacatgtttgcaaatctctttaaaatgcaacatgtagtctttcaaaagctcttctgtacactcatgaaagagagtgaaaaacatattaatatttttattaaaatagtttccatttcatggatcccttgaaagggtcttggggtatccttagggatcccagaaccatacattgagaaccactggcttaggtaatttg

SEQ ID NO: 937837 - DNA, 625 bp, Homo sapiens
caaatattgtgcttttcccacagtcttcacaactggcagaccaggagattcccccatgcctggcttggtgggtcccacatccacggacccttgtttgctgctagtgcagtagtctgagattgacctgggatgctggagcttggtggggggaagagtgtctgccattgctgaggcttgagcaggtggttttatgctcactgtgtaaacaaagccacagggaagctmaaactgggtggagcccaccgcagctcaacaaggcctactgcctctctagattccacctctgtgtgcagggcatatctgaacaaaaggcagcagaaagcttcttcagacttaaacatccctgcctgacagctctgaagagagcagtggttctcccagcatgacattcaagctccaataacagacaggctgcctcctcaagtgggtccctgacccccgtgtagcctgactgggaggcacctcccagtaggggctgacagacacctcatgtaggcaggtgcccctctgggaagaattttaaagaagaaggatcaggcagcaatatttgctgttttgcagcctctgctggtaatacccaggcaaacagggtctggagaggacctccagcaaactccaacagacc

SEQ ID NO: 937838 - DNA, 567 bp, Homo sapiens
tcctgtatgaggtgtctgttgacccctgctggcaggtgtctccccaacaggaggcatggaggtcagggaccaacttgaggaggcagtctgtcccttagcagagctcaagtggtctgctgggagatctgctgctctcttcagaggtggcaggcaggaatgttaaagtctgctgaagctgtgctcacagacgccccttcctctgggtgctctgtcctarggagatggaagttttatctgtaagttcctgactggggctgctgcctttcttccataaatgccctgcctggagaggaggactctagggaggcagtctggctacaacaactttgccaagttgcagtggggtcctcccgattcgaacttcccagcagctttgtttacattgtgagaggaaaaccacctactcaagcctcagtgatggtggatgcccttcccctgaccaagccccagtgtcccaggttgacttcagactgctgtgctggcagcaagaatttcaagtcagtggaacttagcccacaagtcagtgggctccttggggctggcatctgctgagctagaccactttgc

SEQ ID NO: 937839 - DNA, 595 bp, Homo sapiens
gcaattcatatcttacatgaatggctgcaggcaaagagaagagacagcatgtacaaggagactcctattttgaaaaccattggatctcttgagacttattccctatcatgagagcagcatgggaaagacctgcccccatgattcaattacctcccaccaggttcttcccacgacacgtgggaactgtgggagttacaattcaagataagatttgggtggggacacagccaaaccatatcagtcttgctctgttgccgagttggagtgcagtggcatgatcacagctcactgaagcctcaacctcccgggttcaagcagtcctcctgcggcagcctcctgagtagctggaactacaggcacatgccaccatacccggctaatttttaaaawttttttgcagatatgaggtcttgctatgttgcccaggctgttctcaaaatcctggcatcaagtgatcattccacctcagcctcccaaaatgctgagattacaagcataagccacagcacccagccaggaattacatttcaacatgagattttgagaagtcaaacatccaaaccatgccaagtacttatagccctaaagcagagct

SEQ ID NO: 937840 - DNA, 590 bp, Homo sapiens
gtggtttgctgcacctaacatctcatcacctaggtattaagccctatatgcattagctatttttcctaatgctcttcctccctgcatcccccccccgataggccccagtgtgtgttgttcccctctctgtgtccatgtgttctcattgttcagctcccacttataagtgagaacatgcagtgtttggttttcggtttctgtgttagtttgctgaggataatggcttccagctccttccatgtccctgcaaaggacaagatctcattcctttttatgacacatagtattccatggtggatatgtaacacattttctttatccagtctatcattgatgggcatttgagttgattccrtgtccttctattgtgaatagtgttgcaatgaacatacacgtgaatgtatctttgtgatagaatgatttatattcctttgggtatatacccagtaatgggattgctgggtaaaatagtatatttctggttctagatctttgagaaattatcacaccatcttccacaatggttgaactaatatacattcctaccatctgtgtaaaagccttcctatttctctgtgacctcaccagcc

SEQ ID NO: 937841 - DNA, 575 bp, Homo sapiens
ttcttgaactatttttttctatttcttctctcctcatatttctttttttgagagcctgattacatatatattaggctcctcaaagtttccacacagctcactaatcctttttcttgtcctttttctgttttattttgtatagttttatttctaggtcttcaagtttactaatctttttttcctctaatgtctaatttgctattcatctcatctagtgtatttttaatctcagacatttagttttcacatctggtagttcgatttggatcttgtcattatatcttccatatctacttaatatgttcagtcttttctctggcttcttgaacatatgaaatacagttagtgcagcagttataatgytcttctccactaattctatcatctgtatcatttctgagttggttttgatcatttattttctccccactttgaagtatatttttccttcttcctcctattaattttttatcaatgccaggtattttgaattttacctcttaggtgctatttttgtagtcccataaatattcttgtgctttgttctgagatgcagttaaattatttggagacag

SEQ ID NO: 937842 - DNA, 711 bp, Homo sapiens
tatcagagtgttgaggaaatatccaaaatccagtttctcaaattccagttctgttttctcctgtgtccctggagggaagagagggacaggagctacacgggttcctgaggtcagtagacccctgaggtgaccccatctgcatgcaccttcccttaggactttgtccacatcagaactaatcctctttagctctccacggctacgtggagcggcggtgacttgccgccatgtttctttctcgggaacacacgcgtgccatgcagggggagacctgccctcatctgtcttgggttggagttgatgggcttcccattcttgggcagagttacagctacagaaatgcttttctggatctgctttcttcagggtgcaggaagcatcagtgcagatatgaattctccctggagtttttagtctcatgttactggccaaaaaatgtaaagcccagccgtgagaggatggctggatatgaccaaagctcaggaggccaccattagggcagggaayggctgatcacgtcccctgaagaggccatggaggcagcgtgggcagtggattgattagcgtaggccccaaagtcagtaccatggaacctccactttccctgctcaccagccctgtgggcctgggggaagggaggtcacttaactcccagtgagttcaaagtcatccttggtgaaccaggataagaacacctcataatgtggttgt

SEQ ID NO: 937843 - DNA, 777 bp, Homo sapiens
tttacttcatggagttgttgtatagattagatacatgtaaaacagttcctggcacataatagacactaataaatgtaagttcgtattattattttgtttttagaaaggtcattgtagctggtgtatggagaatgaatgtgggggcataaaaggaagagggtaaagaataggtgaggggaggccagttatgaggcttatgagtagcctgggtaagagatgacgagtgaagtgatggtggtagacacagagagaaatggactaatttcacataattttggaggtaaaattttcatattttgcagatggactggacatgggggttgaggaaaatggaagaatcaagaataacttctaagtttctggctagagtaaccgggggatggaagtgacatttacagagattaggactcgaggcgaagcaggtttggcagggaaattaggagttctattttagatatgttaaacctgagatgtcttaagacatccaagtggatgtctattagacagttggttacacattttggagaccagaagagaggtctgggawaaagatgtaaatttggaagtcattagcatgatcagcatttgaagacaaagaaatagttgagatcatctaggaagagagtctgcagagagaagtgaagagagccaagaagagtccagaggattttagggtggtggaatagacaaagagagtgaggacagacctgcgaagagagagtaaatcagcagaatgtggtatcacaaaaaccaagagacgagaaagtttcaagaaaa

SEQ ID NO: 937844 - DNA, 567 bp, Homo sapiens
gttcctcctctctggtcacctgacctctcttgtagaccatgagctctggacttaaaacttggctaagttacagaaactgggcaagggattttggctttttattgaagtggctgccctcagtcttctgaacatccatcctctttttttgttgttgttattgtatatatcaagcaatgctcttgttgactcaccatctattttgccctcagaaagactatgtcttactatctccatagttttttttttttaatgtattatattttaagttctgggatacatgtgcagtacgtgcaggtttgttacatrggtatacatgtgccatggtggtttgctgcacccatcaacccatcatctacattaggtatttcttctaatgctatcccttccctaaccccccacccgcccccaacaggccccagtgtgtgatgttcccctccccgtgtccatgtgttctcgttgttcaactcccacctatgagtgagaacatgtggtgtttggctttctgttcttgtgttagtttgctgagaatgatggtttccagcttcatccatgttcctgcaaaggaca

SEQ ID NO: 937845 - DNA, 757 bp, Homo sapiens
agagcctctgcggccaccaggaagtcacacagcccttggtgggtccgcagtggatcaacacagacacggctgcacctgagattcagaagaacgggcggacggtgctttcctgcatgtgtaagaggaattcatggggcgaataacccaacagaggtaaacattaggggctgaagtgacttaagcatattaaaatgtagtttttctatttaagctggtttctccatcactagctccatcaccccatccatctatctgcctccatcaccgcatccatctgtctgtagacaaagagaggtgttactcaatgcccaggagtaatttagcatttagttttgaagggtgccatgaaaacagagatgccgagtgttgccaaagactcgggcccatttgccctgaagcctgcgctggagctccacttctcagctcctggcctggctgagtgtgcgccacgggcactcctggtgttccagggaactgtggaggccactgggaaggaagctgtttattggcatcatcttggattcactgaagaaagcctcatgtcacaacctctggctgttgctagctgckctgggtgttgaaaggacagaggcagggggcgccccggggcagccaggggccttgtggcatagtcttccccaggaagaagcaaaggagagcatcagatcactctaaaaccctagtgcaaacacacgggctgccgcagtgtagacagccggactgtgctggcctgtagccaggcctgtggcttgctccc

SEQ ID NO: 937846 - DNA, 642 bp, Homo sapiens
caaagaataaatctcaggatcttggagaatttgctattattaaaaatcaaagaataaatcaataacagcattattttaaatgcaaataaaaatgagttaacatttttcaactaccaagttagtagaggttttctttgtctttattgtggcaaaatgtaaacaacaaaaaatttaccatttcaaccatgtttaaattgtacaagttagtggcaataaataccatcacttttatcaattttcagaattttttcaacatcccaaacagaaactcttgcgactattaaacaatagctccctgccttcctcctcctcccagcccctagtaacctacctctattctactttctrtctctgtgaatttgcctattgaagatacctcatataagcagaatcatacaatatttgtccttttttgtctggcatatttcacttagaatagtgttttcaaggttcatccatggatagcatgtattagaatatcatccctccttaagggtgaataatattccatcgtacatgtaactacattgtatttatccattcatctgtggatggacacgtggacttttttttcgaatacctcaattcactgtcaagaacacaggagacttctaactgatgagagaaatgagaaaaatgatg

SEQ ID NO: 937847 - DNA, 632 bp, Homo sapiens
ttggttggcaatgcaatcataggggtgtggaaaatggtcaccatctgtgcactgagtccacctcttggtgggagaggagggcacagaaatagttgagttatgagtcatgagtctgggtggcatcagtctgaaaaacatctcaaaagaccaatcttaagttctacaatagtgatattatctatatgagcaattagggaagtcataaatcttgtgacctctggccacacgattcctgagaagtaagggatcataaaaactataccgacattttagcagaattcaggsccctcccataatcctaatcttatggcctttcattagtcttatgaaagtagtttcagcccgccccctggccccaacaaggagaggattcgtttcagggagaaactattatcatccttgcttccaagttaaactataaattttaatttggttaaaagtaagaatatgttagcttgtcctatgcccaggaatgagtgaagacagccaaccggtgaggctagaagcaagatggagtcagccatatcagatttctcttactgtcataatctttgcaaaggtggtttcaactcagggattctgagtgagtctttacaccagtctgtaccatgtgcattgtggagaattttcac

SEQ ID NO: 937848 - DNA, 659 bp, Homo sapiens
ataaaatcaaaaataagttaataactcccaagatacaatggggggtataggcattgagtaaatactcccattccagaagggagaaatctgccaaagaaaaggggctacaggccccatgcaagtccaaaatccagaattgcaggcattaaatcctaaagcyccaaaataatctcttttgactccatgtatcacatccaggtatgaaggatgggttaccaaggccttgagcagcttgtccccgtggctctgcaaggctctgccccatagctgctctcaagggcttgcattgaattcctgcagcttttccagttgcagggagcaagctgctggtggatgtaccattctggggtctggaggaaggtggccctcttctcacagctccactaagcagtgacccaactgggattctgtgtgaaggctccaatccatttcccctctgcattgccctagtagaggttctccatgagggctccacccctgcaacagccttctgcctggacttccaggcttttccatgcatcttctgaaatctaggtggaggctcccaagcctcaactcttgccctctgcacacctgtagccttaacaccatgtagaagtcaccaaggcttacagcttgcaacctctgaagcaacagcccaagctgtaactagagccctt

SEQ ID NO: 937849 - DNA, 659 bp, Homo sapiens
ataaaatcaaaaataagttaataactcccaagatacaatggggggtataggcattgagtaaatactcccattccagaagggagaaatctgccaaagaaaaggggctacaggccccatgcaagtccaaaatccagaattgcaggcattaaatcctaaagctccaaaataatctcttttgactccatgtatcacatccaggtatgaaggatgggttaccaaggccttgagcagcttgtccccgtggctctgcaagkctctgccccatagctgctctcaagggcttgcattgaattcctgcagcttttccagttgcagggagcaagctgctggtggatgtaccattctggggtctggaggaaggtggccctcttctcacagctccactaagcagtgacccaactgggattctgtgtgaaggctccaatccatttcccctctgcattgccctagtagaggttctccatgagggctccacccctgcaacagccttctgcctggacttccaggcttttccatgcatcttctgaaatctaggtggaggctcccaagcctcaactcttgccctctgcacacctgtagccttaacaccatgtagaagtcaccaaggcttacagcttgcaacctctgaagcaacagcccaagctgtaactagagccctt

SEQ ID NO: 937850 - DNA, 659 bp, Homo sapiens
ataaaatcaaaaataagttaataactcccaagatacaatggggggtataggcattgagtaaatactcccattccagaagggagaaatctgccaaagaaaaggggctacaggccccatgcaagtccaaaatccagaattgcaggcattaaatcctaaagctccaaaataatctcttttgactccatgtatcacatccaggtatgaaggatgggttaccaaggccttgagcagcttgtccccgtggctctgcaaggctctgccccatagctgctctcaagggcttgcattgaattcctgcagcttttccagttgcagggagcaagctgctggtggatgtaccattctggggtctggaggaaggtggccctcttctcacagctccactargcagtgacccaactgggattctgtgtgaaggctccaatccatttcccctctgcattgccctagtagaggttctccatgagggctccacccctgcaacagccttctgcctggacttccaggcttttccatgcatcttctgaaatctaggtggaggctcccaagcctcaactcttgccctctgcacacctgtagccttaacaccatgtagaagtcaccaaggcttacagcttgcaacctctgaagcaacagcccaagctgtaactagagccctt

SEQ ID NO: 937851 - DNA, 603 bp, Homo sapiens
atcatgatgataggatcaaattcacatatatcactactaaccttgaatgtaaatgggccaagggcccccaattaaaagacacagaatggcaagctggataaagaaccaaaacccattggtatactgtcttcaagagactcgtctcacatgcaatgacacctataggctcaaaataaaggaatggagaaaaatctaccaagcaaatggaaaacaaaaaagcaggggttgcaatcataatttcagacaaaacagactttaaaccaacaaagatcaaaaaagacaaagaagggcattacataatggtaaaaggttraattcaacaagaagacctaactatgctaaatatatatgcatgcaatgcaggagcacaaagatttataaagcaatttcttagagaccttcaaagaaacatagatcccaaaaaactaatagtggaggacttcaatgtaccactgacagtattagacagagcattgagacagaaaattaacaatgatattcaggacctgaactcagcactggatcaaatagaactcatagtcagctacagagctctccacccaaaaacaatagattatacattttcctccttaccatatggca

SEQ ID NO: 937852 - DNA, 674 bp, Homo sapiens
ccaagagtcaattcctggaaccagggaccctaagagctcatttggtgctcaaccctgctgtggccatgctggcacctgaagtcagcaagtctcagaggctcacccaaagccctcgggtagtacttaggtatcactgctggttattcagggcccaagggctcttcagttagcaggtgattaatattgccaggactgggtcttctcttcaaggcagcaggttccctactggcccagggtgtgtctagacatattgtccaggaggtagggcctaaaataggggcctcatgactctgaccagtgcsgtatcctcctgtggctgagctggtatctgagatggaagacaaaacccttcccacttttccctctcctctcctcaagcagaagaaagggatctcttttggagctgtgaactgtgcagtctggggatatgggagaggtgatggcagcactgtgttagcagccccagctagttgtctcaatggaacgcatgccctcccagtccactgtctctgggctcagttcaacactaggattcacctaagagttacagttcttacgacttttcaagtttacttagagacccagagcacattagcccattctggcagagatctgtaggaactgcagttcttacctctgggatcaccagttcccctctggcgagggctgtttta

SEQ ID NO: 937853 - DNA, 761 bp, Homo sapiens
ctcctctagctccaggctgtagttgcaactccaaaatagaccccttctttccacttgaagagacgagagggaagaatggggaggactttgtcttgcatcttggataccagctcagccagagcgggagatggcaccaatcagagtcacgaggtccccattccaggccttagctcccagacaacatttctagaccagatcccaggccagaagagaacccgctgccttgaaggaaaggattcagttctagcaacactcatcacctgctaactgaagagactgtgggccctgaataacaagaaacaatacccagctactatatcaagtgttgtgagtgagcatctgagaattgctggcttcaggtgagacatagcatgttacctgctatgatagttaaagggaaaaaytccttctgcttgagaaaagcagagggaaaaataaaggggaatttgtcttgcaccttaggtaccaacacaacaacagggagtaaagaaccaagcatgctcttgaggtctctgattccaggacttgactcttgaatggcatttgtagacctgccctgggctagagaaaagcccgctgccctgaagggtaagtcccaggccaggcagcattcaccccaagttaacttaagagaccttgggcctaaagggaacattggtggtagtctggcagtactccttgtagccaagggttgttggtggccacagggtgaggctcctgtgcctttggaaaggggagggaaaagtgggaaagactgcctc

SEQ ID NO: 937854 - DNA, 729 bp, Homo sapiens
aatggaccaatcagcaggatgtgggtggggccagataagggaataaaagcaggccacggagccagcagccgcaacccactggggtcccctatccacgctgtggaagctgtgttgtttccttctccgcaataaatcttgctgctgcccagtctttgggtctgctccacctttatgagctgtaacactcactgagaaggtctgcagcttcactcctgaagccggtgagaccatgaacccccsaggagggacaaacaactccggatgcgccacctttctgaactgtaacgttcaccacgaaggtttgcagcttcactcctgaggccagcgagaccaagaacccaccagaaggaagaaactccgaacacatctgaacatccgaaggaacaaactctggacataccatctttaagaactgtaacactcactgcgaggtccgtgcttcattcttcaagtcagcaagacgaagaacccatcaattctggacacagtctaactcagtgatgccaacctttttgacagcagggactggtttcctgaaagacaatttttccacagatccagtggtggatcaagggagatgattttggtatgaaactgtttcacctcagataggcaggcattagttacattctcattctcataaggagcacacacctagattccttgcatgtgcagttcacaacagggttcacactctgagaatgtaatgctgctgctgatctgacagga

SEQ ID NO: 937855 - DNA, 763 bp, Homo sapiens
cagctctctgaaaatggaccaatcagccatctgtaaaatggaccaatcagcaggatgtgggtggggccagataagggaataaaagcaggccacggagccagcagccgcaacccactggggtcccctatccacgctgtggaagctgtgttgtttccttctccgcaataaatcttgctgctgcccagtctttgggtctgctccacctttatgagctgtaacactcactgagaaggtctgcagcttcactcctgaagccggtgagaccatgaacccccgaggagggacaaacaactccggatgcgccacctttctgaactgtaacgttcaccacgaaggtttgcagcttcactcctgaggccagcgagaccaagaacccaccagaaggaagaaactccgaacacatctgaacatccgaaggaacaaactctggacataccatctttaagaactgtaacactcactgcgaggtccgtgcttcattcttcaagtcagcaagacgaagaacccatcaattctggacacagtctaactcagtgatgccaacctttttgacagcagggactggtttcckgaaagacaatttttccacagatccagtggtggatcaagggagatgattttggtatgaaactgtttcacctcagataggcaggcattagttacattctcattctcataaggagcacacacctagattccttgcatgtgcagttcacaacagggttcacactctgagaatgtaatgctgctgctgatctgacag

SEQ ID NO: 937856 - DNA, 625 bp, Homo sapiens; identical to SEQ ID NO: 930630

SEQ ID NO: 937857 - DNA, 740 bp, Homo sapiens
ccaccacacctggctcattgttgtatttttagtagagacagtatttcaccatgttggccagggtggtctcgaactcctgatctcaggagatctgcccgcctcagcatcccaaagtgctgggattacaggcatgagccaccactcctggcctcaattgctatgcattctaatgaaaacttggtattaacagtctaattttagtcctactgttggatgtgtcttattakgcttttattccacatctctgtaattattaaggaagttgaacaacttttcatatgtttattggccatattaaaattctttcttaaagtgcccatttaatctcttgcccatttccctttgaggtttagtctttcttttatggactagtatatgcttttcatatattttggatatgtgccctttggcagatatgttagcaaataccttcacccatctgtagcttgcctttggaatttctcagagatacctactgataaagagaaggtcttaattttgttgtagaccaatttagtctagtcctttttaagcattactggattttatttgctaatattttgttaagagtttggttttccacttatgtttctgagtgaaattggcctgtaattctcttgtataatgcctttttttttttaagaaggcactgcagtggctggtatatagcattcttgtgaatatatctaactgggatacaagttgaggtagaaatatttcaaatgtccttaaaaaaataa

SEQ ID NO: 937858 - DNA, 798 bp, Homo sapiens
acaaatacacagattccctgtttctttgagtctttatttctgaagacatttgtcacataagatttatgttcaatacatttgttatatttttctcttgttaatctgtcttttgttacagggacctctgccatgaaccttgcaatgggtgagaaattttttctcccctattggagctcagaaactaataccccaaaatatagtgccttgacatgctgaacagaataagaagcctctcaagatccctctgactccccaccgtcctacaacctcctgtcagtcctctctctcccaaagcacaggatgaagttgttctctgaagttcccttattggcctaaagtctggacctgccaaagaagaaaacaattactctggtctcttctttgagttttcattaactaagctcacatcacaggaagcaagactgaagtctgtcaacacacctgaacagacttttgtcacaaaccattgtctgctctgtgggcccaaccgattttgtcccaggccatattatatgttcytcaagtctattgaatttccctgaagatcatttactatgtgtccccccaaaatcattcatacctcccgtctccctttcctctagaaagaaagtatataaccatgtgtaccccattgcatggtggggcaatcacttggtgattctctcgcatgcacactaataaatttgcatgccatttctgctattaatctgccttttgtgagtttcagcaaacctctggagggcaaagggaaaattttatccttacccctatatcccctacagtagatattcttcacta

SEQ ID NO: 937859 - DNA, 745 bp, Homo sapiens
agcttctctttcttcctcggtaaatgcagaaataactccctcactatgctataggtaataaatgagatcaagttttgtcaattggagagtactatacacatgacttatgagtgttacctgtaccaggagtattttcttttcttttcttttttttagagacagggcctcactctgtcacccaggctggagttcagtggcgcaatcagctcactacagcctctacctcccaggctcaggtgatcctcccacctcagccttctgagtagctgggactactggtgcatgccaccacacctggctaatttttttatttttgtagagacaggagtcttgttctattacccagactggtctcaaactcccggcctcaagcactcctcctgcctcggcctcccaaagtattaggattacaggtgtgagccatagtgctggcctgagtattttcatattaaaaaaggagtgttgggacagggcttaaggtaaatgaattaataaaattactgcttactatatgccaggcccctttctaaatcctttacctgtattaaccartcctcacaataacactatgaggcagatataattattgtcattcccattttttttttaaagagatggggtcctgttctgatgcccaggctggagtgcgatggagcaatcatggctcactcagcttctaactcctgggcttgaacgatcctcctgcgtcagcctccccagtagctgagactacaagcaatagcca

SEQ ID NO: 937860 - DNA, 656 bp, Homo sapiens
ggcaccataatgctgattccctcaaatgccctcaccaagctctgtgggcccagctcctctgggttttcctcttatttctggcccttatctctcagctactgtctcagctccactttctctctgtcccttaggcagtgctattctccaagggtctcatttttacttttcttatgctcacatccactggatgagctgattcccttccatggcttcaactaccawatgggtaccatagctcatacggatacacagctcagtcatacatcttcaatccagaactctcaatcctgttgcctactattgaccttcacttaaatataccacagtcactacaaaaacatctacatagttgatgtttctcaacatctttctccccaaacctgcttccccaggatgccccatttcagtgaaacctcagaattaaaccgttaggaacccagcagctatcctagactcacctcctctcttgggcccatgtccagtcagtctccaagtcctgtcagtcctgccctgtgcacctttctcacatctgcacctgatcaccaccccctgtggcactgctgtagatctgttactcttcctcctggagatcacctcacctgcctcctagctgatccctcttgtctcactctcatcctatccagtctgctgccact

SEQ ID NO: 937861 - DNA, 656 bp, Homo sapiens
ggcaccataatgctgattccctcaaatgccctcaccaagctctgtgggcccagctcctctgggttttcctcttatttctggcccttatctctcagctactgtctcagctccactttctctctgtcccttaggcagtgctattctccaagggtctcatttttacttttcttatgctcacatccactggatgagctgattcccttccatggcttcaactaccatatgggtaccatagctcatacggatacacagctcagtcatacatcttcaatccagaactctcaatcctgttgcctactattgaccttcacttaaatataccacagtcactacaaaaacatctacatagttgatgtttctcaacatctttctccccaaacctgcttccccaggatgccccatttcagtgaaacctcagaattaaaccgttaggaacccagcagctatcctagactcacctcctctcttgggcccatgtccagtcagtcyccaagtcctgtcagtcctgccctgtgcacctttctcacatctgcacctgatcaccaccccctgtggcactgctgtagatctgttactcttcctcctggagatcacctcacctgcctcctagctgatccctcttgtctcactctcatcctatccagtctgctgccact

SEQ ID NO: 937862 - DNA, 503 bp, Homo sapiens
aggcatgccccactactaggcttatcccataggtcccagcttccagaccactcccagcactaggctagcccccatggccccagcctccaggccagcctctgtagacccatcctccagggcagtacctacagattgcaacatcaggttgactgtgtagtcccagaacccaggcctgcctccacagactcagcctctgacccatcttccaggcccatcccagtgccaggctagcccctgctggcctggcctccaggcctatccccgcaccaagccagccctcacagccctagactccaggccagtacccacagacccagcctctagccccactgctacaccaggttggcaaccacagaccctgratcaggactagtccctgtggatacaagctccagacctgccaagtgccaggccaggccccatgagctaaggatcaagaccttccccaggccccagactggcccagcaccatgccagcctacacggccccaggcttcaggccc

SEQ ID NO: 937863 - DNA, 609 bp, Homo sapiens
gcttctaactttcttcctgcagtgactgaatgtttatgtctctccaaaattcatatgttgaaatcctaacctagggccgggcgcggtggctcacgcctgtaatcccagcacttagggaggccaaggcgggcggatcacaaggtcaggaratcgagaccatcctggctaatacagtgaaaccccgtctctactaaaaatacaaaaaattagccgggtgtggtggtgggtgcctgtagtcccagctactcgggaggctgaggcaggagaatggcgtgaacccgggaggcggagcttgcagtgaaccaagattgcgccatgcactccagcctgggtgacagagcaagactccatctcaaaaaaaaaaaaaaaaaatcctaacccaattctgaagtgatggtattaggaggtggggcctttgggggtgattaggtcatgaggatagaggcctcataaatgggattaatgcccataatttgcttgactatagtaaccactatatatatcactatatattggcttgactatagtaaccactacatatatattttggcttccccgggccacactggaagaaaaagaattgtctttgaccacacataaaatacacta

SEQ ID NO: 937864 - DNA, 805 bp, Homo sapiens
ttgcaaggacctctttatttagcaaagtaaagtgacatggaaaccgctgataaaacattgacttcagtactaaattagaggtttattaaaagcattgataatacatagaaaggagtaaacaattgtgcccgctggaggggggagatggcggaccagaggagagtaagaaagaagaagtattagagcaggtttgagagggaagcacgtttttgctaggcttgcgaggaatcacaggagtttgctaataaattaatgtatactctaagtgacataatggtttttctgcatgtctcatacaagtttgaaactgagctaactagcctgaaccacacactgacccatgcccaacctactctccttcttgatttctctgtgttgatttttggtatcattaaccaatcatatctagtcttggaaactgagagttagctttgaatcttgtttttcctttacaccccacatcacatgatcaccagamcaaatccattttactcaagaaatgtccatttgatccatctcatcttctccatgccaagtccttgtcaactttctcctgaactaaattcagtacactctttactgccaatcactccttagaaaggaacgtattctttgctctcctgctatgatgaatgctgccccttcactgcagtgctccaggaccctatattgaccatgcttctgtgcttctgctatagtgtgtgtgtgtgtgtgtgtgtgtgtgtgtgtgtgtgtgtgtctgtgagaaagagtccatgtgtgtgcgtgcacatatgtgcattcatacacccacacggccaggaat

SEQ ID NO: 937865 - DNA, 624 bp, Homo sapiens
gcacttcaagcagaagcaacctacttggctctgcttgagttcttcttcttgcattgcagcatggaaacttgatagttagcaacagaaattgacatttcattttttaatttagtcatttaataaacatttattgagcacctactctgtactaggcattgcttgaagtactaaatactcacagtgaataaagtagaaaaatttcccagcctcatgaacttgacattgtaatgttttacaaaaaaaagsggggagaggaacttatgggaccaatatctctaagaggcacagaggaaatatagatatataggaaatgcagagagtctggaagataaacaggagtcaaggaacaagagcaatatatactgcacatgtgactgctgttgagatgaatagccttctaaccatctacgaattcttgtatcatttgctcaagatttgaagtcttagaaaaaagagccatattaacaaaatctaagtcagtgctcacctcctgagtcctcaaaggcagaaagagaaaggaaccaggacctaacttctgcagtggaaatgaggcattatttctcccacggtgacacagaatcaagaagtgtttataagggggattaggaaggagagttgtgaaga

SEQ ID NO: 937866 - DNA, 784 bp, Homo sapiens
tccacctgcttgccagttggagtgtgataggaagcaaacggccctgatagagactctatttctaggcacactgacagagcattcagcgaagtgtcaccacactttgcttcatctagatcatcagggcaaacctgaaactctatcaggagagggaccagactcttccaagaagatggagggaaccagggacacagagcatcctccctactcaggtccctattgctatggtaaaggaggagaagaaagacagatgaggtgaggaggctattccagaaactgcgtgtgaaatgggtggtaagacattgccttgaggcattgctgaaacaatcagactttcgagtctagtctgaaggacataagaccagggagaccttgatatgcagagatgctacccaagcttggaacccttccakagagagccccccaaactttgtagaatgtacctagcaagtcaaagcctcctttgtgccaaatatctgtgttcctgctctctacttctctactttctactccacagcaaaatgtccaagaaaattcgatcttcctctttgctctccaaccctattcctagccttcagttttgttttgtttttttttgtttgtttgtttgtttctgtttatcaaaggagtggaatgcatcaggcaagaaagtacctacctgctacaccttatacattttcttcctgcttagctcaaacctgtgagtgctgtagccagtgaggtacatttcattaaatggatgaacctagacttggggtatgtggcaatcaacacacaatactga

SEQ ID NO: 937867 - DNA, 625 bp, Homo sapiens
atttgggggcttcccacaacccccaccctctccgccagatttgataatttgctgggatgattcacagaactcaagaaactgatacacttacaattgtagttttattataaaggatacaatataggaaggagacatatagggcaagattttgagaggaatgcaagagcttctgtcccagtagagccagcatatggtacatcaaaatgtgcaccaatcagaaagcccccaagcctcactgagattttaatcaagatttcatgacttaggcatgattgataaatcactgaccatgtgattgaactcaatctctagctcctctcccttccgcaggtagagtggggtagggtctgaaaattccaaccttgtaatcatatgattggtttctctggcaaccagtccccattttcaagctatctaggaccctccgatcagcataaactcrggtatggttgagaggagtttgttatgaataatgaaagatgtttctgttactcaggaaattccaagagattctaagctttgtaccaggaaccaaagacaaagatagattgatagatgatagatagatgatagatagatagatagatagataatagagatatataaaattataccataatgtgat

SEQ ID NO: 937868 - DNA, 668 bp, Homo sapiens
ttgatcaaggagaagtaagaattagtaagcttagagagaaaatatttgaaaacacacagtcagaagaggaaaaaataatgaaaaggaatgacaaaaattatatgggatctatgcagtggcatcaaaagagcaaatgtatgccattaacatttcagagggagtaaggaatgataaaagggtagaaagcttattcaaggaaataatagcgtaaaactttccaaacttggagaaagttataaatatccagctacagaaagattgaagaccaccaattgggcttaaataagacttttccaaatacattataatcaaatcctcaaagatcaaagacaaagagattatcctgaaagcagcaagggggaaaaaagcaaatgacatataagggagttccaatacacytggcagcagactttgcagcagagaaggacttcacagtcctggagagaaagggattatatttttcaatgtgttcaaggaagaaaaacaaataaacaaacaaaaaacagccaacaagaatattataaccagcacaatcatcctcagacatgaaggaaaaataaaaactcccagacacaaagttgagagaattcatcaccaacagagtcgtattacaacaaatgataaaggatgttcttcaaactaaaagaaaagaatgctaatatgtaaca

SEQ ID NO: 937869 - DNA, 578 bp, Homo sapiens
accaagtctgtgtttcattatactgaattagaagataataacaacgagaaagaaaaaaatggtgattggcagccctggctgcacattagtttctccttgggagcttttttaaatcatgatgtccaggctgcaccctagactgattaaaccagaatacgtaggagtggaacccagacatcaggatttgcttaaagctcctcaggtgactttagtgtgcagccaagtttgagaatgactaagagatgtttcaaaggaagacttggtaatagttggctagcaagcgggaagaccgagagagaaggaggaaagaggtgactttaagattttyaacttggatgaaggcagaaagggatgtgagtggggaaatgaggagtttattctcacagtcatttactttgccatcatagtgtgacatccaggtggaaatacccaatagatgccttggcaaagtgaaccacgggcttcagaggagtcaaggctatatcaaggtcaacacctcatccagtgctgtgctgggggcagctcacaccagctccagggaagcaactattaaatattctgaaattttgcaagccagt

SEQ ID NO: 937870 - DNA, 626 bp, Homo sapiens
atggtaatgtcaagcaaataaagagaatgtaaatgaggaactggtgaggaggccaccctttgagaagatggaggtgagaggggaaagagaggagttagcacacgccaggcaacggagtgggggtaatcactcactctgtctctctccatcagtctggggttgccagggtctttgaatggcaragaaaagagagtggagagaactgggatggggggacacagggccctggccctcagtgactgctccccaaaggcattaattagatatcactgcaaaatagcaaaaccagagtaaaacctcccccaggacttcactcacacaatgaccaggctctttcaccaagccctcccaggtccctccctccctgcttttacatcttacataaggaggcttctattgtgctaatatccaaggaaaaaagtgactaagggtgagtgtgcgactaaggaaaataaagaaggaagagagcctccaaggcttgcccccacccccagtttcttggctcactccacgattccgtcagttcgcaggctctgacataaaaggcaggaagctacacacgctaaacaaagctccttagatgtcaggaaattaacctgggaaatcggagccaagagagattaaag

SEQ ID NO: 937871 - DNA, 626 bp, Homo sapiens
atggtaatgtcaagcaaataaagagaatgtaaatgaggaactggtgaggaggccaccctttgagaagatggaggtgagaggggaaagagaggagttagcacacgccaggcaacggagtgggggtaatcactcactctgtctctctccatcagtctggggttgccagggtctttgaatggcagaraaaagagagtggagagaactgggatggggggacacagggccctggccctcagtgactgctccccaaaggcattaattagatatcactgcaaaatagcaaaaccagagtaaaacctcccccaggacttcactcacacaatgaccaggctctttcaccaagccctcccaggtccctccctccctgcttttacatcttacataaggaggcttctattgtgctaatatccaaggaaaaaagtgactaagggtgagtgtgcgactaaggaaaataaagaaggaagagagcctccaaggcttgcccccacccccagtttcttggctcactccacgattccgtcagttcgcaggctctgacataaaaggcaggaagctacacacgctaaacaaagctccttagatgtcaggaaattaacctgggaaatcggagccaagagagattaaag

SEQ ID NO: 937872 - DNA, 595 bp, Homo sapiens
acagcagaggcatgagaaagcctaccccaaatgactcaagaccagaactccccagctaattaaactcagcctaaattgctgatccccaaaatcgtaagctaaacatatggtggttgttttaagccactaagttttggggtggctttatgtagcataattctggtagtaggtaactgtttcagaagacaggaatggttctgataattagaaccacaatgactcccatatttatgtcaccagccaacacttctctcccttgagttccagacccaagtatccagccaccaacccaacatttctatgatcagaaccaagctcttgataacaccctaaaatttactcctcctatagccagtctttactgtcttgataaaatgaataactttctatttccagttgcttargcctaatccttgcactcatttttaagatttcttttacattccatgtccaatttcttagcaaatcctgtgggctctgccttcaaaatatattcagaatctgctcacttttcaccaactctatggctactactctgagccaagcccccaccatctcttgactggattgttccagcagcctcttaacttattgc

SEQ ID NO: 937873 - DNA, 525 bp, Homo sapiens
attacaggcacgtgacaccgtgcccagctaatttttgtatttttagtagagacagggtttcaccatgttgcccaggctggacttgaactcctgacctcaggtgatccacttgcctcggcctctcaaagtgctgggattacaggcgtgagtcaccgtgccctgctccaacttttcgttgcttgtagtcttcttctttctctctctatgcatcaaccatatctcactaccaaatacacattttcagaaaatgcaaaattctcatccaagtcttagatacatttcctcctcctaatagttgcgtcccatattttggagtccatttctcctgcaccttcttacgtttatgtattagtttgacaagtatttttggaacagctacttaccacacyggcaggtagtttgaaatggcagagaggacaatggctttggaatctgataaattaaggtttgaaccctggctatggtacgtaacagctagtgaccttgagcaagttgtttcaccaccttgagcctcagccattatct

SEQ ID NO: 937874 - DNA, 580 bp, Homo sapiens
ttctccccagaaaatggggttttctttttcacctcacagtcaggctgcaaattttccaaacctttatgctctgcttcccttttaataagttccaatttcaaaccatctctgtgaatgaatatgactgaatgctttcagaataagccaggtcacctcatgaatgctttgctccttagaaatttcttccaccagataccctaaatcacctctctcaagttcaaggctccacagatctctagggcaggggcaaaattccaccagtctctttgctaaaacgcagcaagagtgacctttgctccagttcccaataagttcctcatctccatctgaaaccatctcagcctggacttcattggtcaaaactattcwacaagtttctaggcagttccaaactttcattcatcttcctgtcttcttctgagctctccaaactgttccaacctctgcctgttacccagttccaaagtcacttccacatatttgagtatcttttcagcaacaccccactcctggtaccaatgtaatgcattagtccatttttacgctgctgataaaggcatactcaagactgggaagcaaa

SEQ ID NO: 937875 - DNA, 606 bp, Homo sapiens
aagctgcgcaccttcgcgggtgagtgttacagctcttcaggtggcacgtctggaattgttcctcccggtgggttcgtagtccttctggcctcaggagtgaagctgcagatgttcgcggtgagtgttacagctcataaaggcagtgtggacccaaagagtgagcagtagcaagatttattgcaaaaagggaaagaacaaagcttccacaatgaggaaggggacccgagtgggttgccactgctggctcgggcagcctgcttttattatcttatctggccccacccacatcctgctgattggtagagctgagtggtctgttttgacagggcrctgattggtgcgtttacaatccctgagctagacacaaaggttatccacgtccccaccaaattagctagatacagagtgtggacacaaaggttctccaagtccccaccagagtagctagatacagagtgtcgattggtgcattcacaaaccctgagctagacacagggtgctgactggtgtgtttacaaaccttgagctagatatagagtgccgattggtgtatttacaaccccttagctagacataaaggttcaccatgtccccctcagactcagg

SEQ ID NO: 937876 - DNA, 644 bp, Homo sapiens
aaacagagacaatttgacttcctcttttcctaattgaatgccctttatttctttctcttgcctgattgccctggccagaacttccaataccatgttgaataagagtggtgaggaagagcatccttgtcttgtgccagttttcaaagggaatgcttccagtttttgcccattcagtatgatattggctgtgggtttgtcataaatagttcttattattttgagatagttccatcaatgccaagtttattgagagtttttagcatgaagggctgttgaattttgtcaaaggccttttctgcatctattgagataatcatgtggttctgtatatgtgatggattacatttattgatttgcatatgttgagccagccttgcatcccagggatgaagccaacttgatcgtggtggataagttttttgatgtgctgccggattcgrtttgccagcattgaggatcttcgcattgatgttcatcagggacattggcctgaaattttctctttttattgttgtgtctctgccaggttttggtatcaggatgatgctggcctcataaaatgagttagggaggattccctctttttctattgtttggagtagtttcagaaggaatggtaccagctcctctttgtaactctggta

SEQ ID NO: 937877 - DNA, 561 bp, Homo sapiens
ccacccaaatctcatgtggaattgtaatccccaatgttggaagtagggcctggagggaggtgactggatcatgggggcagtttctcatggtttaacatcatcccccttggtactgtcgtgaggagagtgagttattgagagatgtgattgcttaaagtgtgtarcacctcccctctctctctaaccctcctgctccagccacataagatgtgcctgcttcttcttcaccttctgccatgattgaaagtttcctgaggcctccccagaagctgtcatgcttcctgtacagcctatggaaccataagccaagtaaacttcttttctttataaatgacccagtctcagatatttctttatagcgatgcaaagatggactaatatggcaagtgatcctagaaccatatactagtttgaagttactggcaaataaagcacaaggggatgagcggtggaagatgaagctgggatctagagacaggaacttcagttaataagctctggtgcaactgtcttggcacaaggtaacaagcaatggaggttccttctgctctgttgaatcca

SEQ ID NO: 937878 - DNA, 638 bp, Homo sapiens
ctatgggtttttcaagatatagaatcacgttgtctgcaaacagggatagtttgacttcctctcttcctctttggatgctctttgtttctttctcttgcctgattgctctagtcaggacttctgtattagttcatttttacactgctgataaagacataccagagactgagcaatttacaaaagaaaaaggtttattggacttacagttccatgtggctggggaggccccacaatcatggcggaaggtgaaaggcacatctcacatggcagcagacaagagaagagagattgtgcagggaaactcccctttataaaaccatcagatctcgtgagacttattcactatcactagaaaagcacaggaaaggcctgcccctgtgattcaattacctctcaccgggtccctcccacaacatgtgggaattcaagatgagatttaggtggggacacagccaaaccataacattccacycctggtccctcccaaatctcatgtcctcacatttcaaaaccaatcatgccttcccaacagtccccaaaagtcttagcttatttcagcattaactcaaaagtccacagtccaaagtctcatctgagacaaggcaagtccctcctgcctacgagccagtaaaatcaaa

SEQ ID NO: 937879 - DNA, 559 bp, Homo sapiens
ttgacttgtaccttaggtactagctcagccatagtggagcagaacatcaagtgggctcttggggcctccaattccaggtcttcacacttgtgtggcatttctagagctgtgctgggtcagaggggagcccactgccctgaaagggagtcctaggcctggcagcattcaacacaaacttactgaagggcccttgggccttaagtgaacatcagcagtagcctggccatactccccaagggcctgtggtggtgatggtcacgggatgaggctcctctgcctgtgggaaggggaggaaagagtgggaaggactgtgtcggtggtttgagggcyggcttagtcacagtagactagaacaccaggtagacttgtaaggtttttgaatccagtccatggctcctggatagcatctctgaaacttcctggggcctgagggaactcactaccctgaagtgaaggaaaaaaaacctgactggctttgccacctgctgattgtagagccctaggaccttgagcaaatgcaggcggtagccagatagtggttacagcagttcttgggtga

SEQ ID NO: 937880 - DNA, 600 bp, Homo sapiens
acatattaatgcatttggaattgtcacagaactctaagagatacatgtgattattcctatatatcagatgaggcaacagggatttgacagcataaagtaaattgaccaaaatcacatagcaataaaatggcagaaccagtcttcaaaccggtctccctgatcccagcatcatctctatagaacattcttwaaaatatattacaaatgctcatagttctagaaactaatgttgaagatggatatttacaaaaattattagggtactggataaagaggactgctcagaaaaaggccctatgaagtgttttagatgattcatggtgtgtctttctttaaaatgaaaccagatagtaactaactaggttatacaggaagcaatgacaatcaatcactaggaaaggtaaatatgtaagcaaacaggaaaggcattccttaatttttcccctttgaaagacaaccaattattcaaagcaaaaataataaccttatattatggagttcactgcatgcgcaaatgtaaaatatattaaaataatagcccccaaaatcggggaaattgattttttctgttctaacgttcttccatttatatgaatttta

SEQ ID NO: 937881 - DNA, 603 bp, Homo sapiens
aaatgataaaaagtgaaaatcctaaaagcaccaagataaaaacatctagttacctataaagaaaaccccattgaactaacagtagattttacagcagaaacagtatgagaggtgacagtgtgctggcaatcctcacagccctcgcttgctctcggcgcctcctctgcctgggctcccactttggcggcacttgaggagcccttcagcccgccactgcactgtgggarcccctttctgggttgatcaaggccggagccggctccctcagcttgccgggaggtgtggagagagaagtgcgggcgggaaccggggccgcgcgcattgcttgcgggccagcgcgagttccgggtgggcgtgggctcggcggaccctgaactcggagcagccagccagccccaccggccccaggcagtgaggggcttagcacctgggccagcagctgctgtgctcaatttctcgctgggccttagctgccttcccgcggggcagggctcaggacctgcagcccgccatgcctcagcctcccccccttctccatgggctcctgtgctaccccagcctccccgacgagtaccgccccctgttccacggtgcccagtcccg

SEQ ID NO: 937882 - DNA, 603 bp, Homo sapiens
aaatgataaaaagtgaaaatcctaaaagcaccaagataaaaacatctagttacctataaagaaaaccccattgaactaacagtagattttacagcagaaacagtatgagaggtgacagtgtgctggcaatcctcacagccctcgcttgctctcggcgcctcctctgcctgggctcccactttggcggcacttgaggagcccttcagcccgccactgcactgtgggaacccctttctgggttgatcaaggccggagccggctccctcagcttgccgggaggtgtggagagagaagtgcgggcgggaaccggggccgcgygcattgcttgcgggccagcgcgagttccgggtgggcgtgggctcggcggaccctgaactcggagcagccagccagccccaccggccccaggcagtgaggggcttagcacctgggccagcagctgctgtgctcaatttctcgctgggccttagctgccttcccgcggggcagggctcaggacctgcagcccgccatgcctcagcctcccccccttctccatgggctcctgtgctaccccagcctccccgacgagtaccgccccctgttccacggtgcccagtcccg

SEQ ID NO: 937883 - DNA, 601 bp, Homo sapiens
catgtatttattgcacttatttttgctctgacctttgttattttctttcttctgctatctttgggactagtctgttcttcttttactaattgcttaagatgtaatgttaagctgtttatctgagagctgccttcttttttgatgtagattttaattgttatacactcccttcttagaactacttttgctgcatcccataagccttggtatgttctgttttcattcttgttttctcaagatattatttaaatttcctgtttagtttattctttgactaaatagttgttgaggagtgtattagttatgtttcacttatttgtgaattttccatgactcttcctgttattgatttccagtttcacaccattacgatggaaaatgatacttgatatgatttctttttatttcaatgtgttaagaatygtgttgttgcctaaaatataatccatcctggagaacgtaccttgtgcacttgagaaaaacgtatatcctgttgctattgggtggaatgtcctgtatatatccgttaggtccatttgttcttacgtgtagtttaagtctgatgttttcttattgattttctgtctgaatgatctgtctg

SEQ ID NO: 937884 - DNA, 601 bp, Homo sapiens
catgtatttattgcacttatttttgctctgacctttgttattttctttcttctgctatctttgggactagtctgttcttcttttactaattgcttaagatgtaatgttaagctgtttatctgagagctgccttcttttttgatgtagattttaattgttatacactcccttcttagaactacttttgctgcatcccataagccttggtatgttctgttttcattcttgttttctcaagatattatttaaatttcctgtttagtttattctttgactaaatagttgttgaggagtgtattagttatgtttcacttatttgtgaattttccatgactcttcctgttattgatttccagtttcacaccattacgatggaaaatgatacttgatatgatttctttttatttcaatgtgttaagaattgtgttgttgcctaaaatataatccatcctggagaacgtwccttgtgcacttgagaaaaacgtatatcctgttgctattgggtggaatgtcctgtatatatccgttaggtccatttgttcttacgtgtagtttaagtctgatgttttcttattgattttctgtctgaatgatctgtctg

SEQ ID NO: 937885 - DNA, 468 bp, Homo sapiens
tctttcagtttctgtctccctttaacgtgtttctccatcaattcacttttaatatgagtggcctttaggttgagatgagtctattgtaggcagcatataactgggctttgtttttttcattccttcagctacactaagccctttaactgaaacacttaattcatatactttttttttgtaattgttkataggtaaggatttactactgccacgttgttaactgttttctggtgttttattagggccttttttttatttctgtctagcttttttgctttgatgtttgatggccttctgtaccgcattgtttggatatcttttttattcttttgtgttttgttataaaatattgttttgtggttaccctgaggtttacaagaaacattttatacttgtaacaagctatttcaagtttagaataattgaattttgattgcagagaaaaattctgtaattttactctctttc

SEQ ID NO: 937886 - DNA, 468 bp, Homo sapiens
tctttcagtttctgtctccctttaacgtgtttctccatcaattcacttttaatatgagtggcctttaggttgagatgagtctattgtaggcagcatataactgggctttgtttttttcattccttcagctacactaagccctttaactgaaacacttaattcatatactttttttttgtaattgttgataggtaaggatttactactgccackttgttaactgttttctggtgttttattagggccttttttttatttctgtctagcttttttgctttgatgtttgatggccttctgtaccgcattgtttggatatcttttttattcttttgtgttttgttataaaatattgttttgtggttaccctgaggtttacaagaaacattttatacttgtaacaagctatttcaagtttagaataattgaattttgattgcagagaaaaattctgtaattttactctctttc

SEQ ID NO: 937887 - DNA, 468 bp, Homo sapiens
tctttcagtttctgtctccctttaacgtgtttctccatcaattcacttttaatatgagtggcctttaggttgagatgagtctattgtaggcagcatataactgggctttgtttttttcattccttcagctacactaagccctttaactgaaacacttaattcatatactttttttttgtaattgttgataggtaaggatttactactgccacgttgttaactgttttctggtgttttattagggccttttttttatttctgtctagcttttttgctttgatgtttgatggccttctgtacygcattgtttggatatcttttttattcttttgtgttttgttataaaatattgttttgtggttaccctgaggtttacaagaaacattttatacttgtaacaagctatttcaagtttagaataattgaattttgattgcagagaaaaattctgtaattttactctctttc

SEQ ID NO: 937888 - DNA, 629 bp, Homo sapiens
aattaatttatccaccaccattacagaattagagtctttcggattgtcaatgtatgtacatatagaaaatcctaaagactccactaagaacctgttacaacatatttaaaagttcagttaagctacaaaataaaataccaacttacaaaaatcagtagtgttgctacacactaacaattaactcaccagaaaaaaatttaaaaaacagtgttatttataatacaataaaaatatttataattaaatgttaccaagaaagtgaaaaactgtaagctgaaaactataaaacattgatgaaagaaatggaagaaggtgcaagtaaatgaaaagatatcccatgttcatgaattagtagaattaatattgttaaaatgtttatattacccaaattgatctataaattcaatggaatccrtatcaaaattccaatgggaattttcacagaactagaaaaaaatcctaaaattcatatgaaactacagaacacctaatactcaaagcaatcttgaccaaaaaggacaaagctaatggaatcatacaatgggatttcaaaatatattacaaagctataggaatcaaaacagaatgatactggcctaaaaatagacacattgattaatgtagtagaa

SEQ ID NO: 937889 - DNA, 618 bp, Homo sapiens
agtagcaaacaatagttacggtttcagtcacagagtttataatctagggttggggaagagttaaagtaaaacacacagtgaatacaatatttgaggtggtgatgagtggcatactgaaaatttaaagagggtcgtttggagtgctgttttacataggatgataaggtaaagactctctgatacagaggtatttgcacagagacttggactaaatgaaggagttggtcatgctgatatttgggtaaagagtttttccagagagatggaatagcaagggcaaaggacttgagatagaagtatgtttgccgtttttrtggaataccaatggggcattgtaacttgagaaaaataaagaagagaggagtaaaagacgaagtcggagaaatagtgggaacacagatctgtagggcattttaggacaaaatagggcttttttgcttatacttttatctaatttggaatccattgatgattctgagcacaagtatcatatgacttgacttatattttaagaatggttctgttttttgaacatggaggagtgcacattaagagtcaaggacaccaatggggagactgtgcggcaaagtgagagattatggaggtataaccacatct

SEQ ID NO: 937890 - DNA, 554 bp, Homo sapiens
tctttttgcttagttttgctttggctatgtgggctcttttttggttccatatgaatttttggattttttttctgattctgtgaagaacgatggtggtattttgatgggaattgcattgaatttatagattgcttttggcagtatggtcattttcataatattgattctacctatccatgagaatgggatgtgtttccatttgtttgcatcatctatgatttctttcagcagtgttttgtagttttccttrtagggatctttcatgtccttggttaggtatattcctaagcattttattttgtttgcagctattgtgaaaggggttgagttctcgatttgattctcagcttgattgctgttggtgtatagcagaactactgatctgtgtacattaattttgtatcttgaaactttgctgaattcatttactagttctaggagctttttggatgagtctttagggttttctaggtatacaatcatatcatcagcaaacagtgacagtttgacttcctctttactgattttgatgccctgatgtctttctcttgttt

SEQ ID NO: 937891 - DNA, 544 bp, Homo sapiens
catgttcattttgcctggcagaagggttgaccagaaagcctttcctccaaatggtataaagcaagtgaaaagcaagttacaaatacatgcacttttgaaaattaccatgtgggcacagaaaagaaaaagattctccttgttcttattttaagagaaaaatactcttcacatttcctttctgtgagaaagataaataagaaacattaagtagggaaaataggtggtgagacaaaaattattattttttccttagccaatgacctttgagaaattgaaatttcctttgaaggaattaaaaaggaaaaataagtaaaaactaaagcagccttctggctttctttgttaccctacacattgagcacaactgacagggtggcygctgcaggacaattcataggccttcattgttgagtcgtggtctcaggtggtgcattggaggtcgccgaggccttggcctgcaaatggactgagaaggtcattgaacagtgtggcgcattgctaattagtggcaaatttggccagtttctgcgtgtgaggaagcttg

SEQ ID NO: 937892 - DNA, 595 bp, Homo sapiens
tggaaaaacagtgtaaaccggcagtgtaaacaagagcaaggcatgtatgagtagttgagaatggtgaataggagtatgactagacagaaaatagtagggatgacaattttttttttgggggggtggggcacaatctaagttggtctggtgtctggaatgmgactggggcctaataaaaaggagcgtctatacaggagcttaaatgggctgtaccctgtagcattccgaggacaggcctgaattctgagaagggaaagtggtaaaagtattgtccagtcctttttaagttggtggctgagcttggtgaggtgtgtttttaaaagacctttagtccattctacttttcttaaagacggaggaccataagggatataaaggtttcactgaatactaagagcctgaaaaactgcttggctgatttgactaataaaggctcgtctgttatcagactgtattgaggtgggaaggctaaactgagtaattatgtctgacagaaaggaagaaatgactgtggtggccttctcagaccctgtaggaaaggcctttacttattcagtgaaagtgtccatttagactaagaggtattttagtttcc

SEQ ID NO: 937893 - DNA, 594 bp, Homo sapiens
aaacaaaaattaatctcacaaccacttaaacacagattacagcaaattttgaaatgcctctcaaattattgcttgttcagttatttttaataaatgtatttaatacggattgtgtacagtgaaatgctcattcttgtgctagtaaaagtgaattttagtaaaatcattcttggtaagactctgtataactttggacataaattactattcctgcctgggcatggtggctcgggcatggggtgcatgcctgtaatccagctacttgggaggctgaggtgggakaatcgtttgaacccgggaggccgaggttgcagtgagccgagatcacaccactgccctccagcctggccaacagagtgaggattcatctctctctctctctctctatatatatatatatatataattattattattattattccttttagaaatcttatctaaacaaatttaggccaagacttgtttaaaagatgtctggacatttttctctaacagcaaaattggaaaacaaactaaaccttgataaataagagaaaagtaagatcaattatggtctgtcccgtatgaagctatttatttaaattttgctct

SEQ ID NO: 937894 - DNA, 594 bp, Homo sapiens
aaacaaaaattaatctcacaaccacttaaacacagattacagcaaattttgaaatgcctctcaaattattgcttgttcagttatttttaataaatgtatttaatacggattgtgtacagtgaaatgctcattcttgtgctagtaaaagtgaattttagtaaaatcattcttggtaagactctgtataactttggacataaattactattcctgcctgggcatggtggctcgggcatggggtgcatgcctgtaatccagctacttgggaggctgaggtgggataatcgtttgaacccrggaggccgaggttgcagtgagccgagatcacaccactgccctccagcctggccaacagagtgaggattcatctctctctctctctctctatatatatatatatatataattattattattattattccttttagaaatcttatctaaacaaatttaggccaagacttgtttaaaagatgtctggacatttttctctaacagcaaaattggaaaacaaactaaaccttgataaataagagaaaagtaagatcaattatggtctgtcccgtatgaagctatttatttaaattttgctct

SEQ ID NO: 937895 - DNA, 588 bp, Homo sapiens
cagtaccctgctgcttgtagcttaggagcaatagactttatcatacagattaggtgtgtgagaggctctaccatcctggtttaggcaaggacactctatgatgtttgcacaatgatgaaatcacctaaagacacacttctcagagcaaatcctggtcattaagctacacatgactgtatataagctgcagtgtgygactgacatgtttctaccaatgattaactattcttcaatggagagcaacattccaagaattaaattgtaaaagcccgtctaataacaagtgttctgtatttctgggacaattctgtctttgcctccgagaaatggctacttcacaaactcccgtaacgaaatttcacaggtgaaaggcgcagctagccatgagcacagccaggatccatttatgtcaattaggaagtgggttagcagcccaggtgaacctggatacgagtgaaaggactagatgcagtacactagaattctcctctctgacccgtggaccaggaagaatccctctgcactgtgtaaatatgtgaaataatgggaagaccaaagaggagtcccctcagagtcccatgcttgaag

SEQ ID NO: 937896 - DNA, 605 bp, Homo sapiens
ctgaacaggcaggcctccataacaactgtctcagcactgactgagtgttgagctacatactgaaagctgagagagccagtgtccttatacaaaggctggaatgtaaccaaagcccaccaggagttttgcccaggcctctcccaggtcttgaagygcgacaaaataatgaaggaattcttaacaggacctgtttaggattaaacaacttgttattggggggctgaagaaactccccagacctccacaaaaatgttttattgggggtctaaaggaactccccaaacctccatgatttagcaggagacaggataaatgtaatcacccccggtacctagacccgtctagattaagtcaatttactgaggctgcagaggaagggcttcaaaactcagatcttagttacagattagagtaagttaatcacttatgtctttacacgaatgcacaagtacacacagacatatagcttaaaaggtatataagctctgtaaaccttgtaatttttggttagtctggcagtattttccaggccttctccctgtacccggttacagaaataagctctcttctttcccagtttatctgcatctcattattgggccacg

SEQ ID NO: 937897 - DNA, 740 bp, Homo sapiens
taatgtcaactttaatactctcaccaaaaaaatgttgaaaaaaataccccttttgcaacgtaaagctaaagatctaggcttgcataaatgatcaaaagctaaaaggtagcaccagtaatctctgttagtgctgcaaaaagacatcaagttcagtatcaacttaataaaaaagacagttattaaccagcaactgaactttaaagttatcatgttgcttgcaactgaaatacgagcctattcacaaacacagacgatattcacatgaacatccctgctaaactctacctgacctcaccatgagagtaaaccgggaggaggggtagagatgatagctctccatatataatgcttgaatctccaggaggcaacagaasaggatcattgccccaccatggctccttcccatctgttttgatcatccaggcagacctatagtgaaacaaaatgaaagcactaacagtttcctgggctgtatttttcttagtatcctacagagaaacacctagtcacactgccactgactgcactcctaaccctggattttgcattctcactctgtgggttacaagaggcaaacagcaacgtagatccatcgctatcatcggatataattcaaataagacacttgctgtggatggctgatcataacaataacatgatctgggggcatcagaagtcctgcttgactcttattttctaacatttttgcaggctgctggctgacctccaccccacttcag

SEQ ID NO: 937898 - DNA, 616 bp, Homo sapiens
cacagctgaacccatgcaagatcagcaaaagcacctcttggcccacccagagagctgtgagaaatgtaagtcagtccaatttggggtaccttgtctggcagtattgaataactaatgaaccttcaattttaacaagcctgccctttggcacacacactcacccgcacactgattcaaacaacaaactatgcgaggcccaggacgtgaccaggtggcatgtcagtaaatacctgtttccaggccctttacgaacttttcaatactcactagagctgcacaaaaattgtgctattgctgcataaagattggctatgaccgttttttgtggagagacaatttcacatcttgaaaagatatagtttttacccaaatctgggattccacacccaagacatggctgctcagaaacaattgygctgaagagattgattgcctcttggttgttgtaggctcaggggaggaaagatctgggtttgaatcactggccctacaattaacaagatttgtggcatgggaaaaatgcctgactttctaaatcttcattgcacctctgtaaatggaggcaaataacattaatcaatctaggttattttgaaatacatagtaaaatcactca

SEQ ID NO: 937899 - DNA, 561 bp, Homo sapiens
gaccaaaactcagcaattggcacaaaagtaggttacaatctgtttacacctccctttagattatagttcactatgtacagagaaacctttaggctgaacagaaaatatgtaaggaggcagttaggctaaacttgattcaacagattcatagtgttgttgatgcctagggtcttattacaaacaaaaattcacaagttttctatatgtcataccaaattttggccctatagtttctgtccagcctcttggttaagttcaaacttaccatagatactttaatgtgattgcataaccaattaatctttttttattcattccaacaaacacaaatgttatccatttacatgtagacaggcaggctggactttcggcactggggcagggcatgttakcagttaagtgcaataaaatgttaaaagaatcaaatgatagaaatgtataacaggaacactgaatgggaagcacagagtaaatatcagcgaattctaccctgttccagaaatgttaaaacttataaagtgctacccgttagtgtcttcatagtgctttcaggaaatgcat

SEQ ID NO: 937900 - DNA, 561 bp, Homo sapiens
gaccaaaactcagcaattggcacaaaagtaggttacaatctgtttacacctccctttagattatagttcactatgtacagagaaacctttaggctgaacagaaaatatgtaaggaggcagttaggctaaacttgattcaacagattcatagtgttgttgatgcctagggtcttattacaaacaaaaattcacaagttttctatatgtcataccaaattttggccctatagtttctgtccagcctcttggttaagttcaaacttaccatagatactttaatgtgattgcataaccaattaatctttttttattcattccaacaaacacaaatgttatccatttacatgtagacaggcaggctggactttcggcactggggcagggcatgttatcagttaagtgcaataaaatgttaaaakaatcaaatgatagaaatgtataacaggaacactgaatgggaagcacagagtaaatatcagcgaattctaccctgttccagaaatgttaaaacttataaagtgctacccgttagtgtcttcatagtgctttcaggaaatgcat

SEQ ID NO: 937901 - DNA, 791 bp, Homo sapiens
atgagttcaattccttggatttttagatcccacaaataagtgatagcatgtaatgtttatatttatgtacctggcatatttcatgtaacataatatcgtccagttacatccatgttgtgtaaatgacaggatctcattctatttaatggctgaatagtgcctctattgtgtaaatgtaccccattttcttgattcattcatctgttgatggacacttaggttgctttcaaatcttggctattgtgtacagtactgcaacaaatgtkggagtgtagatatctcttcaatgtactaatttcctttcttttgggtatatatccagcaggaggattgctggatcctatggtagcttaacattatttgcataagcaaacaaaagaataagaaaaaaactaatgaaattctaaactttgactctgtcctcctgctttttaagattttgttgtttttttatcttattgtgctgtctatgtcttgaaaagttgctgtacttattattttgattggtttatcatttagtctttgctcttaccataagaatagtttacacaccacagttacagtgttataatattctgtgattttctgtgtagttactgttaccagtgaattgtgtatcatgaggttattacgtatttctcattaacgttcttttctctcagattgaagtatgccctttagcactttagcccaaggtggtgaagaggtttgcaggaactcaatttctgactgctgggtttggcaattttcctctggctagccgtggtttaaatgttccctctgtgtgtggg

SEQ ID NO: 937902 - DNA, 762 bp, Homo sapiens
ctgaagtcatcccaatttacctaacataaattactttaaaaatagtaccagattaccatatttgaaatgctagcatttatcattttcaaacctttaaaacttttgccctcaaaaacattaaacattagagcatgcaaaaagcaaacatacaaacagaaaaccacctaaactttgagggagaagtaatttcaccctatcaatgttaggcagttatttaagtcagttcatattttgaaagatcacaggttgatctacactggcgctataaaaaacatcagtgcgtttttacaatttatttctagtttttacccaagacctaattctaacatgaacacataagccattggtaatatgaaccggataatacgtagttactctagttcacatcacatgtttaaacacttctggagaactccagatcacgtgataaatggctgtcagtggcaaagtagtttcctctcttagagaaaggggcaggaggtggtaacactctcaaaaggtggctaagacgcacttgaaatgtgtccrgagcatcataaaattgcatgacaagaatagagagggaaagcctggaagagaatacagaaccctcaagggcccaccatgccagtgtacccagcaccagaattatctgcagcttaaggagaaggtgtcccatgcactagtggccatgatcattattggcagctcctccagtacgtgacttttgtttatgtattaacaaagacaagaaacctaaccaacattatcacccctctataa

SEQ ID NO: 937903 - DNA, 584 bp, Homo sapiens
gtcactccattcctatatcatgatccaggtccctgggatctcagaattccctataaggctgatttaaatctgcttctaggttggctcttccctaggtctggcctcctgagatcagactgcttgtcagtattcacacctttgggtctgtccaggcagtggccaaaggagactatctgtgaggggcatggggagagcttagatgtgtgggctgggagacaccacacatggtgcatggccccttgcagtgtggacagggtaaggggcggagaggggaggtgggtgatttagtttttctgcayggccaggtgctgccacaatctgctctggaatctgagtagtctcagagctctaaattgatcctgacctctcaggtcatcatgaaagtatatttgtccatagggggctaaaaggtatttaatggcttgtttgcttgatgtagaacttgtcagtagttagacgtatggtttgtgggcctccactggtactcttgtcttggctctgaaaatgtcagggcaagtctgttttcttctctccacctattcaaatcccaccttctctcttcctgttcaggtcctgcttccttc

SEQ ID NO: 937904 - DNA, 581 bp, Homo sapiens
aaacaagacatcagagaaacataactcaaaataataacaaccatatatgacagtcttacagcctccattatacagaataaagaaaagttgaaaatgttttgcctaagaactggaacaagacaaggatgtccaccatcaccactactattcaatatarcactggaagtcctagtcagagcaatcaggcaagagaaaaaaaaaaagcatccaaaatgaaaaagaaataaaattatctatttgctgacaacgtgatcatacatctaggaaaaaaaaaaaaactaaagctttctccaaaagactcctagatttgataaacaacttcaggaaagtttcaggatacaaaattaatgtacagaagtcagtagtattgctatacaacagtaacattgtagctgagaaccaaatcaaaaatacaatcccatttctaatagccacaaaaaatgtgagaatacttttaaccaaaaagtgaatgatctctgcagggagaactataaaatattgatgaaagaaatggtagataacacaacaaatggagaaacatcccatgcaatggattagaagaatcaatatcattaatagga

SEQ ID NO: 937905 - DNA, 581 bp, Homo sapiens
aaacaagacatcagagaaacataactcaaaataataacaaccatatatgacagtcttacagcctccattatacagaataaagaaaagttgaaaatgttttgcctaagaactggaacaagacaaggatgtccaccatcaccactactattcaatataayactggaagtcctagtcagagcaatcaggcaagagaaaaaaaaaaagcatccaaaatgaaaaagaaataaaattatctatttgctgacaacgtgatcatacatctaggaaaaaaaaaaaaactaaagctttctccaaaagactcctagatttgataaacaacttcaggaaagtttcaggatacaaaattaatgtacagaagtcagtagtattgctatacaacagtaacattgtagctgagaaccaaatcaaaaatacaatcccatttctaatagccacaaaaaatgtgagaatacttttaaccaaaaagtgaatgatctctgcagggagaactataaaatattgatgaaagaaatggtagataacacaacaaatggagaaacatcccatgcaatggattagaagaatcaatatcattaatagga

SEQ ID NO: 937906 - DNA, 813 bp, Homo sapiens
gttccactggtactgacatctttcaggtggctctccatcccttgaaacaagacgtgtgagcacttggttctcatattagtcagggttctctagatggacaggactaatagaatagatgtttatgtggttcggctgtgtcctcacccaaatctcatcttgaattctcacatgttgtgggtgggacctggtgggaggtggttgaatcatgggggtgggtctttcccgtgctgttctcatgatggtgagtatgtctcatgagatctgatggttttataagggggagttttcctgcacaagctctctttctttgcctgctgccatcagtgtaagatgtggcttgctcctccttgccttccaccatgattgtaaggcctcccagtcacttggaactataaatccattaaaactctttcttttgtaaatttcccagtcttgggtatgtctttaccagcggtgtgaagatggactaatatagatgtatatgaaagggagtttattaaggagtattgactcacacaatcacagggtgaagttccacaaaatgccatctgcaagctgaggarcaaggaagccaattcaagtcccaaaacctcaaaagtaggaaagctaacagtgcagccttcagtctgtgactgaaggcccaggagcccctgcaaaccactggtgtaggtacaagattccaaaagctaaagaacttggagtctgatgttagaggacaggaagcatcaattatgggagaaagatggaggccagaagacttagccagtctagtcctttcacgtttctctgcctgcttttattctagccacactg

SEQ ID NO: 937907 - DNA, 574 bp, Homo sapiens
tatttcaaagacctctgagtttctttatcacaaggattttcttccaataaaaaaccttctgatgggcatggtgtattacctctttggatctttgtacctatccatctatactgttaggaatatccctgacccttaatcccacctataaatataacatctttcttatattaattcctatatataggaaatttatggtgaatttagrtccaaacattggcagacagagaaagtggatactcatagttaattacaatggggaacagaaagtaaatgaggaaagcagcacagactttttcatttatatctactcatgtctcttaggaaacagagtggggtccttgttttcttgacctcttcactactgataaaatgttcttccatttatgtccacagattaccaaagattatacaactttgcctagcaaacttatgtatttccttagtattgaagcaggaaattttccctgactccttcgtgggtgggaattggagcacacaggtgccagcaggggcaaactccactcatttgacctgctgcgctcaacccctcgtggaaggaagcatataggtgagc

SEQ ID NO: 937908 - DNA, 592 bp, Homo sapiens
caggcaacaaatagcaggatgaatgcaatggtacctcacatttcaatactaacattgaatgtaaatggcctaaatgctccacttaaaagatacagaactgcagaatggataagaactcaccatccaactatttgctgccttcaagaaactcacctaacacataaggacttacataaacttaaagaaatgggaaaaagcattcacacaaatggacacraaaaacgagcaggggtagctattcagctattcagacaaaaaaaaaaaaactttaaaataacagcagttaaaagagacaaagagggacattatataatggaaaaaggcattgtcacagattagagtgactacagcaaataacgttatggtgtatatttcaagatagccagaagagattatgttacgtgttgtcactgcagataaataataaatgtttaaagtgataagtgtgataattacaacaatttgatcattatactatgtattctgcatggaaacatcacattgtaccccataacattgtgtcagttgtaaatttaaaaattaaatacaaaataaagtcagaaacaacacattaaaaagaagaaaggagtaa

SEQ ID NO: 937909 - DNA, 592 bp, Homo sapiens
caggcaacaaatagcaggatgaatgcaatggtacctcacatttcaatactaacattgaatgtaaatggcctaaatgctccacttaaaagatacagaactgcagaatggataagaactcaccatccaactatttgctgccttcaagaaactcacctaacacataaggacttacataaacttaaagaaatgggaaaaagcattcacacaaatggacacaaaaaacgagcaggggtagctattcagctattcagacaaaaaaaaaaaaactttaaaataayagcagttaaaagagacaaagagggacattatataatggaaaaaggcattgtcacagattagagtgactacagcaaataacgttatggtgtatatttcaagatagccagaagagattatgttacgtgttgtcactgcagataaataataaatgtttaaagtgataagtgtgataattacaacaatttgatcattatactatgtattctgcatggaaacatcacattgtaccccataacattgtgtcagttgtaaatttaaaaattaaatacaaaataaagtcagaaacaacacattaaaaagaagaaaggagtaa

SEQ ID NO: 937910 - DNA, 592 bp, Homo sapiens
caggcaacaaatagcaggatgaatgcaatggtacctcacatttcaatactaacattgaatgtaaatggcctaaatgctccacttaaaagatacagaactgcagaatggataagaactcaccatccaactatttgctgccttcaagaaactcacctaacacataaggacttacataaacttaaagaaatgggaaaaagcattcacacaaatggacacaaaaaacgagcaggggtagctattcagctattcagacaaaaaaaaaaaaactttaaaataacagcagttaaaagagacaaagagggacattatataatggaaaaaggcattgtcacagattagagtgactacagcaaataacgttatggtgtatatttcaagatagccagaagagattatgttacgtgttgtcactgcagataaataataaawgtttaaagtgataagtgtgataattacaacaatttgatcattatactatgtattctgcatggaaacatcacattgtaccccataacattgtgtcagttgtaaatttaaaaattaaatacaaaataaagtcagaaacaacacattaaaaagaagaaaggagtaa

SEQ ID NO: 937911 - DNA, 634 bp, Homo sapiens
cacttaaagggtaactgactaattgctggagaaaaagcatggactatcttgagagacaaaaattgcaggcacagcctcagaggaccccacaaattcatgactttcacatccaggagcccaaactacatgctcagggtaaagatcagagaaagattccttttgtgcttctgacaggagcaagcagaaaataaccatttttaaacagtcccagagtgttctgttctctttaacacctaccctcaagggaaactatttatcacwgactgatttgagttttactaaagcctaactgatctggaagatgacaaatactgaactgtagtttctctagtcttcctatctcatctaagagaaaaaaaacaaactcagaagctcttgtgaagatcccagcctaggatcccaataaaagactaaaacttaattacagaattagaggacattttccctctccccacaatttaccagcacaccaatcaggatcccgtaaaataacagggaattacattgtaagaactgcaaggctgagacccaatttaagaaggggtctctaaagaaattcaaagacaacagagaagaataaaacaaagacactagagaaaacttaagcctctggcacctgttattacagcaaaca

SEQ ID NO: 937912 - DNA, 728 bp, Homo sapiens
cctagtcttatgacctgttagcttccttcatcagacatgagcaccaggatggcaggggcctcatctgtcttgttcctcctgtggcctgggtcctagcaccatgtctggtacagtgtagatgctcaagggaagtttactgttgaagaactgtctacctgggagaggttactgttagtctaagctgcactatttggtaaaccccttgatgttttgcagatcctggtcagagtaaaacattccatgggaactcgggctgtgagaaacatcctaaccacctgactgcagaaacatccttatcacatcctgctgggcaarggcccaacagcctgacttcaggaacatccttatcatcttctactgagcagcaagctatactgtccagagccctccctcccagccccatgattaccccagcctgtaagtggcagtgggcgctgacactaagctggtttccccctccgcagggttttgctagtaataaacctgtgttgctgttgaagcggccaatctctgtgtgtgtgtgtgtgtgtgtgtgtgtgtgtgtgtgtgtgtgtgtgtctgtgtgtctgtgtgtgtgtgtgtgtgtctttaactcttgccttgccttcaaatccttacaataactccacttctccatttcaccatggaggatacgggactcaaggagagcaagtaacttacccagaattacacagccagtgagtcacagagtctgaacttgaactcag

SEQ ID NO: 937913 - DNA, 728 bp, Homo sapiens
cctagtcttatgacctgttagcttccttcatcagacatgagcaccaggatggcaggggcctcatctgtcttgttcctcctgtggcctgggtcctagcaccatgtctggtacagtgtagatgctcaagggaagtttactgttgaagaactgtctacctgggagaggttactgttagtctaagctgcactatttggtaaaccccttgatgttttgcagatcctggtcagagtaaaacattccatgggaactcgggctgtgagaaacatcctaaccacctgactgcagaaacatccttatcacatcctgctgggcaagggcccaacagcctgacttcaggaacatccttatcatcttctactgagcagcaagctatactgtccagagccctccctcccagccccatgattaccccagcctgtaagtggcagtgggcgctgacactaagctggtttccccctccgcagggttttgctagtaataaacctgtgttgctgttgaagcggccaatctctgtgtgtgtgtgtgtgtgtgtgtgtgtgtgtgtgtgtgtstgtgtgtctgtgtgtctgtgtgtgtgtgtgtgtgtctttaactcttgccttgccttcaaatccttacaataactccacttctccatttcaccatggaggatacgggactcaaggagagcaagtaacttacccagaattacacagccagtgagtcacagagtctgaacttgaactcag

SEQ ID NO: 937914 - DNA, 730 bp, Homo sapiens
atacagaaaatggcaaatgaggactggagcattgctataaagatacctgaaaatgtggaagcagctttggaactaggtaatggacagaggttggaagagtttggagggctcaaaagaagacagatgagaaagtttggaccatcttagagactggttaaatggttgtgaccaaaatcctgacagaaacatggacagtgaaggctaggctgaggaggtctcagatagaaataagaagctttctggaaaatgtcttccttttggatatggaaagcttacacaatgcctgtaccacccctgtaccttagaagcagtgatcttgcattttatttcagaggcttataggcaaaagaggctgcagccttgactcagatgagactttggactttgtaacrttgtgttaatgctgaaatgagttaagactcatgctgggaaggcatgattgtattttgcaatgtgaaaaggacaagagattcgtggggtcagggacagaataatatggtttgtctctatatccctatcaaaacccgtgtggaattatactccctaacgttagaggtggggcctaggtggaaaaagatttagtcataaaatggtgcaggtagatcctccacgaatgataaagcaccatccccttgatgctgtcctcctgatagtgagtgagttttcatgtgatctggttgtttaacaggctgtggaacctctttcctcactctgtcttcctcctactcct

SEQ ID NO: 937915 - DNA, 730 bp, Homo sapiens
atacagaaaatggcaaatgaggactggagcattgctataaagatacctgaaaatgtggaagcagctttggaactaggtaatggacagaggttggaagagtttggagggctcaaaagaagacagatgagaaagtttggaccatcttagagactggttaaatggttgtgaccaaaatcctgacagaaacatggacagtgaaggctaggctgaggaggtctcagatagaaataagaagctttctggaaaatgtcttccttttggatatggaaagcttacacaatgcctgtaccacccctgtaccttagaagcagtgatcttgcattttatttcagaggcttataggcaaaagaggctgcagccttgactcagatgagactttggactttgtaacattgtgttaatgctgaaatgagttaagactcatgctgggaaggcatgattgtattttgcaatgtgaaaaggacaagagattcrtggggtcagggacagaataatatggtttgtctctatatccctatcaaaacccgtgtggaattatactccctaacgttagaggtggggcctaggtggaaaaagatttagtcataaaatggtgcaggtagatcctccacgaatgataaagcaccatccccttgatgctgtcctcctgatagtgagtgagttttcatgtgatctggttgtttaacaggctgtggaacctctttcctcactctgtcttcctcctactcct

SEQ ID NO: 937916 - DNA, 730 bp, Homo sapiens
atacagaaaatggcaaatgaggactggagcattgctataaagatacctgaaaatgtggaagcagctttggaactaggtaatggacagaggttggaagagtttggagggctcaaaagaagacagatgagaaagtttggaccatcttagagactggttaaatggttgtgaccaaaatcctgacagaaacatggacagtgaaggctaggctgaggaggtctcagatagaaataagaagctttctggaaaatgtcttccttttggatatggaaagcttacacaatgcctgtaccacccctgtaccttagaagcagtgatcttgcattttatttcagaggcttataggcaaaagaggctgcagccttgactcagatgagactttggactttgtaacattgtgttaatgctgaaatgagttaagactcatgctgggaaggcatgattgtattttgcaatgtgaaaaggacaagagattcgtggggtcagggacagaataatatggtttgtctctatatccctatcaaaacccrtgtggaattatactccctaacgttagaggtggggcctaggtggaaaaagatttagtcataaaatggtgcaggtagatcctccacgaatgataaagcaccatccccttgatgctgtcctcctgatagtgagtgagttttcatgtgatctggttgtttaacaggctgtggaacctctttcctcactctgtcttcctcctactcct

SEQ ID NO: 937917 - DNA, 812 bp, Homo sapiens
agagctctgaaactgtgaacatgggagtaacgatttaggatgtatctggtggaatgagcatctaggcagcatagctcaagaggtgtcctctctacatccaacagcctgtgttcttatgtgtgacctgagaaattacctcaagctgcaacttctatttaaatgagaagtagacctcaaaaatttgaaaagtttgcagcctagccaagtggtcaaaaaggaaagctgattttcagggggaaaattcaagagcacttaaagtatttgcataaaaaaagagcccagtgcaaatagccaagactatggggaaaaggccttgaaggcatttcagagacctttgcagcagcccttgctgtcataggccctggggacraggagagaattgtttcctgggccagctccatggcctggctgctgtgtgcatcctcaggacactgctgcctgcatccctgcagatccggctccagccatggctgaaagatgcacaggtacagcttgggtcactgcttcagaggtggctccaagccttgatggcttccacatagtgttaagccaggaggtgcacagagcaagagactagaggcttgggagcctctgtctagactccagaggatgtacagaaaagcctgggtgtccaggcagaagcctttccaagaggcagagcctcatgggaaacctttactagggcaggaaagaagggatgtatcaggttgaagccctcacacagggaggcaccatccttcaaaccccagattcatagacccaccaacagcttgccccctcaatgtgggaaagctacagacactcaacaccag

SEQ ID NO: 937918 - DNA, 616 bp, Homo sapiens
caaaacaaaagctgattttcagagggaaaattcatgatggctttaaaaatttgcatgaaatgaaggccagtgctaatagccaacgcaatgggggagaaagccttggaggcatttcagagatgtttgcagtagcccttkctgtcacaggccctgggacctaggagaaagaatggtttcctgggccatccccatggctctgctgctgtgtgcagcctcaggatactgctgcctgcatccctgcagctccagctccagccttgtctcaaagacgcacaggtacagcttgggacaccgcttcagaaggtgcaagctataagccttggtggcttccacacagtgttaagccagtgggtgcacagagcactagttcagaggcttgagatcctccatatatattttggaagatatataaaagtgcttgggtgtccagacagaaggctgccaaaaaggcagagcctcatgggaaacctctactagggcagtgcagaaggaaaatatggggttggagcccccacactggaggccaccatcatgaagaccccagattcatagacccaccaagagctttgcaccctccatgggttaagaaccccaggcactcaacaccagcacagcc

SEQ ID NO: 937919 - DNA, 556 bp, Homo sapiens
tgaaggccagtgctaatagccaacgcaatgggggagaaagccttggaggcatttcagagatgtttgcagtagccctttctgtcacaggccctgggacctaggagaaagaatggtttcctgggccatccccatggctctgctgctgtgtgcagcctcaggatactgctgcctgcatccctgcagctccagctccagccttgtctcaaagacgcacaggtacagcttgggacaccgcttcagarggtgcaagctataagccttggtggcttccacacagtgttaagccagtgggtgcacagagcactagttcagaggcttgagatcctccatatatattttggaagatatataaaagtgcttgggtgtccagacagaaggctgccaaaaaggcagagcctcatgggaaacctctactagggcagtgcagaaggaaaatatggggttggagcccccacactggaggccaccatcatgaagaccccagattcatagacccaccaagagctttgcaccctccatgggttaagaaccccaggcactcaacaccagcacagcc

SEQ ID NO: 937920 - DNA, 556 bp, Homo sapiens
tgaaggccagtgctaatagccaacgcaatgggggagaaagccttggaggcatttcagagatgtttgcagtagccctttctgtcacaggccctgggacctaggagaaagaatggtttcctgggccatccccatggctctgctgctgtgtgcagcctcaggatactgctgcctgcatccctgcagctccagctccagccttgtctcaaagacgcacaggtacagcttgggacaccgcttcagaaggtgcaagctataagccttggtggcttccacacagtgttaagccagtgggtgcacagagcactagttcagaggcttgagatcctccatatatattttggaagatatataaaagtgcttgkgtgtccagacagaaggctgccaaaaaggcagagcctcatgggaaacctctactagggcagtgcagaaggaaaatatggggttggagcccccacactggaggccaccatcatgaagaccccagattcatagacccaccaagagctttgcaccctccatgggttaagaaccccaggcactcaacaccagcacagcc

SEQ ID NO: 937921 - DNA, 772 bp, Homo sapiens
ttttctgcatatattaaaaaggatctaccgatgtatgaaaaggatgtaactatttagcttttgctgcctgagacagttacagtaagaaatactgaagggcactttagacttcacaaagatcctttctgtctctttccttagctccttacaatcctatgagatgtgtgtatttcttttttcctctccattttacacaggaggaaactgaagctcacttacacagggaattagtgaccaggtcagtctaggagtccatcttctgactccttccagtatctaattagaattaagacaagactcattcggctgggggggctgttggctctcatgccgtgtatatcccagccactttaggggacagccgaaagcagggtgggatcacttgaggttaggagtttgagaccagcctggccaacatggtgaaaccctgtctctaccaaaaatgccaaaaattagcctggcatggtagcacatgcctgtaatcccagctactcaagagtctgaggcaggagaatcgcttgaacccgggaggtaaatgttgcagtgagccgagatcgcaccactgcacttcagcctgggcaacagaacgagactccatctcaaaaaaaaaaaaaaaaaaaaaaaaaaracagcctcattcgggagattcggggggtggaggtagcagtgtttaaaaaaaaaaaagcctaggcaggcattacaatatgaaaatcattcttgcttaaaggaagactggtaactgggactctgcatggatgtgtcccctattccc

SEQ ID NO: 937922 - DNA, 627 bp, Homo sapiens
ccaggcgtggtggcttacgcctgtaatcacagcactttgggaggctgggcgggtggatcatgaggtcaggagttcgagaccagcctgtccaatatggtgaaacctcgtctctactaaaaaatacaaaaattagccaggcgtggtggcacgcacctgtggtcccagctacttgggaggctgaggcaggagaatcacttgaacccaggaggcagaggttgcagtgagctgagatcacgccactgcactccagcctgggcaacagagtgatactycatctcaaaaaaaaaaaaaaaaattatggaggaccccaaggaacttcagtttgttagaaactaacactaaacttttaaaaaatacttattttatgtaaaaataactatgataaacttattatatattaacagaaataacatatttggaaagaagaataacagtgttttacatgtttgcaaatctctttaaaatgcaacatgtagtctttcaaaagctcttctgtacactcatgaaagagagtgaaaaacatattaatatttttattaaaatagtttccatttcatggatcccttgaaagggtcttggggtatccttagggatcccagaaccatacattgagaaccactggcttag

SEQ ID NO: 937923 - DNA, 661 bp, Homo sapiens
agtgaccaatggtttcattaatcatgcctatgtaatgaagccttcataaaccccaaaaggacaggattccgagatcttccaggtagctgaacacagggaggttcctggagggtagcacgcccagagaaggcatggaagctccacattccttcccacgtgccttgctctgtgcctctctttatctatatcctttctactatccttttatraaaaaccagtaaatgtgtttcctacctctttgagccactagagaaaaggaataaaacctcaggatggggtcttgggaaccccaatttgtagccagccagtcagaagcgcaggtaaaacaatgcggggcttgcgattgatattggaagtgggggacagtcttgtgggactgagccctcaacctgggggatctgatgctatctccaggtagatagtgtcagagttgaattgaaggacacccagcccaagtctgctaaaggattgcttgcttactggaagactgattgcttgctggaagtgcagggaaaaccccacacatttggtcacagaagtcttctgtgttgactgttgtagggggtgggggggtgcagagcagaggaaaaacagtttgctttttttcattcagctttggagcatggagattaggagcatagtctccaggccagactgtctg

SEQ ID NO: 937924 - DNA, 661 bp, Homo sapiens
agtgaccaatggtttcattaatcatgcctatgtaatgaagccttcataaaccccaaaaggacaggattccgagatcttccaggtagctgaacacagggaggttcctggagggtagcacgcccagagaaggcatggaagctccacattccttcccacgtgccttgctctgtgcctctctttatctatatcctttctactatccttttatgaaaaaccagtaaatgtgtttcctacctctttgagccactasagaaaaggaataaaacctcaggatggggtcttgggaaccccaatttgtagccagccagtcagaagcgcaggtaaaacaatgcggggcttgcgattgatattggaagtgggggacagtcttgtgggactgagccctcaacctgggggatctgatgctatctccaggtagatagtgtcagagttgaattgaaggacacccagcccaagtctgctaaaggattgcttgcttactggaagactgattgcttgctggaagtgcagggaaaaccccacacatttggtcacagaagtcttctgtgttgactgttgtagggggtgggggggtgcagagcagaggaaaaacagtttgctttttttcattcagctttggagcatggagattaggagcatagtctccaggccagactgtctg

SEQ ID NO: 937925 - DNA, 774 bp, Homo sapiens
tggctactttggagaccccctgggtagaaacggccctgtgagactttgccgcctgtgccagtgcagtgacaacatcgatcccaatgcagttggaaattgcaatcgcttgacgggagaatgcctgaagtgcatctataacactgctggcttctattgtgaccggtgcaaagacggattttttggaaatcccctggctcccaatccagcagacaaatgcaaaggtaatcagcctttgatcagattctgtcacagctaaatgcccctttattgtgagaattcttgtgtgtctcttaaaatatgtatagttgtttagtccaatagaaatacattgtgaaccgcttttgtcttttaaaattttctagtcaccacattaaaaaagtataaagaaggacagtcatggyggctgacacctgtggtcctgtaaaaagaaacaggtgaaatgaatactaatgtattttatttaatatatccaacatatgatttcaataagtaatcaataaaaattgttaatgaaatatatgttttttctcacgctaagccttcaaaatccagtgtgtatctcacgtttatagcacatctcaattcagactcaccagccacatttaaagtgctcagtagccacatgtgacagcagctaccaacctggcaacacaggtctaaagaatctctttaggttgtttatattttagtatttctctcaggtgatttgtgtcttttgccatctctgtcttcctgccttagcctgcaattgcaatctgtatgggaccatgaagc

SEQ ID NO: 937926 - DNA, 774 bp, Homo sapiens
tggctactttggagaccccctgggtagaaacggccctgtgagactttgccgcctgtgccagtgcagtgacaacatcgatcccaatgcagttggaaattgcaatcgcttgacgggagaatgcctgaagtgcatctataacactgctggcttctattgtgaccggtgcaaagacggattttttggaaatcccctggctcccaatccagcagacaaatgcaaaggtaatcagcctttgatcagattctgtcacagctaaatgcccctttattgtgagaattcttgtgtgtctcttaaaatatgtatagttgtttagtccaatagaaatacattgtgaaccgcttttgtcttttaaaattttctagtcaccacattaaaaaagtataaagaaggacagtcatggtggctgacacctgtggtccygtaaaaagaaacaggtgaaatgaatactaatgtattttatttaatatatccaacatatgatttcaataagtaatcaataaaaattgttaatgaaatatatgttttttctcacgctaagccttcaaaatccagtgtgtatctcacgtttatagcacatctcaattcagactcaccagccacatttaaagtgctcagtagccacatgtgacagcagctaccaacctggcaacacaggtctaaagaatctctttaggttgtttatattttagtatttctctcaggtgatttgtgtcttttgccatctctgtcttcctgccttagcctgcaattgcaatctgtatgggaccatgaagc

SEQ ID NO: 937927 - DNA, 774 bp, Homo sapiens
tggctactttggagaccccctgggtagaaacggccctgtgagactttgccgcctgtgccagtgcagtgacaacatcgatcccaatgcagttggaaattgcaatcgcttgacgggagaatgcctgaagtgcatctataacactgctggcttctattgtgaccggtgcaaagacggattttttggaaatcccctggctcccaatccagcagacaaatgcaaaggtaatcagcctttgatcagattctgtcacagctaaatgcccctttattgtgagaattcttgtgtgtctcttaaaatatgtatagttgtttagtccaatagaaatacattgtgaaccgcttttgtcttttaaaattttctagtcaccacattaaaaaagtataaagaaggacagtcatggtggctgacacctgtggtcctgtaaaaagaaacaggtgaaatgaatactaatgtattttatttaatatatccaacatatgatttcaataagtaatcaataaaaattgttaatgaaatatatgttytttctcacgctaagccttcaaaatccagtgtgtatctcacgtttatagcacatctcaattcagactcaccagccacatttaaagtgctcagtagccacatgtgacagcagctaccaacctggcaacacaggtctaaagaatctctttaggttgtttatattttagtatttctctcaggtgatttgtgtcttttgccatctctgtcttcctgccttagcctgcaattgcaatctgtatgggaccatgaagc

SEQ ID NO: 937928 - DNA, 774 bp, Homo sapiens
tggctactttggagaccccctgggtagaaacggccctgtgagactttgccgcctgtgccagtgcagtgacaacatcgatcccaatgcagttggaaattgcaatcgcttgacgggagaatgcctgaagtgcatctataacactgctggcttctattgtgaccggtgcaaagacggattttttggaaatcccctggctcccaatccagcagacaaatgcaaaggtaatcagcctttgatcagattctgtcacagctaaatgcccctttattgtgagaattcttgtgtgtctcttaaaatatgtatagttgtttagtccaatagaaatacattgtgaaccgcttttgtcttttaaaattttctagtcaccacattaaaaaagtataaagaaggacagtcatggtggctgacacctgtggtcctgtaaaaagaaacaggtgaaatgaatactaatgtattttatttaatatatccaacatatgatttcaataagtaatcaataaaaattgttaatgaaatatatgttttttctcaygctaagccttcaaaatccagtgtgtatctcacgtttatagcacatctcaattcagactcaccagccacatttaaagtgctcagtagccacatgtgacagcagctaccaacctggcaacacaggtctaaagaatctctttaggttgtttatattttagtatttctctcaggtgatttgtgtcttttgccatctctgtcttcctgccttagcctgcaattgcaatctgtatgggaccatgaagc

SEQ ID NO: 937929 - DNA, 487 bp, Homo sapiens
accactgaaagtcacacatctaaggacacccctgagtacctggcaaacttggacagttgctcaccctacaaaccactgtagccatggatgcctttttactgatcctcaggcatgtcagacacactcactcctacctttggccttggcatttsttctgcccgtttggaaagctcttccccctgcatctgcatggctaatttccttactaccttcaaaattttgttctgatgttattctcactaaagcttgccctgaaagtgctatttccaattacaactcttttctcatcccctctgaacagtgtcactaatatcccttactctgttctagttttctatgcatagcatttatatacgtctaacacactgtataattattaatgcatttatgtttattatttgtttgtttccccatgctagactgcaagccccatcaatgcaggaatcttgtttggtttgctgttttgtcctgagcacctaggacagta

SEQ ID NO: 937930 - DNA, 487 bp, Homo sapiens
accactgaaagtcacacatctaaggacacccctgagtacctggcaaacttggacagttgctcaccctacaaaccactgtagccatggatgcctttttactgatcctcaggcatgtcagacacactcactcctacctttggccttggcatttcttctgcccgtttggaaagctcttccccctgcatctgcatggctaatttccttactaccttcaaaattttgttctgatgttattctcactaaagcttgccctgaaagtgctatttccaattrcaactcttttctcatcccctctgaacagtgtcactaatatcccttactctgttctagttttctatgcatagcatttatatacgtctaacacactgtataattattaatgcatttatgtttattatttgtttgtttccccatgctagactgcaagccccatcaatgcaggaatcttgtttggtttgctgttttgtcctgagcacctaggacagta

SEQ ID NO: 937931 - DNA, 630 bp, Homo sapiens
caccgcgcccggccatgaccttacttcttcttcttcttctattttttttttttttgagacagagtttcgctctgttgcccaggctggagtgcagtggtgcgatctcggctcactgcaagctccacctcctgggttcaggccattctcctgcctcagcctccagagtagctgggactacaggtgcctaccaccatgccyggctaattttttgtatttttagtagagatggggtttcaccatgttagccaggatggtctggatctcctgacctcgtgatccgcccaccttggcctcccaaagtgctgggattacaggggtgagccactgcgcccagcccttacttcttaactgacctccttagcttttgattttgtgtacagttgggctttaaggcatgtgtacccttctggcttgggcttgtgaactctaagctccatttttggatgaggatttcccattggcctgcttcccccctagagcccattctcaggtacccaggtataacgtgtgccccatcccaccccaaactgtcagtgagaaaaatgagattggacacacatagttgaagccaattaacatcttgtttttagttttttttttctttttttaatctttagcatcaagaggtta

SEQ ID NO: 937932 - DNA, 802 bp, Homo sapiens
gtaatgattaagtgctaaaccaaaataatggatggagtgaaagtttgcatactgaatagttagattgctgtccctcttctaactcaaggcctaatcctcttggcttcctgaaagctggcagccaagcttatgcttattcctgggaggagattggaagmttcttctaaagaaaatgaccagcccaagaaaaattacctactatttggatgttcctgaaacaaaaatcaagatccttgccaatcactacatgtgcattttctgtatttaaaagccctgatgctcatatacagctttcagtcagctttttaatgttaaatatggaagccacatgaccagacatttgaggaaagcccctacataaaggcagaagccaaagtagaaaaaggagaataaaaaggaactggaagaaaaaaaacagataatgtaccatattaaaaaaaaaataggacaaaactattcttaatagttaatccaagttgagtatcctttatttgaaatgcttgggtctagaagtgtttgggttttttatttttttcagattttggaatatttgtacataatgaaatatcttggtgatgggacccaagtctaaacacaaaattcatttatgtttcatagacactttatacacatagcctgaaggtaattttatataaataattttgtgcatgaaacaaagtttgtggtaagtgcttatgtgtggaattttccacttgtggcaccacgttggtgctcaaaagtttcagattttggatttttggattagggatgttcaatttgtatccagagataaagggaaaga

SEQ ID NO: 937933 - DNA, 542 bp, Homo sapiens
ggctttgcaaggtacagcctccttcctggctgctttcacaggctggcattgagtgtctgcagcttttccaggtgcacagtgcaagatgtcagtcagtggatctaccattctggggtctgcaggatggtggcactcttctcacagctccactagagagggccccagtagagactgtgtgggggctctgaccccacatttcctgtctgcactgccrtagcagaggtcctccatgagggccctgtcccttcagcaaacttctccctggacatacaggtgtttccatactccatcctctgaaatctaggcagaggttcccaaaccccaattcttgacttctgttcactcccaggctcaataccatgaggaagctgccaaggcttggggctggcaccctctgaagccgcaacctgagctctgcattgggccctttcagccacgactggagtggccgggatgcagggcaccaagtccctaggctgcatacaacctgtggaccctgggcccagcccacaagaccagtttttcctcctaggcctctgggt

SEQ ID NO: 937934 - DNA, 622 bp, Homo sapiens
ctgctcccattactgcctgagctccacttcctgacagatcagcagcagcattagattctcataggagcgcaaaccctactgtgaaccgtgtatgccaggcttctaggttgcacgctctacatgagagtctaatgcctgatgatctgtcactgtctcccatcacccccaaatgggactgtctagttgaaagaaaacaagctcagggctctcactgattctacattatggtgagttgtataattatttcattatatattacartgtaataatagaaataaagtacacaataaatgtaatgtacttgaatcatcctgaagccatcaccccccgtcccacccccaaccccaggtccacggaaaaattatctcccacaaaactggtcccttgtgccaaaaagattattactgtgggttagagggacactaacatttattaagtacctactatgtgccaggctgtttataaatgttctctcctttaaccttaaaaaaataaggattgttatccctaccttataaaagaaaaaaatatcaagctaaaagagattagacaatttgcccaaggactcatgtctcaaatgtagtagggacagggttcaaatctagaacactgtctttataac

SEQ ID NO: 937935 - DNA, 770 bp, Homo sapiens
catgactaaaaggggccaaggtacagctcaggctattgcttcagagggtgagaggcccaagccttggcagcttccacatgttgagtctgcaggtatatggaagttcagaattgaggtttgggaacctccacctagatttcagaggatgtatgaaaactcctagaagttcaggcagaagttttctgcagggctggggcactcatggagaacctctgctagggaagtgtgaaagagaaatgtggggttggtgggcacccccacatagagtccccaatgagccactgcctagtggagctgcragaagaggggcaacatcctccagaccccacaatggtagatccaccaacagcttgcaccgtgcacatggaaaagccacagacattcaatgccagctcatgaaagcagccaggagggaggctgtaccctgcaaagccatagggacaaagctgtccaagaccatgggaacccacctcttgcatcagtctgactcgaatgtgagacatggagtcaaaggagatctttttggaactttaagattgactgttctgctgaatttcgagcttgcatggggtttgtaggccctttgttttgtccatctcatttagaatggctgtatttacataatgcctgtacccccattgtatctaggaagtgactaacttgcttttgattttacagactcataggtagaagggagttgccttgtttcatctgaggctttgggctgtggactttgcgttagtgctgaaatgcgttaagactttgggggg

SEQ ID NO: 937936 - DNA, 770 bp, Homo sapiens
catgactaaaaggggccaaggtacagctcaggctattgcttcagagggtgagaggcccaagccttggcagcttccacatgttgagtctgcaggtatatggaagttcagaattgaggtttgggaacctccacctagatttcagaggatgtatgaaaactcctagaagttcaggcagaagttttctgcagggctggggcactcatggagaacctctgctagggaagtgtgaaagagaaatgtggggttggtgggcacccccacatagagtccccaatgagccactgcctagtggagctgcaagaagaggggcamcatcctccagaccccacaatggtagatccaccaacagcttgcaccgtgcacatggaaaagccacagacattcaatgccagctcatgaaagcagccaggagggaggctgtaccctgcaaagccatagggacaaagctgtccaagaccatgggaacccacctcttgcatcagtctgactcgaatgtgagacatggagtcaaaggagatctttttggaactttaagattgactgttctgctgaatttcgagcttgcatggggtttgtaggccctttgttttgtccatctcatttagaatggctgtatttacataatgcctgtacccccattgtatctaggaagtgactaacttgcttttgattttacagactcataggtagaagggagttgccttgtttcatctgaggctttgggctgtggactttgcgttagtgctgaaatgcgttaagactttgggggg

SEQ ID NO: 937937 - DNA, 764 bp, Homo sapiens
gggtatgtacttatgttttccccccaacttggaggcagcaaagaaaggtaccttagtagtggttatggctgagggtcttttgcttgcttcctgggggctccacaccagagagatgcaggtcagcaattgctcagtgcaggggtcctcaactcccaagccatgaactggtactagactatggtctgttagaaatcaggctgcacaacagtaggagagaagtgggtgagctctgcttcctctccaatcaacagtggcattagattatcataagagtgtgaaccctattgtgaatggtgcatgtgagggatctaggttgcatgctcctgtgagaatctaaccaatgcctgatgatctgaggtggaacagtttcaycccgaaaccatctccctccaaactggtccatggcaaaattgtcatggagggaagtggttcctggtgccataaatgctggggactgctggctcagtgcaattagcccacaatggagggcctattctgagagtccatgatgaggtttctctcattggtgacaagtatgagtggtgggtgggacccataggagaaagactggcctcccctccttgtgtcaactgcagcttttttggaggtgtggataagacgctggggtctttggtccttcattagtccgagggaggaaagggcagttccacagcagaggcagtggcagagaggctttcagttgcccctcagttctccacctccaaggactgcagagccattgttactgggagtgttcagctagt

SEQ ID NO: 937938 - DNA, 764 bp, Homo sapiens
gggtatgtacttatgttttccccccaacttggaggcagcaaagaaaggtaccttagtagtggttatggctgagggtcttttgcttgcttcctgggggctccacaccagagagatgcaggtcagcaattgctcagtgcaggggtcctcaactcccaagccatgaactggtactagactatggtctgttagaaatcaggctgcacaacagtaggagagaagtgggtgagctctgcttcctctccaatcaacagtggcattagattatcataagagtgtgaaccctattgtgaatggtgcatgtgagggatctaggttgcatgctcctgtgagaatctaaccaatgcctgatgatctgaggtggaacagtttcatccygaaaccatctccctccaaactggtccatggcaaaattgtcatggagggaagtggttcctggtgccataaatgctggggactgctggctcagtgcaattagcccacaatggagggcctattctgagagtccatgatgaggtttctctcattggtgacaagtatgagtggtgggtgggacccataggagaaagactggcctcccctccttgtgtcaactgcagcttttttggaggtgtggataagacgctggggtctttggtccttcattagtccgagggaggaaagggcagttccacagcagaggcagtggcagagaggctttcagttgcccctcagttctccacctccaaggactgcagagccattgttactgggagtgttcagctagt

SEQ ID NO: 937939 - DNA, 686 bp, Homo sapiens
ccaggtcataggtatatttaaacatattctgattagtaattgattgaaagagttattatcagtagaaagaagtgtctgggttaaaataagggattgtggagaccttggttttatcatgcacaagcggcctccaagaagcaggctttagagagaatagactgttaattaaatgtttcttattaggtttaaggtctgtgttgatgttaatgctggatggggtataataaggcctgtctgacccctactttctgtcatggcctgaaccagtctttcaagttaaattttagagtgccctgrccaaggaaagagaccatatagaatggtttggtggtctttaaatattatttttggtttacaaaagataaaaaatgatacacctgtatagggcacttctgaatgtagcttgcaagactggaagttgctctgggtgagtgattgagtagtgagtgaatgtgaaggcctagaacattactgtacactaccatagaccttataaacacacttaggctaaactaaacttacttaaacatttttctttcttctataataaattgacctccgcttaccataactatttgatttcataaacttttttattctttcaaacttttcaactctcagaataacatttagcttacaacacaaacacatcgtatagctataaaaacctatttttgatattctta

SEQ ID NO: 937940 - DNA, 591 bp, Homo sapiens
  misc_feature 194: n = A,T,C or G
gacctcctcagccatgtggaactgtgagtcaattaatccccatttctttataaactccccagtctccagtgtgtcttactagcagtgtccaaacagactaacagtaaatttgttccagtagaatggggtgctgctgtaaagatacccaaaaatgtggaagcgatgtgcaactgggtaacaggcagaggtgggancagtttggagggctcagaagaagacaggattatgtgagaaagactggaacttcttagagacttgctaaatggctttgaccaaatgctgctcatctcagatggggatgagaaacaygctgggcactggaataaaggtgacccttgctatgttttagcaaagagactagctgcattttgcccctgccatagagatctgtgaaactttgacattgaaagaaatgatttagggtatcttacagaggtgattcgggtgctgttaaaagcattcagccttatgtattcacaaagatatggtttggaattggaacttatgttaaaaagagaagcagagcataaaagattcaaaaaattgcagcctgatggtgcagtagaaaagaaaaacccattttctgagaag

SEQ ID NO: 937941 - DNA, 622 bp, Homo sapiens
gtgatagatttagctggtgtgcccagagggggcatggaagctccacactcctgactccataacttagcctattcctctcttccatttggctgcttttaggtgatattctttaataaaaacaaacaaacaaacagtcacagtaagtaaaacactttcctgagttctgttagtcattctagaaaattattaaacctgaggagggagttgtgggaacccccaaatttgtaaccaagacagatagaaatgcaggtagcctggtgtattagtcagctctcatgctgctaataaagacatacccaattctgggtaatttaaaaaggaaagaggtttaattgactcacagttccgcaaggcttgggaggccycaggaaacttacaatcatggcataaggagaaacaaacatgtccttcttcacatggcagcagcaagaagtgcagagataagtggtggagggagccccttaaaaatccatcagatcttatgagaactcactcactatcacgagaacaacacggaggtaactgcccccattattcaattacctcctaccaggtccctcccacgagaattatgggaactacagttcaagatgagatttgggtggggacacacccaaaccat

SEQ ID NO: 937942 - DNA, 549 bp, Homo sapiens
tagagataaactacatttcttggcttgtggccatatttctccatttttaattttttttttaaattttactttaagttctgggatacatatgctgaacgtgcagggttgtcatataggtatacatgtgccatggtggtttgctgcacctattaacctgtcatctaggttttaagccccacatgcattaggtatttgtcctaatgctctccctcccctttccccaaaccctccaacacaccctggtgggtgatgtttccctccctgtgtccatgtgttctcattgttcaactccacttactagtgagaaaatgcagtgtttggttttccattcctgtgttatgttgctgagaatgatggtttccagcttcatccatgtscctgcaaaggacatgaactcattattttttatggctgcatagtattccatggtgtatatgtgccatattttcttaatccattctatcattgatgggcatttggattggttccaagtctctgctattgtaaatagttctgcaataaacatacatgtgcatgtgtctttacagt

SEQ ID NO: 937943 - DNA, 591 bp, Homo sapiens
agtcccagctactccggaggctgaggcaggagaatcacttgaacgcgggaggcggagcttgcagtgagccgagatcgcaccagggcactccagcctaacgacagagtgagacaccgtctcaaaaaaaaaaaaaaaaaaagatgttctattagatyagagtgtgccctaaatccagtgacttgtgttcttatcagaaggccatggaaagacacagaagacacaaggggaaggacatggtgcgaagacagaggcagagagcttggagtattgcagctacaggccaaggaacgccagagattgctggcaaccacagaagccaggagaggcgaggaaggattcttccctggacccttcacagggagcacggccctgctaacatgttgatttctgacttctggcctccagagctgtgagcgaatacatttctattgttttaaatgacaccatctctgatcattggttacggcggcccctaggaagctaatacatggccctatgaagctggggctcagacctccgagaagggcacacggctgctgctgatctgtttagggggagcaatgacgttagcgctgaggggaaacggaggct

SEQ ID NO: 937944 - DNA, 601 bp, Homo sapiens
atctggtcctgggctttttttttgttgttgttggtagcttattattgcctaatttcagaactcgttattggtctattcaggggttcaacttcctggttcagtcttgggagggtgtatgtgtccaggaatgtatccatttcttctatatttctagcttatttgcatagaagtgtttatagtagtctctgatggttggttgtatttctgtggggtcggggtgatatcccctttaccattttttattgtgtctatttgattcttctctcttttcttcattagtctagttagcaatctattttattagttttttcaaaaaccagctcctggattcattgatttttttgaagggttatttgtgtctctatccactctgatcttggttatttcttgtcttctgctagctttgggtttgtttgctcttggttctcatttttttagttrtgatgctgggtgtctatttgagatctttctagccttctgatgtgggtatttagtgctataaattttccttttaacattgctttagctgcatcacagagattctggtatgttgactctttgttctccttggtttcaaaaaacaatttgatttctgccttaa

SEQ ID NO: 937945 - DNA, 621 bp, Homo sapiens
ggtcctgggctttttttttgttgttgttggtagcttattattgcctaatttcagaactcgttattggtctattcaggggttcaacttcctggttcagtcttgggagggtgtatgtgtccaggaatgtatccatttcttctatatttctagcttatttgcatagaagtgtttatagtagtctctgatggttggttgtatttctgtggggtcggggtgatatcccctttaccattttttattgtgtctatttgattcttctctcttttcttcattagtctagttagcaatctattttattagttttttcaaaaaccagctcctggattcattgatttttttgaagggttatttgtgtctctatccactctgatcttggttatttcttgtcttctgctagctttgggtttgtttgctcttggttctcatttttttagttgtgatgctgggtgtctatttgagatctttctagcyttctgatgtgggtatttagtgctataaattttccttttaacattgctttagctgcatcacagagattctggtatgttgactctttgttctccttggtttcaaaaaacaatttgatttctgccttaattgtttactcaggagtcattcagg

SEQ ID NO: 937946 - DNA, 575 bp, Homo sapiens
caggcacataccacgcttggctaatttttgtatttttagtagagacggggtttttaccacattggccaggttggtattgaacacctgaccccaggtgatctggcaacctcggcctcccaaagtgctgggattacagacatgggccaccatacccggccggaagcccacttattaaagcaacaaatactgagtgcctgtgtcacgcttggtattgtttccagtgctgataccacagtgaacaaataaaactcttgactttgttgcacttagagggagtgggtacaggcaacaaacaagtatgaggggccagtcaaggagrctggggaaagagtactcctttattcttggggtttcgggggctaccctctttgaggtgacccctaggggccagaaggttatgagggagtgcatcgtgcagacatctgggggatgagtatttctgacaaagggaactgcaaggagaagagtgtagaggtggaattgttcttgggtttttgaggaaaactgtgtgcagtgctaatgcaggtttaacaggaacatgggaaaatgaaggtagttgtgttaggctgtgggaa

SEQ ID NO: 937947 - DNA, 630 bp, Homo sapiens
aatcacagctcactgcagcatcgaccttctgggctcatgtgatcctctcaccgcagcctcccgagtaactggtactacaggcacatgctagcaagccagctaatttgggtatcttttgtggagatggggtttcatcgtgttctcaggctggtcttgaattcctgagctcaagcgatcctcctacctcagcctcccaaagtgcaggaattacaggtatgaggcaccagcctttagcttagtcttaaagaagccatttcaaaattagtatgtcaacttctaggtgatatggtatatggtaagacctgtagatctcatgatctactcatgtgtatgatctcatgatcatacacacactgtcatacatccttcactgtaaaatgggtacaytggtctgaagcaatgttttgcaggctcccacattcataaattagccactcagtaagctcctcaaatagtgatacagtcagtcactgaagaaggtgaaggtaaacccacctccagtgtagttgccagttccagcaagaacaaatcagtgcttcttcctaaataaaaagcgtccattttaatcaacttgccaccatatggctggctgatctcctaaaggatgttaccacacagaggcttacagtc

SEQ ID NO: 937948 - DNA, 642 bp, Homo sapiens
cctgtctgttagaaggaaaactaacaaacagaaaggacatccacaacaaaaacccatctgtacatcaccatcatcaaagaccaaaagtagataaaaccacaaagatggggaaaaaacagagcagaaaaactggaaactctaaaaagcagagcrctctcctcctccaaaggaacacagttcctcaccaacaacagaacaaagctggacggagaatgactttgacgagctgagagaagaaggcttcagatgatcaaattactccgagctacaggaggacattcaaaccaaaggcaaagaaattgaaaactttggaaaaaatttagaagaatgtataactagaataaccaatacagagaagtgcttaaaggagctgatggagctgaaaaccaaggctcgagaactacatggagaatgcagaagcctcaggagctgatgcgatcaactggaagaaagggtatcagcaatggaagatgaaatgaatgaaatgaagcgagaagggaagtttagagaaaaaagaataaaaagaaacgagcaaagcctccaagaaatatgggactatgtgaaaagatcaaatctacgtctgattggtgtacctgaaagtgatggggagaacggaaccaagttggaaaacactctgcagga

SEQ ID NO: 937949 - DNA, 642 bp, Homo sapiens
cctgtctgttagaaggaaaactaacaaacagaaaggacatccacaacaaaaacccatctgtacatcaccatcatcaaagaccaaaagtagataaaaccacaaagatggggaaaaaacagagcagaaaaactggaaactctaaaaagcagagcactctcctcctccaaaggaacacagttcctcaccaacaacagaacaaagctggacggagaatgactttgacgagctgagagaagaaggcttcagatgatcaaattactccgagctacaggaggacattcaaaccaaaggcaaagaarttgaaaactttggaaaaaatttagaagaatgtataactagaataaccaatacagagaagtgcttaaaggagctgatggagctgaaaaccaaggctcgagaactacatggagaatgcagaagcctcaggagctgatgcgatcaactggaagaaagggtatcagcaatggaagatgaaatgaatgaaatgaagcgagaagggaagtttagagaaaaaagaataaaaagaaacgagcaaagcctccaagaaatatgggactatgtgaaaagatcaaatctacgtctgattggtgtacctgaaagtgatggggagaacggaaccaagttggaaaacactctgcagga

SEQ ID NO: 937950 - DNA, 729 bp, Homo sapiens
ccacacagaaagatctcttccctgtattattttaactgcttcagatactaagactgctactgctaccattacccataaacaatgaggccaaccctttgccactacatcaatttccttactcaggtataccacgggttgcaagctcatccctcagacctgcgtaaggactcctagagctattcctgtttcttctgtgacatataaagaaaagtcttgccccgttggcaagcttacaactggggtttgggttagggccttctttagggcctggaaagccacttctgyttcaggtgtccatcttactatatgggtattggctttctgagtttccttaattaatgtacataatggcctggctatttcactgtatctgggaatccatattcggcagaaggctgttatgccaaggaaccctcttagttgctttagggttttgggatgaggataagccagtatacgctggatacgttcctctctgagggccctggtgactttggataattttagccctaagtatttaacctgctgtgagcagagctgagccttttgtttggagccacaggtagcgaggaaatttaagagcgcttgggtggcttgatgccacaaggtttctgaatgggtggctataattaaatcatccccatactgaagaacaagaatgtccagctatgacaattggctcaagtcttgggctaatgcctggccaaatagacgggggctatccttgaa

SEQ ID NO: 937951 - DNA, 576 bp, Homo sapiens
accatcaacataaccctcctgcagaagagtaggaatgtcagcttcatcagtgctgctaacatgctttgcatcctgggaagatcccaaggagagtctccctctctgggctacctccaaatactgtccatcaggtctctcctgaaatttctaagagtattttttttccaaatctttgctaggagctgcaatgtatatgatttttgctaaatctttgctaaggaccacrtgatgatatgtatatcttgcttataaacccaaccaaagcgcattagagaccatttgtcctgaagctacctaccaactagatttgcgagtccacccaaatgtgtatgacatatggtcagggaggatgatacatcacctgttgcatttcccatcatgaggactgcctaataggtctagtcttgttctaatctaatagtcctgtgagatccaacagcaatgagctgaaagctagggtttgtttgtttgtttgttgtttgttttaatgtaggtattgttactaaatgtaaattccatgaaggcagggacttttgtcttttttttcactgctttatcaacagctcagcaattgtt

SEQ ID NO: 937952 - DNA, 845 bp, Homo sapiens
ccatggcaacatcaggaagttaccctatatggtttgaaagggggaggcatgaataatccacgccttgttagcatatcatcaagaaataaccacaaaaatgggcaaccaacagccctcacggctgctctgtcaatggagtagcgattctttattcctttactttcttaataaacttgcttttgctttgcactgtggactcactctgaattctttcttgcgcgaggtccaagaaccctctcttggggtctggattaggaccccttccctgtaacatttttctggctaccayaaagggacccaaaggctaactaggtaagtggtggtgtctggtgacatctttctggtgaacatggaagggacgatgctgaggagatcccccaacccaaaggaaagagactatggcactgattggcggccttcaggtaagtggggtgcatatagccaggtaaagaatgggattgaattagaggcccaacttaggggagttagagtctctcttaagaatgagtgggttagaggcccctcttcataaaaggcacggatgcttgaccaaccttgggttagaagcccaatttaggagggttagagtgccttctaagattcaggggtttagaggcccctcttggtaaagtccctctcattaaagtccctctcagctaagaacgggtttggtactacaggatgttaactgctattctctttggaataatctgccttgctctttgctaatagctgtgagtgacagaattaggcatgtacgggattgtgggacatggggagctttttcttccctaaaaggggaaacttgagagctgatgagactgctggaaaagatccctttgcta

SEQ ID NO: 937953 - DNA, 845 bp, Homo sapiens
ccatggcaacatcaggaagttaccctatatggtttgaaagggggaggcatgaataatccacgccttgttagcatatcatcaagaaataaccacaaaaatgggcaaccaacagccctcacggctgctctgtcaatggagtagcgattctttattcctttactttcttaataaacttgcttttgctttgcactgtggactcactctgaattctttcttgcgcgaggtccaagaaccctctcttggggtctggattaggaccccttccctgtaacatttttctggctaccataaagggacccaaaggctaactaggtaagtggtggtgtctggtgacatctttctggtgaacatggaagggacgatgctgaggagatcccccaacccaaaggaaagagactatggcactgattggcggccttcaggtaagtggggtgcatatagccaggtaaagaatgggattgaattagaggcccaacttaggggagttagagtctctcttaagaatgagtgggttagaggcccctcttcataaaaggcacggatgcttgaccaaccttgggttagaagcccaatttaggagggttagagtgccttctaagattyaggggtttagaggcccctcttggtaaagtccctctcattaaagtccctctcagctaagaacgggtttggtactacaggatgttaactgctattctctttggaataatctgccttgctctttgctaatagctgtgagtgacagaattaggcatgtacgggattgtgggacatggggagctttttcttccctaaaaggggaaacttgagagctgatgagactgctggaaaagatccctttgcta

SEQ ID NO: 937954 - DNA, 643 bp, Homo sapiens
tgctcctccttgctttccaccatgattgtgaggcttccccagccacgtggaactgtaagtccaattaaatctcttcttttttaaattgctcagtctcgggtatgactttatcagcagcatgaaagtggactaatacagttaattggtaccagtagagttgctgaaaagatacctgaaaatgtggaaaagactttggaactgggtaacaggcagagtttggaacagtttggagggctcagaagaagacaggaagatgtgggaaagtttggaacttcctagagaattgttaaatggctttaacaaaaatgctgatggttatatgaacaataaggtccaggctaaggtggtctcagatggagatgaggaacttgttgggaactgaagcaaaggtgactcttgttatgttttagcaaagagacttgcagcattttgcccctgccctagagatttgtggaactttgaacttgagagagatrctttagggtatctggcagaaaaaacttctaagcagcaaagcattcaagaggtgacttgggtgctgttaaaggcattcagttttaaaagggaaacagtataaaagtttggaaaatttgcagcctgactatgtgatagaaaagcaaatcctattttctgaggtgaaatt

SEQ ID NO: 937955 - DNA, 563 bp, Homo sapiens
ccacgaggccatatttcagtctatcacatggggagaaaccttggacaatacctggctttcctaggcagaggtccctgcggccttccgcagtgtttgtgtccctgggtacttgagattagggagtggtgatgactcttaacgagcatgctgccttcaagcatctgtttaacaaagcacatcttgcacaacccttaatccatttaaccctgagtttgacacagcacgtrtttcagagagcagggggttgggggtaaggtcatagattaacagaatctcaaggcagaagaatttttcttagtacagaacaaaatggagtctcctatgtctacttctttctacacagacagtaacaatctgatctcttgcttttccccacaagttattgatcattttcttgttaattataggaggcttttaacatattgtgtaaattagctctttgaacaatatatgagtttaaaatattttttctttttatatttttgtgacagggtttcactctgtcacccaggctggagtgcagggcattatcacggctcactgcagccacaacctcctgggct

SEQ ID NO: 937956 - DNA, 599 bp, Homo sapiens
ctgccacgagccaaggaatgctggaagccaccagaagtgggagggggtgaggaagaccattccctagagacttcagcgggaccatggcactgctgatagcttagtgttgggctgctggcctccagaactatgaaagtaaatttatgttattttaagccacccagcttgaggtaattcttatggcagccctacagagcaaatacacttctctgacacaattatggtgataagaattggcccaaccctaacaatgtggggtcyggcataagcgtacacatcccccatgtctaaatatttaaaaccacacactgctcttcatatccgttaggatggctattatttaaaagaacccccacaaacacaaaataacaggtgttggtgagaatgtggagaaattggaaatctcctgaattgctggtgggattgtaaaatggtgcagccactgtagaaaacagttctccaaatagttaaacatagattcccatttgattccctagttacactttgggtatgtacccaaaagaattgaaggcaggaacttgaacagatacttgtacaccagggatcatagcagccctgattcacactagctgaaaggt

SEQ ID NO: 937957 - DNA, 633 bp, Homo sapiens; identical to SEQ ID NO: 937415

SEQ ID NO: 937958 - DNA, 434 bp, Homo sapiens
ctcagggtcgcaggtttcatctgtaaccaggagtccaatctttcagccttcagactatgttgggcttgaaggtggggtttcaccaaggacccgcccctaactgcctaggcatttgtctgcctcctgctgctatcactacagtgtagatgaactttgaaaacagaagaagccaaacagaaaagccttctkattatgattctatttacatgaaatgtctatttataggaaatgcctgtgaataggcaaatccatacagacaggaagtagatttgtggttgctaggggttggaaaaggggggcatgggaggtgattgctaatggatatggggagtcagacataaatagttaagatgaaatcatactggagtagagtgggcccttaatcgaatctgactcgagttcttataaaaagaggagcccccaatgtgaagata

SEQ ID NO: 937959 - DNA, 618 bp, Homo sapiens
tgtggtaatttgttacagcaacaataggcaactaatactctggcctctcgactccttgaccttctcttctttagtgatgatgttcttggccctaactcagcctctcactccatggttacaatctaggccttgccattactgtaactggaaccccttcataatatccaytccaagcattcctttgctcaacaatcacaccctgtcttttcagctaactctctagtaccctatctccaatcccactgggacctcacaatccacttccaaatgttcaccaggccagagctccctcatgtgctcactgtcctctgccttgttaaatcccacagtcagttgtcacagttgctctgaataaccctcaggtccatggcctgctcttggactatactctacattcacttggcaaaaccacagccctggtgaaagctaggcaccgagtatggccaggaaaagcacacaaccatccccacagctctcttttcaaaccagtggcactaaccccacttgggcccttaacgtggcctgcaatcataactcacatctccactctgccatctctcccactctcctttatacctgctcctctctcctcaaatgccagcagcactgccccatttg

SEQ ID NO: 937960 - DNA, 727 bp, Homo sapiens
actgtggctgtgggtgtgagtgactgggtttgctggagccagggtgggtgcaggaagtgaagggggcatcccaggtcacctgagggggcagccccgcctccatgaccttggctgagatcggccaaaatagtgtgcagtgtatgtgaagacagattctgccctcagccctcaggtggcatcatagcgcttgtgtgcaagtaacacttactttacttaacaatggtcccagagctcaagaatactgtgcctaatttataaattcaactttatcgtaaatatgtatgtataggaaaaaaacatagtaatacaggattaggtamtatccatggttccaggcttcactgggtgtcttgaaatgtatcccctctggataaaaggggactactatatgttttacttctcttttgaggtttttttttttttttttttttttgagacagggtcttgctctgtcatccagtctggagtgcagtggtgcaatctcagctcactgcaacctccacctcccagattcaatcgactctcctgccacagcctcctgagtaggtgggaccacaggtgcgccctaccatgcccagctaatttttgtatgtttagtagagacagggtttcaccatgttacccaagctggtctcaaactcctgccctcaaatgatctgtctgccttggcctcccagagtgctgggattacaggcctgagcccctatacccagcctgttttgaattt

SEQ ID NO: 937961 - DNA, 632 bp, Homo sapiens
tgcgccctccaaggcctgccaaaaggtcagcttaccatagaggacccgaagtgagcccagagccttttaggaacacatctgctattcatgtataatgtaactggatcaactctgaaaccaagaggctttaaccgcagagcttgtctggagggagataatgaggaggaagaaaaggccaatgaaaacagaaagtccagataaaaagcccagaaacagattaggtcatcccaggtttattgtcatggaagaaccatttctccaagagtgaaaaacttgcagcccagttgctaaacmaactaacctgtggattgttttaccttcctggcctcagttagctccctagatcttggttcacctccctgggcctaggttaacctccctgagtctctcttggttatcttttggctctaacaccagagatttcccagattctaagtggtaagaaacatacaaaaagtaaactaaataacatgtttccttgaaatattaatcaatcatgctttcctttttatgactcgcttttgaatcagtcagaggcattcatgtggcctcaaggagaattaggaatgctttagtgggactgcaaagggaagaaaataaattttttgctttcaaaataagccttcagagct

SEQ ID NO: 937962 - DNA, 587 bp, Homo sapiens
tacctaaatactcatcaacagtagaacaaataaattatgctttattcatgcaatgaaattctttaaatggcctatatctacacacaaatatacgaatgcctcttacaaaagtcagagaggaaagagtacatactgtatgacttcatttgagtaaattacgaaacaggtgaaataatctatggtgctaaaagtcaggatggttattatcctggtgagggtagcgaccataggggtttctagggtgctggtaatgctgtttcttgattggaatgctgattgcataggagtgttcatgaaaattcatccaggtcgatatacatactatgtgtactttttgtgtaagcattatattatacttggaatttactttttttttttttcygagacggagtcctgctctgccacccaggctggagtgcaatggtacagtcttgactcactgcaatctccgcctcccaggttcaagcaattcccctgcctcagcctcccgagtagctggaactgcaggcacatgccaccatgcctggctaatttttgtatttttagtagagacagggtttctccatgttggccaggctggtctcaaa

SEQ ID NO: 937963 - DNA, 587 bp, Homo sapiens
tacctaaatactcatcaacagtagaacaaataaattatgctttattcatgcaatgaaattctttaaatggcctatatctacacacaaatatacgaatgcctcttacaaaagtcagagaggaaagagtacatactgtatgacttcatttgagtaaattacgaaacaggtgaaataatctatggtgctaaaagtcaggatggttattatcctggtgagggtagcgaccataggggtttctagggtgctggtaatgctgtttcttgattggaatgctgattgcataggagtgttcatgaaaattcatccaggtcgatatacatactatgtgtactttttgtgtaagcattatattatacttggaatttactttttttttttttctgagacggagtcctgctctgycacccaggctggagtgcaatggtacagtcttgactcactgcaatctccgcctcccaggttcaagcaattcccctgcctcagcctcccgagtagctggaactgcaggcacatgccaccatgcctggctaatttttgtatttttagtagagacagggtttctccatgttggccaggctggtctcaaa

SEQ ID NO: 937964 - DNA, 629 bp, Homo sapiens
aggccgaggtgggaggactgcctgagcccaggaggctgaggcttcagtgagctgagatcacaccactgtgttccagcgtggacgacagagcaagaccctgcctccataaaaaataattcaaaactctgaggcatggatgaatatgagtttgcaggcagattcccccatgtggtcaggacacatgaatatgccacttctgtacatcayctgttgcagtatttcttgtattaaattccagtgatccactctaaatgtatgtccttttcaatgtcatccataactttagataagtgattttctttttttttctttttctttttttttttttttagatggagtctcgctctgtcgcccaggctggagtgcagtggcgcgatctcggctcactgcaagctccgcctcccgggttcacgccattctcctgcctcagcctcccgagtagctgggactacaggtgcccgccaccacgcctggctaatttttttgtatttttagttgagacggggtttcaccgtgttagccaggatggtctcgatctcctgacctcgtgatccgcccgcctcggcctcccaaagtgctgggattacaggcatgagccaccacacccggctgtgattttcttattgttt

SEQ ID NO: 937965 - DNA, 546 bp, Homo sapiens
aatcccaacactttaagaggccaaggcaggaggatggcttgaggccaggagtttgagaccagcctggttaacataccgagaacctgtaacctgtagtcccagctactcagaaagcctaggtgggaggatcacttggggccagaagttcaagactgcagtgagctatgattgcaccactgcactctagcctgggcaacagagcaagacctgtcttaaataaataaataaatagatggtgaacttaatcaggaaatgtgtgtgttctgactgctccactgactagctttctctctctcctcatgcctctctattccctgagacacaacaatattgaaattaggccaattaayaaccctacaatggcctctaaatgttcaagtgaaagacagagtcacacatctctcacctgaaatacaaagctagaaatgattaagttgagtgataaggaaggcatgttgaaagctgagataggcagaaagctaggcctcttacgccatttagccaagctgtgaatgcaaaggaaaagttctggaaggaaactgaaag

SEQ ID NO: 937966 - DNA, 747 bp, Homo sapiens
agctggggggcagtcttgtgggattgagcccctactctgtgatatctgtagctatctccaggtagatagtatcaaaattgagttaaattataggacaatcaattgatgtgggagacccatttcccacacacacatctggtcacagaggtgttctgtgttgaatgtgtgagcgtaggaaaaaccatttggttttccaatctctaatatctccgaaagccaagaaatgccttgagccaccagaagctggaagaaacaaggagagattctccctcagggtctttggagggagtacagccctgaagacaccttgctttcagacttctggactccagaactgggagagaagaaatttctattgttttataccactacatttgtagtgctagatcatctctgtgttgtttttaccatctgtgaaatcttgagtgactatataactttctaatctccaaaactgagatagtaacaatacctacctgatattgtaattgtgaaagctgatgcaataatgttcacagcacatagaagtacgtgcttaatacwtatcttaataaatgttgattttccatgctactataaagacacatgcacacgtatgtttattgtagcaccattcacaatagcaaaaacttggaaccaacccaagtgtccatcaatgatagactggattaagaaaatatggcacatatacaccatggaatactgtgcagccataaagaaggatgagttcatgtcctttgcagggac

SEQ ID NO: 937967 - DNA, 720 bp, Homo sapiens
aagatctcttccctgtattattttaactgcttcagatactaagactgctactgctaccattacccataaacaatgaggccaaccctttgccactacatcaatttccttactcaggtataccacgggttgcaagctcatccctcagacctgcgtaaggactcctagagctattcctgtttcttctgtgacatataaagaaaagtcttgccccgttggcaagcttacaactggggtttgggttagggccttctttagggcctggaaagccacttctgyttcaggtgtccatcttactatatgggtattggctttctgagtttccttaattaatgtacataatggcctggctatttcactgtatctgggaatccatattcggcagaaggctgttatgccaaggaaccctcttagttgctttagggttttgggatgaggataagccagtatacgctggatacgttcctctctgagggccctggtgactttggataattttagccctaagtatttaacctgctgtgagcagagctgagccttttgtttggagccacaggtagcgaggaaatttaagagcgcttgggtggcttgatgccacaaggtttctgaatgggtggctataattaaatcatccccatactgaagaacaagaatgtccagctatgacaattggctcaagtcttgggctaatgcctggccaaatagacgggggctatccttgaa

SEQ ID NO: 937968 - DNA, 630 bp, Homo sapiens
tagatacagagtgttgattggtgcattcacaaaccttgagctaaacacagggtgctgattggtgtatttacaatccctgagctagacataaaggttctccaaggccccaccagagcagctagatgcagagtgtcgattggtgcactcacaaaccttgagctagacacagggtgctgattggtgtgtttacaatccctgagctagatataaagactctccacatccccaccagactcaggagcccagttggcttcacccagtggaycccacactgggggtgcaggtggagctgcctgccagtcccgcaccgtgcgctcgcattcctcagcccttgggtggtcgatgggactgggcgctgtggagcagggggtggtgcttgtcggggaggctcgggccgtacaggagcccatggagtgggtgggaggctcaggcatggcgggctgcaggtcccgagccctgccccgcgggaaggcagctaaggcccggcgagaaatcgagcgcagcgccggtgggctggcactgctgcgggacccagtacaccctccgcagccgctggcccgggtgctaagtcccccattgcccggggccagcagggccggctgctccgagtgcgcggcccgccaagcccac

SEQ ID NO: 937969 - DNA, 641 bp, Homo sapiens
gcagtgaacacatgtgccccgacccagcgcagtcggctctgccctgcgcttgcccgtgtgaagggccagggtccttggctctcagaagagggatattcttgggctcccaacaagcgtggtgggccctgccctgggcctggcgtgtgagccatcaggaaagcccccgctgcaccacatcgcaatgcagagggtaactggtgcccccgacctaggtgctgctgtccatacagatccctgagagggtccactcctgtccccctctagattccttcccagtctctggtcgaggccagtctgcacatytcctgaggcttctgcttctgggacctgggttttctggatcagtatgtagagtgcctgggctgagagaggaaggagaggaaaggtctcagactgacagcttgaaccagcaaacagagcttgtccgtcctcagtttgctggttcaaggaagaggcctctggctgagtaggacggagtcctggccccccgcacatagcctgggagcctcattcttcctgtgcagagcagggtgcagtgggtactggtgccttttggttaatggaaattctttcttccattgttccaggggaaaggccatacaaatgtcagacctgcgagcgaaccttcaccttgaagcaca

SEQ ID NO: 937970 - DNA, 582 bp, Homo sapiens
ttatctaaacatgcctgggcaatggcgggcgcccctccccctgcctcgctgccgccttgcagtttgatctcagactgctgtgttagcaatcagcgagactccgtgggtgtaggaccctccgagccaggtgcgggatatcatctcctggtgcgccgttttttaagaccctcagaaaagtgcagtattcgggtgggagtgacccgattttccaggtgccrtctgtcacccctttctttgactaggaaagggaactccctgaccccttgtgcttcccgagtgaggctatgcctcgccctgcttcggctctcgcatggtgtgctgcacccactgtcctgtgcccactgtctggcactccctagtgagatgaacctggtacctcagatggaaatgcagaaatcaccggtcttctgcgtcactcacgctgggagctgtagaccggagctgttcctattcagccatcttggctgccctctcctagtcatgatatttctacccaagtgttccactcaggacttataagcactagattgaattatctgagagctaattatgaggttggaactcaatgaaaccactcaatgg

SEQ ID NO: 937971 - DNA, 628 bp, Homo sapiens
  misc_feature 1: n = A,T,C or G
ntagaaacaaggattctccagtagcaatgtgcaaacccaggactcaaattttcatttctaataacaccctacaataaaaggaactaaggctccttggagaaattactgattgtagagttggaaaaggaatatataagattagcctggagctccttgtagtgtcaggaagtaaggaggtgccccaaaaccaaatgattggggaatgtcaaccctttgacaaaagccaactgaaagagctcccacctgrgcaacaggacgaaaccccatctctactaaaaatacaacaattatccaggaatggtggcatgcgcctgtagtcccagctactaaggaggctgaggcacaagaatcacttgaacccaggaggcggaggctgcagagccgagatcatgacactgcactccagcctgggtgacagagcgagacactttctcacaaaaaaaaaaaaaaaaaaaaaaaaaaaaaaaaagaaagctcccaatggccaaaactggaacaatttgagcaatgaaatttataacattgtattggactataacttaaaaaaaatctccatgagtttatacagatataaataaatcattgaaaaagtaaataggagagaagagacaaatctcctgtaatgaat

SEQ ID NO: 937972 - DNA, 628 bp, Homo sapiens
  misc_feature 1: n = A,T,C or G
ntagaaacaaggattctccagtagcaatgtgcaaacccaggactcaaattttcatttctaataacaccctacaataaaaggaactaaggctccttggagaaattactgattgtagagttggaaaaggaatatataagattagcctggagctccttgtagtgtcaggaagtaaggaggtgccccaaaaccaaatgattggggaatgtcaaccctttgacaaaagccaactgaaagagctcccacctgagcaacaggacgaaaccccatctctactaaaaatacaacaattatccaggaatggtggcatgcgcctgtagtcccagctactaaggaggctgaggcacaagaatcacttgaacccaggaggcggaggctgcagagcsgagatcatgacactgcactccagcctgggtgacagagcgagacactttctcacaaaaaaaaaaaaaaaaaaaaaaaaaaaaaaaaagaaagctcccaatggccaaaactggaacaatttgagcaatgaaatttataacattgtattggactataacttaaaaaaaatctccatgagtttatacagatataaataaatcattgaaaaagtaaataggagagaagagacaaatctcctgtaatgaat

SEQ ID NO: 937973 - DNA, 793 bp, Homo sapiens
gttactatgacaccaagtaaacttagaactttgtgtgggatagactggccaacattagaagtgggttggccatcagtaggaagcctagaaaggtccattgtttcaaaggtatggcacaaggtaactggtgagccaggacacccagaccagtttccatacatagacacttggtttcagatggttttagaccccccacagtagttaataggacaggcagcagtagtactagtggcaaagggacagacagccaaggaagaatcccgctccacctgccgagggggattggctcctaaagtcctgtcagacccaacatcacaggattcatggcaagaaatggcaccagtgccccccaccctttcaccagggaggaaggcctcccactcctgagcccactgcgcccragcttccacaaggcctacatacccctaggccacccagagtagaaaaggaaggatctgagaccttgggagaaacccttcccttggcagcctgtttgaggcctagaactgggatacaaatgcccttaagagagcaatggtatactgggatagatgaggacgggcacatggtagaaaggtgtgcctttgtgtaccaacccgtcacctctgccaatctcctcatttggaaaaacaataccccatcctataccaaaaagcctcaagctataattgatttgctccaaactattatccagacccataaccccaactggactgattgccaccagttgttcatgtacctctttaacacagatgaaaggaggagagtgctccaagcagcaacttggaagaaa

SEQ ID NO: 937974 - DNA, 724 bp, Homo sapiens
aagtttatagtgctaaatgcccacatccaaagttagaaatatctcaaattaacaacctaacatcacagatagagtaaaaaacaaagcaagccaaatccaaaactagcagtataaaagaaataaccaaaattgaagctgaactgaaggaatttgacatgaaacaccatgcaaagatcaacaaatctaggaatttgttatttaagagaataaataagatggatagacaactagatakactaaaaaataaaaaaaggaaagaagatccaaataaacacaatcaatcagaaaaaaacaaaggggacattaccaccaaccccatggatatatgaaaaccactcagagactactactaacacctttatgtacacaaactagaaaacctagaagaaatgaatgaatttctggaaaaatacaaccttcccagattgaaccaagaacaaatttaatctgtgaccagactagtaacaagttccaaaattgaaacagtaacaacaagcctaccaaccagaaaaagcccaagaccaggcagattcatagttgaattctactagatgtataaagcagagttgatatcattcctactgaaactgctcccaaaaattgaggaagagggacttcttcataactcattctgtggggccagaatcattcttatacgaaaatctggcaaaaacataacaaagaaagaaaactttaggccaatatcttgatgaacatagatgca

SEQ ID NO: 937975 - DNA, 817 bp, Homo sapiens
ttgaacaaagctgaggaaaaaaaaaatctctgcccttgagggtatataaacagaaacctcccaaactgaaaagcaaagagaacaaagactgaaaaaaatagaacagaatatccaaggactgtgagacaactacaaaaggtgtaacatatgtgtaatgggaataccagaaggagaagaataggtaatgcaacagaaaaaatacttcaaataatatgactgagaakttccccaaattaatgtcatatatatcaaatcacagattcaggaagctcagaacatcaaacaggacaaatgacaaaaaaagacatctaggcattttattttcaaactacaggaaataaaatatacagacaaaattctgaaaaaaagcctgaggaaaaaataccttacctaaagaggaacaaagataagaattacattctacttctgctcagaaaccacacaaaaaagaagagactgaagcaaattatttaaatgttgagagaaaatcccactaacccagaattttgtaccttgtgaaattatacttcaaaagtgaaggaaaataaagactctcagacacaggggtggagcaagattatggaacagaaggcccacccatcatcctcccccaccgtaggaacaccaaatttaaccactgtctacatacaaaaaatgactctcataagaaccaaaaatcaggtgagcactcacagtatctggttccaacttcatattgttgaaagaggaactgaagagggtaggaaagacagtctttaatcaccaatgccaccccttccctatcccccagcagctgcctggtgcagagaaatctgcg

SEQ ID NO: 937976 - DNA, 587 bp, Homo sapiens
gtttccttagaatattttttaacttagagttggatggcctccagctccatctgtgttgctgcaaaggacatgatagttttttttatgggtgcatagtattccatggtatatgtatgccacatttttttattcagttcaccattgatgggcacttaggttaattctgtgtctttgcaattgtgaatagtactgtgatgaacatatgtgtgcatgtgtctttatggtagaatgatttatattcctttggtatatactyagtaatagtattactgagtctcagggtaattctcaagttctttgagaaatcaccaaactgctttttataatggcggaactaatttacttacctatcagtagtgtataagcattccctttcccctgcaacttagccagcatctattttttggatttttaataatagtcattctgactggtatgaaatggtatctcattgtagctttcatttgcatttctctagtaattagtgatgttgagcattttttcatgtttgttagctgtgtgtatatcttcttttgagaagtgtctgttcatatcctttgccctttgtctttttaaatgaggttgtt

SEQ ID NO: 937977 - DNA, 676 bp, Homo sapiens
aacagctttgacttgttcctcagtctcagaaggaaagcggtaagtctgatattagctgtggatattttgtagacgtcctttatcaggttgaaaaagttccctctattactggtttgttgaaatttttatcgtgaatgagtgtttaattttatcaaatgctttttctatatatagagagatgatttatgttttttctttcatagttttttaatacagtgaattatattgattagttttaaaatggattttttattattttaaagttctaaactacatttattgatatatcttaaatttattttattataaaatttaacatttcatttaaatgtaaacttgcatttctggccctttattggtcctaatgcattacsctttttagtattgctggattcaatagtgccatattttcaaatattttgtaactgttttcataaaagatattaatctgcaattatcttttctcataatatctttgttagattttggtatcagaataatgctggcctcattgaataatctggaaagccatccctccttttctttcttcctttttttttttttttttttaaataaacggcatctcactctgtcacctaggctggagtgcagtggcacgatcatggcttactgctgcctagacctcctgggctcaagcagtcctccccctccagcc

SEQ ID NO: 937978 - DNA, 662 bp, Homo sapiens
tggttgcactgcctccacttctgctcctcggcaaactattatttccagacaggagccagagtggtactttaaagatataagtgaaatcaggccactgccctcttcaagccctacaatggcttcccatcacactcagaataaaaacaaatgttgctatattggtttacaaagtcatgatctacagatctggcccctggatacctctccttcccctacgattctctcccttacttatctgctctatccacagtggcctccctgatgtttctacaacatgccaagtcttctatcacttcaaggctgtattagtttgctaggcctgccataacaaagtactcaaaactaggtggcttaaagaatagaaatgtaytgtctcagttttggagacaagaaatctgaaatcaaggtgttggctgggcaatgctttctctgaaggcactagggagaaatctgtttcatgtttccgtctttgtttctggtggggttttttggtatcttcagtgttccttggcttgtagactcagcacctcaatctctaccttcatcttcacaagttatccttcctgtgtgtatgtctatctccaaattttccctttttatgaggatagcagtcattttagattagaggcccacccgactccagtatgacctcatgttaactg

SEQ ID NO: 937979 - DNA, 572 bp, Homo sapiens
ctgagcatagttcatcaggttatctctaggcatataatgaaaataataatcatagtaaaaaatagcccacattattgaatgactgctaagaacatggtagaatttcactttgtacatcacatgtattaactatgtagttccccaccaaaaccatgtaaggtagatactagcactatactaagtttatatatgacacaatagcaatgtgggtaactttccctaactcacgaagttaaaaggggcagagctgtgatcaaatctcaggcttcctggctccagagtcktccctgttagttcaactgattgcttcctatgagaggtagaatataataatctctgattgtcaacccaccaaatatccttacaaagaagacacttttattattgcaattttatagaaaagcaaagtgagcctcagagaggcaaagtgactttcccaaggagacagagatagcaagaggcagatgtaggttttgaaagtactgtgatgtaactccaagcctgttgcttttttttttttttttgagaccgagtcttactctgttgcccaggctggagtgcagtcacgtgat

SEQ ID NO: 937980 - DNA, 572 bp, Homo sapiens
ctgagcatagttcatcaggttatctctaggcatataatgaaaataataatcatagtaaaaaatagcccacattattgaatgactgctaagaacatggtagaatttcactttgtacatcacatgtattaactatgtagttccccaccaaaaccatgtaaggtagatactagcactatactaagtttatatatgacacaatagcaatgtgggtaactttccctaactcacgaagttaaaaggggcagagctgtgatcaaatctcaggcttcctggctccagagtcgtccctgttagttcaactgattgcttcctatgagaggtagaatataataatctctgattgtcaacccaccaaatatccttacaaagaagacayttttattattgcaattttatagaaaagcaaagtgagcctcagagaggcaaagtgactttcccaaggagacagagatagcaagaggcagatgtaggttttgaaagtactgtgatgtaactccaagcctgttgcttttttttttttttttgagaccgagtcttactctgttgcccaggctggagtgcagtcacgtgat

SEQ ID NO: 937981 - DNA, 632 bp, Homo sapiens
ccatgtagagaaatttggtttgaggtggagacttcaggaaagccccagctcctcagcctcctctcattcttttacccaggaccgtctgggggccccagctccccgacaacaggccccacctccacatctggtgagtccctgaggcttctgaactcaagggagtgcggcctcccccagggcagccctgggtctcccagagaatcccattcccctcaaagactcgagcttccctccagggagccgggcagagccagaggaggggccacagggtccccagggctctgaggctgggctggtgaggggtggggggtcaaggcagagagaaatgttggggcccagcctgggggaggagcagccgggctgatgtggggagcagggcagccccagccctcacctccccgtcctgacccagcaggccctgaggaccagcccctcacccccaccgggtcggatccccagagtggtgagtgasgggctctgagtgggaggtgggcagggtccaggggaggcaggggtgggttctgtcctaggttcagtctcctctggaggtggtgatatagacaggctcctcccctgcttgggcctcagtttctccaaatgtaaaggtgagaggcctgcgggtgggaaagttc

SEQ ID NO: 937982 - DNA, 632 bp, Homo sapiens
ccatgtagagaaatttggtttgaggtggagacttcaggaaagccccagctcctcagcctcctctcattcttttacccaggaccgtctgggggccccagctccccgacaacaggccccacctccacatctggtgagtccctgaggcttctgaactcaagggagtgcggcctcccccagggcagccctgggtctcccagagaatcccattcccctcaaagactcgagcttccctccagggagccgggcagagccagaggaggggccacagggtccccagggctctgaggctgggctggtgaggggtggggggtcaaggcagagagaaatgttggggcccagcctgggggaggagcagccgggctgatgtggggagcagggcagccccagccctcacctccccgtcctgacccagcaggccctgaggaccagcccctcacccccaccgggtcggatccccagagtggtgagtgacrggctctgagtgggaggtgggcagggtccaggggaggcaggggtgggttctgtcctaggttcagtctcctctggaggtggtgatatagacaggctcctcccctgcttgggcctcagtttctccaaatgtaaaggtgagaggcctgcgggtgggaaagttc

SEQ ID NO: 937983 - DNA, 652 bp, Homo sapiens
tctgtgaccatctggtgtcaggggaccctggaggctcgggagtaccgtctggataaagaggaaagcccagcaccctgggacagacagaacccactggagcccaagaacaaggccagattctccatcccatccatgacagaggactatgcagggagataccgctgttactatcgcagccctgtaggctggtcacagcccagtgaccccctggagctggtgatgacaggtgagaggacactcaggggtcccagccccaggctctgccctcaggaagggggtcagctctcaggggcatctccctctcacagcccagccctggggatgatgtgggaggtgggagccccatttaacacggtgcctccttctctcctaggagcctacagtaaacccaccctttcagccctgccgagtcctcttgtgacctcaggaaagagcgtgaccctgctgtgtcagtcacggagcccaatggacactttycttctgatcaaggagcgggcagcccatcccctactgcatctgagatcagagcacggagctcagcagcaccaggctgaattccccatgagtcctgtgacctcagtgcacggggggacctacaggtgcttcagctcacacggcttctcccactacctgctgtcacaccccagtgacc

SEQ ID NO: 937984 - DNA, 754 bp, Homo sapiens
gactgccagaacctggtatctgtgaacccccatgcccactagactgctgccagctctcactgtgcaaatcagggctgcaggcctgagagtcctgggcaccttcactcactgcagatgcttcctccaaccagaggcctccccagggcttcatatcatataaaggagagtgctcagaggcatgggctctgaagtgggatgtactcaagttcaaatccttgcttagatactccctagatgcttaaccctctaattaatcactcagaacagcaggccatctggtcaacctcctgtgaactcccagctagaaggactgcaaaacaccatggaagataggagatgatacagcagaatatcaatttccctaaactcttcacagataagatagcagaaatgaatttccctaaactcctcaaaggtaaagtatcctatgtggctggaacaaatactttggtgtgcctctgagtggaagtggattgggatcactacatcttcttcaaacagcctgctaaaataatygaacctactaagcctaaccacagggccttgggcttatagactgaggcaggaaagtttggggttcagaacaacaaagggtctgaagtcaccagctatcttctctctccttagtctccttcttaaataattgaaatttgtaggggcatcaacttagcctctaagtcacagttttcccatctttgaaatgaggattataattctaccttgccaggttgttttgagaagtacagaagacatg

SEQ ID NO: 937985 - DNA, 569 bp, Homo sapiens
ttgtgcaaccatcattgctatctagttccaaaacattttcattacttccaaaggagaccctgtattcatcaagcagtcactcccacttcctctcctgccttttaacttgagaattgtattgatttgcatttaatataattcttaatagtatatgcattatctcaggtcctatttgtttgctttacaacacttacaacaatgtgcaattactatacygtcattgatttcttatattggccatgcctgtctccctagtgggctgtaagctccctgaggacaagggccttccaagtcttgttcactgttacacccccaaaaacctcacttggtgctttcctcaggaaattgatttgagtgaactaatgtgaaaggactcagtaaactgtatatcgatgtgaacgaaatgagaggtatttattatggaatggatagagagcagatgccaaggaagctggtgattgtatgatgctgatttcaagaaagtgtgaatgacaaatatgctacctgggtccctattcccacagcgagtgtcatgggcaaagcgaggagtccagcaggatggacgctgt

SEQ ID NO: 937986 - DNA, 569 bp, Homo sapiens
ttgtgcaaccatcattgctatctagttccaaaacattttcattacttccaaaggagaccctgtattcatcaagcagtcactcccacttcctctcctgccttttaacttgagaattgtattgatttgcatttaatataattcttaatagtatatgcattatctcaggtcctatttgtttgctttacaacacttacaacaatgtgcaattactatactgtcattgatttcttatattggccatgcctgtctccctastgggctgtaagctccctgaggacaagggccttccaagtcttgttcactgttacacccccaaaaacctcacttggtgctttcctcaggaaattgatttgagtgaactaatgtgaaaggactcagtaaactgtatatcgatgtgaacgaaatgagaggtatttattatggaatggatagagagcagatgccaaggaagctggtgattgtatgatgctgatttcaagaaagtgtgaatgacaaatatgctacctgggtccctattcccacagcgagtgtcatgggcaaagcgaggagtccagcaggatggacgctgt

SEQ ID NO: 937987 - DNA, 473 bp, Homo sapiens
ttatttatgatgtcaagccatacctactgtcttctaaaagggtctacggctggagaagagactgcctagtgtcaaccaaataagatgatcatggcaagagaaaacctcattagaactcagcaatgtgactttttaaagaatgktctaaattgcctataacagtataagggtttcaaagttctggggtgaaaacactgtctccagcatgagctctcttcaactacttgagaagaaatgcacctcaccttgagttgactcaagtacctacagccactggtaacacgttaaatgagcccttgccttgaagagagcaaaagcctagagatagttcactaccaataagctacagtaggtgagcatatgaggattacttatgcagggtgaatacactaaaattaaaattgttctaaatggagtctgacatacatatgcaaaatgaaaggggaaagggagagcagaatcattaacattac

SEQ ID NO: 937988 - DNA, 624 bp, Homo sapiens
cgcaatattcgggtgggagtgacccgattttccaggtgcgtccgtcacccctttctttgactcggaaagggaactccctgaccccttgcgcttcccaggtgaggcaatgcctcgccctgcttcggctcgcgcatggtgcgcgcacccactggcctgcgcccactgtctggcactccctagtgagatgaacccggtacctcagatggaaatgtagaaatcatctgtcttctgcgtcgctcacgctgggagctgtagcagactgtttcaatgttcataaatcgcgtggtactccagagcgtctgaaagktcccccagggaccttactcaaacgccgactctggttctataggttctgaggttctggttctgaggttcttcatgtctaaccagctccctggcgatgctgttgctgttggtctttgtaccacatttcgagcagcaatgcctaaagcctcttacctgtaaaggatttccaggtacttagcagaaagcccagcttctctcccagtattagctgacgggcctgttccctcattttctggaggggagagaccatcttttcaaggtcaaactgaacgcagaggcagggctgtggctgccccagctccgtggctgccccagctc

SEQ ID NO: 937989 - DNA, 642 bp, Homo sapiens
ggcaattgcccctgtggaatgccttgccagagcagcgcgtgcaggcccccacagaggattaacacagtggctgaacaccgggaaggaactggcacttggagtccagacatctgaaacttgctaagactagtctttggaacttgcccattccatttgagtggcagtgtggcctgaacacccacggtgtgcctataccggcactttggtttttgtttttgacttgacttggattgcttgatactttcgttttggtttcgacctggcttggatttcttgatactctgattttggttttgattctggtttggtgtaaactataaaartgtgtgtgtgtgccctttttacccgttctttgtattgtggtgtgcgtgtggtgtgagcgtggtgttttctctcgaagaagcatgggtcaggcacaaagtaagcccaccccactaggaactctgttgaaaaatttcaagaaaggatttaagggagactatggagtattatggcaccaggaaaacttaaaactttgtgtaagatagactggccagcattagaggtgtgttggccatcagaaggaaggctggacaggtcccttgtttcaaaggtatggcacaaggtaacctgtaagccagggcactcagaccagttcccgta

SEQ ID NO: 937990 - DNA, 630 bp, Homo sapiens
atcatatgaaaagcattgtcaaataagaaaaagtgtttaactttctttgagttatatttttattaatatgttattaatatgtgttccaaaattgtatgagattcctaaaattctgaagtgtcttggaatatgttatcaattatgatgattataatttttttattattattagagttggggtcttgacctatcatccaagctggggtgcagtggcatgatcatggtttacagcagcctggaactactgggctcaaggatcctcctgccttagcctcctgagtagctgggactacaggtatgcaccaccatgcctggctaagattttttttttttaattttttgtagagaaagtgtctcactatgttacccaagctggtcttgaactcctggccttatgcgatcctcttgcctcaatatcctgagttgctgggattacaggtgtcagccaccacacctagctctaaattgttgtatgccmcagtaataacaaaatttgcttgctcaaaagtagatagctacagtctaaaatttgcttcttcttcaagaaaagtcatggaaaagattctgataagtactcttcaatacaggtttctcataactttagagatcataccattagactaggcttaa

SEQ ID NO: 937991 - DNA, 617 bp, Homo sapiens
ctcttcaaggagaactacgaaccaccactcaaaagaactagagaagacacaaacaaatagaaaaacattccatgctcactgataaaaagaatcaatattgtgaaaatgaccatacttcccaaagtaatttatagaaccaatgctattcccgctaaactaccattgacattcttcacagaattacatgaaacaatttaaaaattcatatgaaatcaaaaaagagctcatatagccatgacaatcctaagcaaaaagaataaagcygaagtcatcatgctacccaacttcaaacgatactgtatacagtaagaaaaacagcatggtcctggtacaaaaacagacacataaaccaatggaacagaatagagaactcagaaataagaccatatactacaaccatctgattttgacaaacctgacaaaaacaagcaatggggaaaggatttgctgtgtaataaatggtgctgggagaactggctagccatatgcagaaaattgaacctgggccccttccttatagcttatagaaaagttaattcaagatggattaaagacttcaatgtaaagccccaaacaataaaaaccctagaagaaaatctaagcagtaccattcagga

SEQ ID NO: 937992 - DNA, 631 bp, Homo sapiens
ggtgttaactctaagctggtcaggcattcatagctggactgtggtgctctcctggtattcttttgtattctggtcacagaacatcaaatttttatagggtccatgattgatgaaggctagaaaaaaccactctgtaattatgtctgaacacaaaggaagcctggatatcatgcaaaccacaaaagtgaccagacagccctctatcctggctaaaatgaatgagtgcctgtagctttctccttctctatttttcttcatgccaattacatctttagcctcagtatagcctttcctcctactagataaaatttattaagataaccagtcatggctgggcacggtggctgatgcctgtaattccagcactgtgggaggccgaggtgggtaaatcacttgaggtcaggagttggacaccagcctggccaacatagtgaaacyttgcttctactaaaaatacaaaaattagcccagcatggtggtgtgtgcctgtagttccagctacttgagaggctaaggcaggagaattgcttgaacatgggaggtggaggctgcagtgagccaacgtcatgccactgtgcatcagcctgggcaatggagtgagattctgtctcaaaaaagaaaaaaaagaaaa

SEQ ID NO: 937993 - DNA, 616 bp, Homo sapiens
cgggtggtgcctgcatatcgtgcagaaccatctgtgaaccaggacctagtcttctgttcctctgtcaactgatcacagggaactcttcatgaggccatcagtgcaggctggggaagtgaatgaagggtggcagaaatggagaccatgggcatttgagccacttcctcgtgtaacttacttgggccttcaggacatgctcgagcccaatcacatatataccacttctatttgatgatgaaatgctgctgtacatgacccactttatagctaaatgggtcagaaaacagccagttcatgataggcaattaggttgcatggtgacttgatgacccatagccaaatattcagcttccaccaaagcccagtaacaggccaagagctgtctcaaaagaaragtagttatctgcagaagatggaagagccttgctccaaaatactagaggcctctgctgtgattcaccaatgggggcctgccaaagggtccaaacaacatccgtatctgccactaacacctcaagcaccattggatctgctgggtcatatggcccaagtggcagagcagcttttacagcagtctggacctgttgcagagccttctcctgctctggaccccact

SEQ ID NO: 937994 - DNA, 666 bp, Homo sapiens
cttcccctgaagtggtcccatgcctttcctggcaaagaaagggaacttggctggcaaagaaagacctacacttacacaatgccaaaataaccaggtaattatgtcaaaagcaaaaataattcacaacaggaaattggcaccataaaatgaaataatatgctttaaatgaaattaatagtttgtaacacaaatcttcaagttaatcartcatgacaaatatataacatagaagaaatcttcacatatttcaaactttatcatgctattgtgctgtcatttatgaagatgcttgaaaatatgtttgatccttttatcccattgcatttgtcaagcttgatatgaaaatgaaattaatgaatattttacttattcaataactatcgatttagtgccttcctatatcccagagctttgataaggtcaaagaacttataaatgcaaaagattgattcttgatttaaaagattcttataattaactatcctaggatgttttatggacatatcataccctatgtatatacatttctataagaataattcaaattgcctattaactgacctcatttatttactttggcagacaagaaatccaaatgaaggtcaaactcatttgcagtgtatagactgacacttgtcatattttttaaattcaatatttgtatgt

SEQ ID NO: 937995 - DNA, 589 bp, Homo sapiens
tcagaataatcagactcatgcagagctcttgcactggctaattaatcacagtgttcctagaagtgaaatcaagaggaagcctactgcattcctacttagtctatataagcagaaacctgccaggtcaagtggaaaagagactaatctgaattctaaaaacagagaattacagcccytcaatcaatttccagacttgagccagtttacagacacacaactccttgaataaaggggaggctggattcccttgagaatggaccccactacactatagacactttatgctgttactgtttttcccattcttcctcaaggagacctccagccttttaccagggtaatggtatattgggacaagggaaatgatcagatattttggggactactggacattggctctgagctgacattgattcaaggggatctaaaacatcattgtggttctccagttacagtaggggcttatggaggtcaggtaatttatggagtttagctcaggtctgacttacagtgggtccaataggttccccggactcatcctgtggttattcccccagtgccagaatacatgattggcataggcatattt

SEQ ID NO: 937996 - DNA, 709 bp, Homo sapiens
gtggaatggccttttgaagtcacaattacaatgccagctaggtgacaatactttgcatgactagggcaaagttctccagaaggctgtgtatgcactgaatcagcatccaatatatggtacagtttctcccatagccaggattcacaggtccaggaatcaaggggtggaaatataaatggcaccatttaccatcaccagtaatgacccactagcaaaattgttgcttcctatcccacgacatcatgttctgctagcctagaggtcttagtcttagagggagaaacgctgsccccaggagacgcaacaacgattccttttaactggaagttaagattgccacctggacactttgggctcctcctacctttaggccaatgggctatgaagggaattacagtgttggctgaggtgactgacctggactatcaagatgaaatcaccctactactccacaacagaggtaaggaagattatgcatggaatacaggagatcccttggcacatctcttagtataaccatgccctgtgattaaggtcagtgggaaactcaacaacagctctatccaggcaagacaacaaaggtcctagacccttcgtgaaggaaggtttgtgtcactccaccaggaagaaaaccacaacctgctgaggtgcttgaaggcaaagggaatacagaatgggtagtagaaaaaggtagttttcttttgttaaa

SEQ ID NO: 937997 - DNA, 626 bp, Homo sapiens
ccaaggtgcaggtgatcacaaagtgctgtgtaattaggatctggagtgcagggcagtatggagcagagtggctctaaggttcagggactacacaggattggggagagtggtgatcccagtggcaataaatttttataactctttattgcctaagtatccattttgactacaagtttaactttctcataccagaagtagagttctggcaccatttacaagagtccagttctacatctcacccaaatgrctcaagtcagttgccagagataagaagttagagtcatctctcctgcctagcagattgggctccttgctttcccactgctatcctttaaatgaaccattcagctatttgccttttaacttaaagtgactcacatcctgtttctttatttgtactgctagttgccacatgcatctccctttctctgccaaactcttccttgatgacacacaagatccgaggatgaatgattgccctcttgaactcattacactttccttgcctagaatctgtaagtaaaaatctttggatttattttctgttctggtagttacagaatttgcaccttccatctgaagaattagaggcttcctcaggccccactttccctgggatgccaggg

SEQ ID NO: 937998 - DNA, 626 bp, Homo sapiens
ccaaggtgcaggtgatcacaaagtgctgtgtaattaggatctggagtgcagggcagtatggagcagagtggctctaaggttcagggactacacaggattggggagagtggtgatcccagtggcaataaatttttataactctttattgcctaagtatccattttgactacaagtttaactttctcataccagaagtagagttctggcaccatttacaagagtccagttctacatctcacccaaatgactcaagtcagttgccagagataagaagttagagtcatctctcctgcctagcagattgggctccttgctttcccactgctatcctttaaatgaaccattcagctatwtgccttttaacttaaagtgactcacatcctgtttctttatttgtactgctagttgccacatgcatctccctttctctgccaaactcttccttgatgacacacaagatccgaggatgaatgattgccctcttgaactcattacactttccttgcctagaatctgtaagtaaaaatctttggatttattttctgttctggtagttacagaatttgcaccttccatctgaagaattagaggcttcctcaggccccactttccctgggatgccaggg

SEQ ID NO: 937999 - DNA, 458 bp, Homo sapiens
ttctcataccagaagtagagttctggcaccatttacaagagtccagttctacatctcacccaaatgactcaagtcagttgccagagataagaagttagagtcatctctcctgcctagcagattgggctccttgctttcccactgctatcctttaaatgaaccattcagctatttgccttttaacttaaagtgactcacatcctgtttctttatttgtactgytagttgccacatgcatctccctttctctgccaaactcttccttgatgacacacaagatccgaggatgaatgattgccctcttgaactcattacactttccttgcctagaatctgtaagtaaaaatctttggatttattttctgttctggtagttacagaatttgcaccttccatctgaagaattagaggcttcctcaggccccactttccctgggatgccagggagaacatgagat

SEQ ID NO: 938000 - DNA, 629 bp, Homo sapiens
tgtgtttttgtcagttaaaatgaactctagacaaaattaaatgcaatatttttgcactctgcatatctatgaactgaagttcagtgatatcctgttttattacagggaatgtcactgaaaaataaccctgaaatatttcaggctggttttaggtagctttcctcttaatttttttggatactgatggtaaaatagaattataagagccatgcttatttacactaactcaattttctctttcctatatttttttacctttattattttcaacatgctaacattaatatagctaaaaataagtaaagtgatttaatagctacaccagacaggtgatgcatagataggacatagccaaaagaatcattagtgtttgcttgaytcattcgacaaagttttattgagtatctacactgtgccagtcatggtgctaccaacataagacactgcagaatgcaaaacagacagaaagcattgctctttcagagatgacatctggggagaggccaacgacaatcacataataaataaatgaattatgtaatatgttagaaatttatggggaaattaagcattttggtttaagagactaggaagcaagctaaaggtgagacaggaaatatttatactta

SEQ ID NO: 938001 - DNA, 789 bp, Homo sapiens
ctggccatcagagaaatgcaaatcaaaaccacaatgagataccatctcacaccagttagaatggcgatcattaaaaagtcaggaaacaacaggtactggagagaatgtagagaaataagaacacttttacattgttggtgggactgtaaactagttcaagcattgtggaagacagtgtggtgattcctcagggatctagaactagaaataccatttgacccagccatgccattacatggtatatacccaaaggattataaatcatgctgctataaagacacatgcacacgtatgtttattgtggcactgttcacaatagcaaagacttggaaccaacccaaatgtccatcaacgatagactggattaagaaaatgtggcacatatacaccatggaatactatgcagccataaaaaaggatgagttcatgccctttatagggatacagatgaagctggaaaccatcattctgagcaaactrtcgcaaggacaaaaaaccaaacaccgcatgttctcactcataggtgagaattgaacaatgagaacacttggacacaggaaagggaacatcacacaccggggcctgttgtggggtgcggggagggggagggatagcattaggagatatacctaatgtaaatgactagttaatgggtgcagcacaccaacatggcacatgtatacatatgtaacaaacctgtacattgtgcacatgtaccctagaacttaaagtataataataataataaaaggatatctatgtgagaggcgaaaatgttttaaggaggag

SEQ ID NO: 938002 - DNA, 789 bp, Homo sapiens
ctggccatcagagaaatgcaaatcaaaaccacaatgagataccatctcacaccagttagaatggcgatcattaaaaagtcaggaaacaacaggtactggagagaatgtagagaaataagaacacttttacattgttggtgggactgtaaactagttcaagcattgtggaagacagtgtggtgattcctcagggatctagaactagaaataccatttgacccagccatgccattacatggtatatacccaaaggattataaatcatgctgctataaagacacatgcacacgtatgtttattgtggcactgttcacaatagcaaagacttggaaccaacccaaatgtccatcaacgatagactggattaagaaaatgtggcacatatacaccatggaatactatgcagccataaaaaaggatgagttcatgccctttatagggatacagatgaagctggaaaccatcattctgagcaaactgtcgcaaggacaaaaaaccaaacaccgcatgttctcactcataggtgagaattgaacaatgagaacacttggacacaggaaagggaacatcacacaccggggcctgttgtggggtgcrgggagggggagggatagcattaggagatatacctaatgtaaatgactagttaatgggtgcagcacaccaacatggcacatgtatacatatgtaacaaacctgtacattgtgcacatgtaccctagaacttaaagtataataataataataaaaggatatctatgtgagaggcgaaaatgttttaaggaggag

SEQ ID NO: 938003 - DNA, 581 bp, Homo sapiens
gaccgtgctgtccacctgaaccttaaagccagcaagttttattaaggatttcaaaaggggagggggtgcaagaacagggagtaggtcacaagatcacatgcttcaaagggcaaaaaggagaacaaagatcacatgcttctgaggaaacaggacaaggacaaattcagaactactgataagggtctatgttcagctgtgcaggtattgtcttgataaacatcttaaacaacagaaaacagggttcgagagcagagaacyggtctgacctcagatttaccagggtgggtttttttcgccaccctaataagcctgagggtactgcaggagaccagggcttatttcagtccttgtctcaaccacataagacagacactcccagagcggccatttatagacctccccccaggaatgcattcctttcccagggtcttaattattaatattccttgttaggaaaagaatttagcaatatcttccctacttgcacatccatttataggttctctgcaacaagaaaaatatggctctattctgcccaaccctgcaggcagtcagaccttatggttgtcttcccttgttcc

SEQ ID NO: 938004 - DNA, 639 bp, Homo sapiens
tattgtcttgataaacatcttaaacaacagaaaacagggttcgagagcagagaaccggtctgacctcagatttaccagggtgggtttttttcgccaccctaataagcctgagggtactgcaggagaccagggcttatttcagtccttgtctcaaccacataagacagacactcccagagcggccatttatagacctccccccaggaatgcattcctttcccagggtcttaattattaatattccttgttaggaaaagaatttagcaatatcttccctacttgcacatccatttataggttctctgcaacaagaaaaatatgrctctattctgcccaaccctgcaggcagtcagaccttatggttgtcttcccttgttccatgaaaattgctgttattcttttctttctcaaggtgcactgatttcatattgttcaaacacacgttttacaatcagtttgtacagttaacacaatagtggtcctgaggtgatgtatactctcagcttacaaagataacaggattaagagattaaagtaaagacaggcataagaaattataaaagtattaattttgggaactgataaatgtccatattaaaatgaaatcttcacaatttacattcagagattgaagtaaag

SEQ ID NO: 938005 - DNA, 588 bp, Homo sapiens
tattctcaatccatctctcattcttcctcactggcatccttgtgcaggtgatcatgatatccctcctggactcccggtttcttgtcgtttcttccacttttcccccactacgatctattctctacatagcaaatagagtgatattattaaagaataaatcaaattatatcattctcctctttaaacacctccctatgacttctttcttgcacttagaataaaatctaagcttccttgccttgatttacaaggccctacatgaactggcccctgtttgcctctccagtgtcctgatgtaccattttccacctgccacctacactaacctyctttctattcttaggaatatgcctttttttaacctaggaaattctttcatatactcttcaaatgactaattttatctcaatattcaggtctctgctcaaataccatcttaaagaagtcttctcagaccattctgtctcatcatttccggtcattctctttcactgtatcttgttttgttttcttcataatagcactcattgcaattatttcctgtcccctccactagaatgtaaacttcatgagagtagggaactttgt

SEQ ID NO: 938006 - DNA, 795 bp, Homo sapiens
aaccagccctagccagaggggaatcacaggtccttgtggttggaacttgagttcccacaaacttcaccactgcaggctaaagtgctctgggtgtctaagtgaatttgaaaggcaatttaggccacaaggactgcaactctaggcgagtcctagtgctgaactgggcccagaaacagtggactagaggggcatgcaatctaccaaactaccagggtggmtaaaggagtggtgacatcacctctcccctaaccccaggctgcacaactagtggctccaaaaaagatcccttccttctgcttgaggagaggagaaagaagagtggggaggactttgtcttgcatcttggataccggctcagccacagcatgatagggtcagagtcataatgcctctgttccaggccctagctcctgggcaacacttctaggcacaccctgggccagaagggaacctactgccttgaagggaagaacccattcctggcagcattcatcacctgctaactgaagagcccttgggcactgaataatcagcagcgatacccaggtactacatctagggccttgggtgagcctctgagacttgctggcttcaggttcatctcggctattggggggtggagcaacaagtgggctcctggagtccccagttctaagagctgactcttggatggcatttctggaccttccgtgggccagaagggagcccactgccctgaaggatgagtctcaggccagacaaccttcatgacaagctgacttaagagaccttgggccttaagagaacatagtggta

SEQ ID NO: 938007 - DNA, 795 bp, Homo sapiens
aaccagccctagccagaggggaatcacaggtccttgtggttggaacttgagttcccacaaacttcaccactgcaggctaaagtgctctgggtgtctaagtgaatttgaaaggcaatttaggccacaaggactgcaactctaggcgagtcctagtgctgaactgggcccagaaacagtggactagaggggcatgcaatctaccaaactaccagggtggctaaaggagtggtgacatcacctctccyctaaccccaggctgcacaactagtggctccaaaaaagatcccttccttctgcttgaggagaggagaaagaagagtggggaggactttgtcttgcatcttggataccggctcagccacagcatgatagggtcagagtcataatgcctctgttccaggccctagctcctgggcaacacttctaggcacaccctgggccagaagggaacctactgccttgaagggaagaacccattcctggcagcattcatcacctgctaactgaagagcccttgggcactgaataatcagcagcgatacccaggtactacatctagggccttgggtgagcctctgagacttgctggcttcaggttcatctcggctattggggggtggagcaacaagtgggctcctggagtccccagttctaagagctgactcttggatggcatttctggaccttccgtgggccagaagggagcccactgccctgaaggatgagtctcaggccagacaaccttcatgacaagctgacttaagagaccttgggccttaagagaacatagtggta

SEQ ID NO: 938008 - DNA, 692 bp, Homo sapiens
acttaaacaccccactttcagcattagatagatcttccatacagaaaatcaacaaagaaatactggacttaatctgcactatagactgcatggatctaatacatatttacaggacacttcatccaatggctacagaatacacattcttttcctcagcacatggatcattctcaaggacagaccatatattaagtcacaagacaagtcttaaaacattaacaaaattgaaataatatcaagtatcttttctaaccacaacagaataaaactacaaataacaaaaggaattttggaaactatacaaatgtatggaaattaaataaaatgctcctgaatgaccagtgggtcaakaaagaaattaagaaagaaatttaaaaatttcttgaaacaaatgataatggaaacacaacctaccaaaatctaagagatacagcaaaagcagtactaaaagagaattttatagctttaactgcctacttcaaaaaaaaaggaaaaacttcaaataaacaatctaatgatacatcttatagaactagaaaagcaagagcaaacgaaacccaaaattagtagaaacataaataaagatcagagcagaaataaatgaaactgaaataaagaaaataatacaaaagatcaatgaaaaagttggtttttcaaaaagctaaaaaaaattgacaaaactttagccagag

SEQ ID NO: 938009 - DNA, 684 bp, Homo sapiens
ctcctccaaaggaacacaagtcctcaccagcaagggaacaaaactggatggagaattagtttgatgaggtgacagaagcaggcttcagaaggtcggtaataacaaacttctccgggctaaaggagcatgttctaacccatcacaaggaagctgaaaaccttgaaaaaaggttagatgaatggctaactagaataaacagtgtagagaagagcttaagtgacctgaaggagctgaaaaccacagtatgagaacctcgtgaagcataaacaagattcaatagccaattcaatcaagcagaataaagaatatcagtgattgaagatcaaattaatgaaataaagcgagaagacaagattagagaaaaaagartaaaaagaaatgaacaaagactccaataaatatgggactatgtaaaaagaccaaatctacatttgatagctgtactgaaagtgacagagagaatggaatcaagttggaaaacgctctgcaggatattatccaggagaacttccccaatctagcaaggcaggccaacattcaaattcaggaaatacagagaacgccacaaagatactccccgaaaagagcaactccaagacacataattgtcagattcaccaaagttgaaatgaaggaaaaaatgttaagggcagccagagagaaaggtcgggatacccacaaagg

SEQ ID NO: 938010 - DNA, 589 bp, Homo sapiens
gtttttaatacaattctttaataaaaagaaccagaggcgaggcacggtggctcatgcctgtaatcccagcactttgggaggctgaggcaggcggatcacctgaggtcagaagttcaagaccagcctggccaacatggcgaaaccccgtctctactaaaagtacaaaaattagccgggcatagtggcaggtgcctgtaattccagctactcaggaggttgaggcaggrgaatagcttgaacctgggaggcagaggttggagtgagccgagagcatgcgattgcactccagcctgagtgacaaaagagaaactctgtctcaaaaaaaaaaaaaaaaaaaaaaaaaaagaaccagagatccttggagaaatggctaattctaaaattggagcagaaaataaatacaagataagcctggagtatcttgtactgtccatgaagcaagaaagttattacaagaaaaaagcatggggaaagtcaaaggggcataggagccaaatgaagagcagtgaatagtgaaagctagaacaaggtgtgctatacaatagacaaagtagtattggattataactcaaaatataaagtcaacatc

SEQ ID NO: 938011 - DNA, 589 bp, Homo sapiens
gtttttaatacaattctttaataaaaagaaccagaggcgaggcacggtggctcatgcctgtaatcccagcactttgggaggctgaggcaggcggatcacctgaggtcagaagttcaagaccagcctggccaacatggcgaaaccccgtctctactaaaagtacaaaaattagccgggcatagtggcaggtgcctgtaattccagctactcaggaggttgaggcaggagaatagcttgaaccygggaggcagaggttggagtgagccgagagcatgcgattgcactccagcctgagtgacaaaagagaaactctgtctcaaaaaaaaaaaaaaaaaaaaaaaaaaagaaccagagatccttggagaaatggctaattctaaaattggagcagaaaataaatacaagataagcctggagtatcttgtactgtccatgaagcaagaaagttattacaagaaaaaagcatggggaaagtcaaaggggcataggagccaaatgaagagcagtgaatagtgaaagctagaacaaggtgtgctatacaatagacaaagtagtattggattataactcaaaatataaagtcaacatc

SEQ ID NO: 938012 - DNA, 589 bp, Homo sapiens
gtttttaatacaattctttaataaaaagaaccagaggcgaggcacggtggctcatgcctgtaatcccagcactttgggaggctgaggcaggcggatcacctgaggtcagaagttcaagaccagcctggccaacatggcgaaaccccgtctctactaaaagtacaaaaattagccgggcatagtggcaggtgcctgtaattccagctactcaggaggttgaggcaggagaatagcttgaacctgggaggcagaggttggagtgagccgagagcrtgcgattgcactccagcctgagtgacaaaagagaaactctgtctcaaaaaaaaaaaaaaaaaaaaaaaaaaagaaccagagatccttggagaaatggctaattctaaaattggagcagaaaataaatacaagataagcctggagtatcttgtactgtccatgaagcaagaaagttattacaagaaaaaagcatggggaaagtcaaaggggcataggagccaaatgaagagcagtgaatagtgaaagctagaacaaggtgtgctatacaatagacaaagtagtattggattataactcaaaatataaagtcaacatc

SEQ ID NO: 938013 - DNA, 577 bp, Homo sapiens
ctaaacattcaacagcaacataacatttataatgtcaagcatccaattaaaaaaaaaatcactagatataccaaaaaacaggaaatgtgacttataaccaggagaaaaatgtgtcaatagaaacagatctagaaatgacagatattaatatacaagacctttaaagcagctattataagtatgttcaaaaccaggcacggtggctcacacctgtaatctcagcactttgggaggtcgaggcaggcraatcatttgaggtcaggagtttgagaccagcctggccaacatgataaaaccccaactctactaaaaatacaaaaattagctgggcatggtggcaggtgcctgtagtcccagctactcaggaggctgaggcaggagaattgcttgaacttgggaggcggaggttgcagtaagtcaagatcgcgccactgcactccagcctgggcaacacagtgagacttcatctcaaaaaaaaaaaaaagtacattcgagggtttaaaggaaaacatgagtataatgaagacagaagtagaaattatgaaaaattaaacaaaaagtgaagaaaagctgaaaa

SEQ ID NO: 938014 - DNA, 664 bp, Homo sapiens
tgtaaataaagacgaagctttgttcactcactctctattcacctcctgctgtgcagtctggttcctaacaggtcactgatcaatatgggtcatgggcctgggggttggcgactcctgccttagcatgatcaaattcatagagacagaaagaattactatggggtagaaagggagtgcagaatggagagttattgtgtagtgagtacagagtttgagtttggaatggatgaaaaagttgtggagatggatagtcatgatgtttgcacaacaatatgaatgtatttaatgctactgaattgtgtactcaaaattggttaaaatgacaaactatgtatatcgtgtgtgtgtgtgtatgtgtrtgtgtgtgtgtgtgtgtgtgtgtgtgtgttttctagacagggtcttgttctatcacccaggctggagtgcagtggtttgttcttggcttgctgcaacctccgcttcctgaactcaagcaatcctcctgctacagccttccaagtagctaggactacaggtgtgtaccaccatgcccagctaatttttgtactttttttttggtagagacagggtttcgccatgttgcccaggttggtcttgaactcctggactcaagaaatctgcctgccttggccacccaaagtgttggcattacaggcatgag

SEQ ID NO: 938015 - DNA, 781 bp, Homo sapiens
ttaagatcttgatttgattcttagcttggtgattgttgtgtatagcagtgctactgatttgtgtacatcgatttttgtaacctgagactactgaattggtttatcaaatctaggagtctcttggaggagtctttaaggttctctagatatatgatcatataataagtgaacagtgatagtttgacttcctcttttccaatttggatgtcctttatttccttctcttgcctggttgctctggctaaggcttccagtgccacgctgaatagaagtggtgaaagtgggcatccttatcttgttccagttctcaagggaaatgctttcaacttttccccattcagtatgctgttggctgtgggtttgtcatatgtggcttttattattttgaggtaagtcccttctgtgcctagtttgatgaggatttttatcataaagggatgyttaatttcatcaaatgcatctattgagataatcatatggtttttgttttcaattctgtttatgtggtgtatcacattttttgacttgcctatgttaagccatccctacatccatgggatgaaacccactagatcatggtggattatcttttttgatgtgctgttggatttggttagctagtatatcattgaagatttttgcatctatatttatcagtgatattggtctgtagttttgtttttttcttatgtcctttcctggttttggtatcagggtgatattggcttcataaaatgagttaggaaggattccttaaaaagagaataaaaagctcaaagtt

SEQ ID NO: 938016 - DNA, 676 bp, Homo sapiens
acttatgagtgagaacatgtggtgtttggttttctgttcttatgttagtttgctgagaatggatggtttccagcttcatccatgtccctgcaaaggccatgaactcattcttttttatggctgcatagtattcaatggtgtatatgtgtcacattgtctttatttagtctatcattgatgggcatttgggttggtttcaagtctttgctattgtgaacagtgctgcaataaacatatgtgtgcatgtgtctttatagtagaacaatttaaaaatatggaacgcttcaggaatttgcgtgtcatccttgcacaaggaccgtgctaatcttctctgtatccttccaattttagtatatgtgctgccaaagcaagcacattttttgtttgtttgtttgtttgtttgtttgtttgtttttgagatggagtcttgctccgtaacccaggctcaagtgcygtggcgcaattttggctcactgcagcttccacctcctgggttcaagcgatcctcctgcctcagcctcctgagtagctgggattacagatgtgcgccaccacacccggctaatttttgtgtatttagtacagatggggtttcagcatgttagctaggctggtctcaaactcatgacctcaagtgatccacctgcctcagcctcccaaagtgctgggattacag

SEQ ID NO: 938017 - DNA, 605 bp, Homo sapiens
aaactataaaaattagctgggtgtggtggcaggcacctggaatcccagctacttgggaggctgaggcagcagaattgcttgaacccgggaggcaaaggttgcagtgaactgagatcacaccattgcactccagcctgggcaacaagagcaaaactccatccatctctctctctctctctctctctctctctctctcttgaattcatctgggcactattcaagctgtgctgagaaactcttccttaatccttcaagttaattcctaaacttaagttctttaaagttgtgtttgaattyctggcatgtgaaactgaaattatatatatatgtacttacattatctatataacttattatatagataatatcaacaaacgcacatataatttcagtacaacttttgccctcattaattaaagggcataaaccaagttttcaaaaacaaaaatctaaactctcccacccactcccctctgtgttctgagagactttgctaaagactggtgggtgtccggaacttgagctaaagctcctggctcaccctggctctctggccggctgggctctcatatccggctgcccatttctgccagtctgcactggct

SEQ ID NO: 938018 - DNA, 605 bp, Homo sapiens
aaactataaaaattagctgggtgtggtggcaggcacctggaatcccagctacttgggaggctgaggcagcagaattgcttgaacccgggaggcaaaggttgcagtgaactgagatcacaccattgcactccagcctgggcaacaagagcaaaactccatccatctctctctctctctctctctctctctctctctcttgaattcatctgggcactattcaagctgtgctgagaaactcttccttaatccttcaagttaattcctaaacttaagttctttaaagttgtgtttgaattcctggcatgtgaaactgaaattatatatatatgtacttacattatctatataacttattatatagataatatcaacamacgcacatataatttcagtacaacttttgccctcattaattaaagggcataaaccaagttttcaaaaacaaaaatctaaactctcccacccactcccctctgtgttctgagagactttgctaaagactggtgggtgtccggaacttgagctaaagctcctggctcaccctggctctctggccggctgggctctcatatccggctgcccatttctgccagtctgcactggct

SEQ ID NO: 938019 - DNA, 741 bp, Homo sapiens
agggagaaaccagcacaaaaaggctgaaaattccaaaaaccagaatgccacttctcctccaaaggatcacaactcctcgccagcaagggaacaaaactggacagagaatgagtttgatgaactgacagaagtacgcttcagaaggtgggtaataataaactcctccgagctaaagaagcatgttctaacccaatgcaaggaagctaagaaccttgaaaaaaggttagatgaattgctacctagaataaccactttagaggagaatataaatgacctgatggagctgaaaaacatagcacaagaacttcgtgaagcatacacaagtatcaagagctcaaatcgatcaagtggaagaaaggatatgagattgaagatcaacttaatgatacaaagcaagaagacaagattagagaaaaaagataaaaaggaatgaacaaagcctccagaacatggaactatgtgaaaagaccaratctacatttgattggtgtacctgaaagtgatggggagaatggaaccaagttggaaaacactcttcaggatattatccaggagaacttctccaacctagcaagacaggccaacattcaaattcaggaaatacagagaacaccacaaagatactccttaagaagggcaagacacataatcgtcagacacataatcgtcagattcacctaggttgaaatgaaggaaaaaatgttaagggcagctagacagaaaggtcgggttacccacaaa

SEQ ID NO: 938020 - DNA, 461 bp, Homo sapiens
gcattgttatctcgtataaaattaagacttaaaaaaataatttccctctctccatctctttctttcttttcttcccctttacttccttcatttttccctgccatccttctcctctcaatctgatgttaaagctctatacagatattcgttattttgctattgttgttgttgttgttgatactattattatttttgataccactattattttgttgtgcagttttgttttgttttgttttttgagatggggttttcctctgtcacycaggctggagtgcagtggcacaatctcggctcactgtagcctccgcctccagggttccagggcttctctttcctcagtctcctgggtagctgggattacaggcacacgctagcacatgccaccatacctggctaatttttgtatttttagtagagatggggtttcacaatgttggccaggctgttctcgatctcct

SEQ ID NO: 938021 - DNA, 613 bp, Homo sapiens
aaagggcttggttcttcccccaactgtggaatctgcacactggatttgtgccctcccccaagttctggccaggaggcttttcgccctattcaaatcgtttcacagttcagctagagatttccttctccctgtggagttttacccccacaaccccactcctctggctgctctgccgatggatccccatggtgccaggcaggaatggccctctcggggacccagtgagctaccagggcctttctgctgcttcctctacccctatattttgctcggctctctaaattgactcagctctaggtaaagttggaaacttctcctgcaaacatactttcagcttctccagtgggggggtgtgtrttcaggagaggaggctctccctttcccacttccacagttggggcacccacagtatttggggtgtctcccatgtcctgcaggagcagtccgcttccttcagagggtctgtgggtcctcttgggattgctggtttgttcttacagttaatttggagctaaaattcacaacgtgtgtctccgcaagcttctatgtccggagctgcaatctagtcttgcctcccatctgccatgatgatcctattgcccgctagacaccg

SEQ ID NO: 938022 - DNA, 736 bp, Homo sapiens
tctcttgtatgagatgtctgtcgacccctgctgggaggtgtctcccagtcatgaggcacgggggtcagggacccacttgaggaggcagtctgtcccccttagcagagctcaagtgctgtgctgggagctccgctgctctcttcagagctggcagacaggaacatttaagtctgctgaagctgcacccatggccgccccttcccccaggtgctctgtaccagggagaaaggagttttctctataagcccctgactggggctgctgcctttctttcagagatgccctgcccagagaggaggaatctagagaggcagtctggctaccacagttttgctgagctgcagtgggctccacccagtttgaacttcctggtggctttgtatacactgtgcagggaaaactgcctacttaagcctcagtgatggcagacgcccctcccccaccaagcttgtgtcccaggtsgacttcagactgctgtgctggcagtgagagttgcaagccagtggattagcttgctcagctccatgggggtgggatccactgagctagaccacttggctccctggcttcagccccctttccagggtagtgaacagttctatctctctggcattccaggcaccactggggtatgaaaaaaaaaaaaaaactccagcagctagctcgatgtctgcccccatggccacccagttttgtgcttgaaacccagggccctggtggtgtaggcacctgaggg

SEQ ID NO: 938023 - DNA, 724 bp, Homo sapiens
agattactaaaattgacagaagtgagaacttgatttagaacagttaccatagaggtattacaaaaataagtaaaagtgtacaactgataaaattaccaacaggttcacagatagattactgcaaatgggttcacagttgatttagaaaaagacagctagttccacttacttatactatacccactattgaaaaagaaagttctgagaaagagactacaaaagcaaaataaaacatttaggccaattttgcttattactacagatgtaaaaatttgaaataaaatgttaaatgaattttaccattgtatcaaaagaataatactttatgattaaacagagtatattccagcacagaaagaataatccattgcatcagcaaattcatggagaatagcttcatgaacacattaacgtatcagatgcaacagcaattagtgttgaacacttaagattttatcgctttcttcatatgagtttgttaccttgtgaatgaaatatgttcccccaccgttcatctctagcaagaaaagaaattgattcatttgaagaaaactataaaatcttggaacatggaagcatcrtaccttaagtaagacaagctcattaaaatagcaatttttatgattaacatattaatcaaatgtagttcagttatagtctcctttttttcctgataatttgcaggggttgttggagggaggaagtgtggtacaggactttatcc

SEQ ID NO: 938024 - DNA, 546 bp, Homo sapiens
taaagctattttaaaaatcacttggaggattatttggagatcatgatagaaattttttactggttaactgagatgaattgtatagtccttttttagcttaagatctttaaacatttagttgcataacagctttttaatttgttggactcctcagttgaagccattacaaattggcttamaattgtaaaagattgagtattatattgagcctttctatcagaaaacattagcttaattagtctataattaaagatgatgttagctgtactttagtttgtcttaggaatagaggtcctcaaattatatgtaaaccatcagttgcatggttcttttgaaatgtggatttttgtgaatgcttaataaagctggcctgactagcttaatttaaaaatatatacatctatgctaaatatatacacacacacacacacacacatatatactgcttctactgtttgtataacttaaactgatttgcatgctgacaaaagtactcatccaattgtacagttttatttttatttatttatttattttttattttta

SEQ ID NO: 938025 - DNA, 799 bp, Homo sapiens
ataaaagctttcccatgcaagaggcctgatgttataacagtagattattatgctacagtgtattttcaccaggtaaagaaagcttgttatggtttggatcttttgggaatgttggagaaagactgtccttaccatccacactacaagaaaacctcgggaccttgaactttgggttcatagtctcatatctgagaagggtccttccacactcttggaactgtacacccacacccattgcaacccttagaataaaactaaccagggaggtttctccccagaggaggatggcatccttgatgttaacagcttttcccaagttcacagattaagacttctatcctgaaactcttatctttgaatattttcccttgattatgcctctgtgagcaatagaagtggaaaaggggtctgtgatgtgcacttatgggtatacttttgtgaaggagtttacagccagccttatgcatggataaccttatactttgattaataaaaaataaaagcccattgtaggtaagaaactttaatggtacatatgttgcwtcatcatcagtcagaaacaaaacattggttcactcctcttaacccacttcatgggttaaagagaacactgtcaggaggccatcagtcttctagaagggcatcctttgttaggtcctttttccatggtttaaagtaaaagaagcaatgattagaaatatatccctcatgataggatctatgataaattctactgtaaaagatacaacaaattttaaattcctttgtgaaagtcataatggaattggctgaacagaga

SEQ ID NO: 938026 - DNA, 585 bp, Homo sapiens
cagaggcagaagaaatgacatatttggttaatgctggggaggctcgctcctccctaattcaccaaccaagggttacagaattctctaggaaaaattgacagtatgaggggtgaaaggggagggatttccagttctgatagtcaagacaatgttacttagattgggatgaaaacaaattgacgggccattcttatatgttcatgaagcaggaactracctcctaggtagagactgagtgtgagattgggtttaggataaggaatagaggaaggacaaataaaagtaaagatgagcctcctaacagaggaggaggaaagaaaaaattaatccccctgtgtgggttggggacggcaacaggagagggttaaaaatcacacccttatagattgaactaaagcaatcagtaaaagtagtttgcagaaaagaatatcccatttccatgaagggagaaaagatttccaaccagaaatagagggtttgattaaaaatggactattagaaccttgcatgtcaccatacaacactcctttgggttgcttatctggagggcagagtttctgtgtctgttccccgacatcttcttgc

SEQ ID NO: 938027 - DNA, 585 bp, Homo sapiens
cagaggcagaagaaatgacatatttggttaatgctggggaggctcgctcctccctaattcaccaaccaagggttacagaattctctaggaaaaattgacagtatgaggggtgaaaggggagggatttccagttctgatagtcaagacaatgttacttagattgggatgaaaacaaattgacgggccattcttatatgttcatgaagcaggaactaacctcctaggtagagactgagtgtgagattgggtttargataaggaatagaggaaggacaaataaaagtaaagatgagcctcctaacagaggaggaggaaagaaaaaattaatccccctgtgtgggttggggacggcaacaggagagggttaaaaatcacacccttatagattgaactaaagcaatcagtaaaagtagtttgcagaaaagaatatcccatttccatgaagggagaaaagatttccaaccagaaatagagggtttgattaaaaatggactattagaaccttgcatgtcaccatacaacactcctttgggttgcttatctggagggcagagtttctgtgtctgttccccgacatcttcttgc

SEQ ID NO: 938028 - DNA, 541 bp, Homo sapiens
tcaatggaaaattccagaaataaacaattcatcataagttttttattgatacataatctttgcacaaatttgtgggatacatgtgatagtttgttacatacatagaatctgtaatgattaaacctgggtatttaggatgtgcatcttctyaagtatctattatttctatgtgttgaaagcatttcaagtcctcacttatgtctattttgaaatttacaatacgttgttgttaactgtagtcgtcctactctaacatcaagcgttagaacctattctttctgtgtaactgtatttttgcacccattagccagcctctctttatttccaccccaacacacacccacatccttcccagcctctagtaaccatcattctcactctttacctccaggagatcaactttttaagctcccacataagtgagtacatgtgatatttgtcgttctgtgtctgtgttattttttaatgtaatgacctctaattccatccatgttgctgcaaacaacatgatttaatgcatttttacaggtgaataatattc

SEQ ID NO: 938029 - DNA, 541 bp, Homo sapiens
tcaatggaaaattccagaaataaacaattcatcataagttttttattgatacataatctttgcacaaatttgtgggatacatgtgatagtttgttacatacatagaatctgtaatgattaaacctgggtatttaggatgtgcatcttcttaagtatctattatttctatgtgttgaaagcatttcaagtcctcacttatgtctattttgaaatttacaatacgttgttgttaactgtagtcgtcctactctaacatcaagcgttagaacctattctttctgtgtaactgtatttttgcacccattagccagcctctctttatttccaccccaacacacayccacatccttcccagcctctagtaaccatcattctcactctttacctccaggagatcaactttttaagctcccacataagtgagtacatgtgatatttgtcgttctgtgtctgtgttattttttaatgtaatgacctctaattccatccatgttgctgcaaacaacatgatttaatgcatttttacaggtgaataatattc

SEQ ID NO: 938030 - DNA, 659 bp, Homo sapiens
agccttccatgaaaaaaaatcacaagtgtctccctccctccctcactagccgagcaagacagcttcactctggaaccatctgtaagtcactcacatgattttttttcaccagaaggggaattatgtctgtttccaactcatgctaaaatttagatacccttagatttatcatgactggcaaggtgtagacagcacaaaatacaagatgagataaaggaaaaagtggcaagtcaatgatagtgacccagcatggttacatttggctatgtcctctattccaatgagctgcagattgctacctccatgaacgaggtacccagaattcacaccatgttctaaatattgcctgtgaccttcaaagctggcatgaattgtctgttggagggaagtartgttcgaattattctttttggatagaatcaatttgagtattttgctgatactccagagtgataaagattttgctactaaaaaaaatttcagatgatagaactttgggtatttttggaaatttcctttttgaaggaaaaaaatctgccaaattaagtatttcgtgaaaccatcaagatagacgccagtgacctacgtgttaggtggatggtgaaagcacaaaagctcttctctgaggccacatccacctaagactgtaataaggatga

SEQ ID NO: 938031 - DNA, 552 bp, Homo sapiens
tatatttcaaaattgctaaaagagtggattttaaatgttttcaccatgaagaagtaactatgtgaggtgatggatgtatcaattaacctgctttgattattccacaatgtatacatgtattgaaccatcacaccgaatcttataaatatatacaattattatttgtcaataaaaatgaaatatttttttaaaaaacactgacaataccaaatgttggtgagaatatgtagcaacaagaactctcatccaatgctggtgggaatgcaaaattgtacacccattatggaggagagtttgtcaggctcttacaaatctaaatatagtcttactgtacaatccaggaaccactttcctcaacagtaatccaactgagttgaaaacatgtccatacgaaaacctacacrcataaatgtttatagcagctttattcataatcaccaaaaattgaaagccaacaagatgaccttcaataggtggatggataaagaaattagtacattcacacaatggaatattattcagtaataaaaaaaataagctatcaagccaaaa

SEQ ID NO: 938032 - DNA, 682 bp, Homo sapiens
aagaagtcagtctgaaaggttgcatactaaataattccaaccatatgacattctggaaaagtcaacagtatagagacaataaaaagatcagtggttgctaggtatatgggggaaaagggagaggaataagtaggtgaagcacagggaatttttagaacagtgaaacttttctgtatgataccgtaatggtgaatacatgacatcatgcatttgtgaaaatctatggaactgtagaacacaaagagtgaaccttaatgtaactatgaacttgttaataataatgtatcaatgttggtttatttgttttttktgtgtgtgtgtgtgtgttttgtttgtttgtttgtttcttgagacgaagtctcactctgttgccaggctgaagaacagtggcatgatctcggctcgctgcaacctatgccttctgggttcaagcaattctcctgcctcatgctcctgagtagctgggactacaggcgtgtgccaccatgcccagctaatatttgtatttttagtagagatagggtttcaccatgttgcccaggatggtcttgatctccgcccactttggcctcccaaagttctgggattacaggtgtgagccaccgtgcctggcctcaatgttggtttattaattgtaactattgtaccaccctaaggcaagatgttaataataggggaaact

SEQ ID NO: 938033 - DNA, 682 bp, Homo sapiens
aagaagtcagtctgaaaggttgcatactaaataattccaaccatatgacattctggaaaagtcaacagtatagagacaataaaaagatcagtggttgctaggtatatgggggaaaagggagaggaataagtaggtgaagcacagggaatttttagaacagtgaaacttttctgtatgataccgtaatggtgaatacatgacatcatgcatttgtgaaaatctatggaactgtagaacacaaagagtgaaccttaatgtaactatgaacttgttaataataatgtatcaatgttggtttatttgttttttgtgtgtgtgtgtgtgtgttttgtttgtttgtttgtttcttgagacgaagtctcactctgttgccaggctgaagaacagtggcrtgatctcggctcgctgcaacctatgccttctgggttcaagcaattctcctgcctcatgctcctgagtagctgggactacaggcgtgtgccaccatgcccagctaatatttgtatttttagtagagatagggtttcaccatgttgcccaggatggtcttgatctccgcccactttggcctcccaaagttctgggattacaggtgtgagccaccgtgcctggcctcaatgttggtttattaattgtaactattgtaccaccctaaggcaagatgttaataataggggaaact

SEQ ID NO: 938034 - DNA, 473 bp, Homo sapiens
agctgtccctgtgcctggacacacttgtaacttgactttaaaagccatctgccagctcactagaaacacagacatgctgtctgtgctggggcttacatttgcatcaccgcggtacctcgatgctcaggacagatatttctactcaaatctataccttgcctgaatrgagctatgagggtgtgacccagaggaagtgctgtgaaactctgcataaagagattagttcagatgccctctcttttatgacacagggtaaccaatcagatactccacttcccagaagtggctggacacagactgccctgtagtagagagacaaagcagtgggatgagtgggtcctacgtagggatcctcagggattccttgggcacaagcaggatctctcttctcagaaagagccaacaataccatatgttagaagctcaaaaccaactgtattcttttcattctgttatcactgataattactagc

SEQ ID NO: 938035 - DNA, 598 bp, Homo sapiens
attcaattacctccacctggtctctcccttgacacctgggaattttggggatcacaattcaagataagatttgggtgggcacacaaagcctaatcacaccaggtcgtcaggtgatgaatggagttttggcagaggtttggatcacagtggttatttcctcagttcctaaatataatttgagtagctgtacttggtaactgacagaacccctgtactgactctctgaaccaaggagtgaagactgtcacagtagggagagaaaagtcaacggcatgaaatgactctgctctaagtattgtacacagagagcagtactgtggctctggacaaaccacagagactgtgaccacartgaagggttaaaaatgcaagagaatggtgattcatctcagaattctatttaattttcctgctttcctttgcagtaaataatgatcttagagattctaactgcacatataattaaagtaaccagagattattccaatattagttgttgtttcagatgtggtatcttaatggagaaaatcagcataggtccttaaccttgcatttaatctggaaaatattcatcttccccctgactaatttacaagaa

SEQ ID NO: 938036 - DNA, 785 bp, Homo sapiens
tgccaagggttatttagcaacatacattagtttgtttatttgttttctgatataaaaatctttgttaaacaacttatggtgtgctgctataaagacacatgcacacgtatgtttattgtggcactattcacaatagcaaagacttggaaccaacccaaatgtccatcaatgatagactggattaagaaaatgtggcacatatacaccatggaatactatgcagccataaaaaaggatgagttcatgtcctttgtagggacatggatgaagctggaaaccatcattctcagcaaactatcgcaaggacagaaaaccaaacatcacgtgttctcactcataggtaggaattgaacaatgagaacacttggacacaggatggggaacatcacatgctggggcctgtcatggggtagggggagggggagggatagcattaggagatatacataatgtaaatgacgagttaatgggtgcagcccaccagcatggcacatgtatacatatgtaacaagcctgcacrttgtgcacatgtaccctagaacttaaagtataataataataaaaaataaaactaaaaataaaaaaaatcttatggtgaaggaagcttccaaaaaaagatgcaaggtaatatggccatgagcttgaattatatttactcttgtcttattcattcatcacattacatctatgcactagacattgagctgggcattgtatggctggcatttgtcagaccaaattgtgctgtgatatcatgatatctgctctattttttctaagtataa

SEQ ID NO: 938037 - DNA, 785 bp, Homo sapiens
tgccaagggttatttagcaacatacattagtttgtttatttgttttctgatataaaaatctttgttaaacaacttatggtgtgctgctataaagacacatgcacacgtatgtttattgtggcactattcacaatagcaaagacttggaaccaacccaaatgtccatcaatgatagactggattaagaaaatgtggcacatatacaccatggaatactatgcagccataaaaaaggatgagttcatgtcctttgtagggacatggatgaagctggaaaccatcattctcagcaaactatcgcaaggacagaaaaccaaacatcacgtgttctcactcataggtaggaattgaacaatgagaacacttggacacaggatggggaacatcacatgctggggcctgtcatggggtagggggagggggagggatagcattaggagatatacataatgtaaatgacgagttaatgggtgcagcccaccagcatggcacatgtatacatatgtaacaagcctgcacgttgtgcacatgtaccctagaacttaaagtataataataawaaaaaataaaactaaaaataaaaaaaatcttatggtgaaggaagcttccaaaaaaagatgcaaggtaatatggccatgagcttgaattatatttactcttgtcttattcattcatcacattacatctatgcactagacattgagctgggcattgtatggctggcatttgtcagaccaaattgtgctgtgatatcatgatatctgctctattttttctaagtataa

SEQ ID NO: 938038 - DNA, 726 bp, Homo sapiens
atgcttcacaaagttcttgtgctatgtttttcagccccataaggtcatttatattcctctctaaactggttattctagttagcaattcctttaaccttttatcaaggttcttagcttatttgcattgggttagaacttgctcctttaggtcagtgtaattttttattgctcatcttctgaagcctacttctgccaatttgtccatctgattctccatccagttctgcrcccttgatggaaagacactgtgataatttggagagaagagacactttgttcttttggattttcagcattttttcgttgattatttctcatcttcctgagtttttttttatttttggtctttgaggccgatgcttggatgaggtttttgttggggccttttttgctgttgttgatgatgctgttactgtagctttctgcttgtttcttttttcttgcaatagtcaagtccctcttctatagggctgctgcagtttgctggggcttcacttcaggccctattcatctgatttgctcctgagcctggagatgtcactcaaggaggctggagaacagcaaagatggttgcctgctccttcttctgggacctctgacctcgaggggcaccaaccttatgccagtaggattgctcatgtgtagagtgtctacaacctctgttggaagatctcagccagtttgatggcatggggagcaggacccatttaacaaagcactttgtct

SEQ ID NO: 938039 - DNA, 651 bp, Homo sapiens
taaggagttactattcaaaatgtataaggattgttttccaagatggtgaatgttaaagcatgtctcagccagttggaaatagcaagatactgcattaagacagtgcataaagataagctttaattcacaaagtaaatgagaatccactagatttatgaaggacaccccagatctctaggaggaaaacgtgggcaaacagccctcgtgacagtgtctgtctgataaacataagtgaagccccagcacatgagaggagcagagagcctcctctgtgactcacctttccactggggatctgagcagcccaggttaaggaacagcattatgtttctccaagccctggaggtaacttggggaaaggcttggaaatgctatgagggaaagacgctgggaaaagctgcagacattttcygaggcctggaaccaagaacaggacaccatttttaatccaggcacattcaaaggcagccattctttagtgacctggcagcatggccacttaggcattttataatagtcttaggtcagagactgaagtgcctgctctggagttgggtagtggcctctgcaaccagagctatggaaagtgcctcagcaggaggtgctggaattgtgctttctcctgttgcaggcccggggtgggaggagagc

SEQ ID NO: 938040 - DNA, 585 bp, Homo sapiens
gcctcccgacaatgtataaaaccaagctgtgctccaaccatcttcggcacatgtttccaggacttcctgaggctgagtcacgggcgcgcatgctcaactttggccagataaactttctaaattaactgagacctgtctcaaatttttggggttcacattttggtaaccacgaagggattctgaacgtggatgcccctgacctttgacaaatttcctatcagtgcttgttaacagcatgagctaactttatggctcaaaccaataggaccatttgctgaggtctgagagcacccccttcagagaatccctgatctcccaaaatttgctagggatctaaagtttatttygctgtacaactcccttttttttggagttttacttgcttccaacacaagaatggcaagtttttcctgcttccgtgacgatggaaggcaggtaactcctttatggagtttgagcttgcttccaacagggaaaatgagggttttttggtttgtttgttttttctttcctgcttctaagatggtagaaagcagtcttcagcctgagacccatccctaggtaagtaactgacttggggttttc

SEQ ID NO: 938041 - DNA, 562 bp, Homo sapiens
accttacaatcagtcctcctcttttatagcctgcaatttcccttccttcatagtctataaatttataaaaataatacaataaaaatcaagtgttctgctttacactttaaagtttgggataaaataaatcattcaagaattgtctttttatgatgataaattgatggatttggggggttgtatatgtctggggaatcttatatccctttagtgggaaaaggaaaaacttccatgtcgtttgtaataccaacaagctatttttacaaacctaacttttcagtgtacataaatcatgatacagaggcagacacaatggcagagtagaaggctccaccgattatgccccccaccacccacaaggacaccaagttaacaactgtctacacagasgaaacacctgttggctgagtgcagtggttcacgcctgtaatcccagcactttgggaggctgaggcgggcgaatcacttgaggtcaggagttcaagatgagcctggccaacatggtgaaactctgtctctactaaaaatacaaaaattagccaggtgtggtgtcaggtgcctg

SEQ ID NO: 938042 - DNA, 733 bp, Homo sapiens
gcagcttgctatgatcctgccactgcactccagcctgggcaacagagcaagatcttgtctcaaaaaaaaaaaaaaaagtttttgattggtggtgactgcataagcctttgctcattgctgagcaatgagcacatttagaacacattttctctgtgttctaaaaacatacatgaaggcaggcacggtggctcatgcctgtaatctcagcactttaggagcccaaggcaggcagaatgcttgagcccaggagttcaagaccatcctgggcaacatagtgagaccctgtccctagaaaaaaaataaaaattaraaaaaaaaaaaagaattaccaagccatatctgggtagaacaacctaatatttacaaataccctttgtggtaaaagatgaggtacttgtatttatgggcaagtgagcattactgttcattcattcagtgaatgtttattgagtgcctactatatatatatatgtatatatatatgtgtgtgtatatatatgtgtgtgtatatatatgtgtgtgtatatatacatatagttgtagttgctggagataaagtgactaaagcaggcaaaaacgccttccctcatggagcttatgttctaaaggggaagacagaaagcaaacaaggtacagaagtaaattatatgttatgttaggtcacacctacagagagaaataaaggaaggaaagcaaatagagagtatgtacatggtagacagaagaggattgc

SEQ ID NO: 938043 - DNA, 595 bp, Homo sapiens
tagagtaagaacttactcacttccaaaaaatggcttaatctattcatgagggatccacccccatggcccaaacatctcccattacccaattctaaagccgctttcacatattcagctatctttataacaaaaccccaytcttggtaccagttttctttttctcttttgtgtagctatgaaggaatacctgaggctggataatttgtaaagagaaaaggttcatttggctcacaattctgatgtctggaaaggttcaatattgggcatctggtggtctcaggctgcttccgcacatggcagaaagtagaaggttagggagagcccatgtgtgcagagatggcatggtgaaagaggaagcaaggggctggggagtgccagcctctttttcaacaaccaactctcgaaggaactttagagaaaacctcactcacccctgaggaagggcattactctatttatgaggaatctgcccccatcactcaaacaccttccattaggccccaactccaacactgggtatcaaatttcaacatgaagtttggaggggacaaatatctaaaccatagcagatggtaaatgaaaatagaaaatagac

SEQ ID NO: 938044 - DNA, 595 bp, Homo sapiens
tagagtaagaacttactcacttccaaaaaatggcttaatctattcatgagggatccacccccatggcccaaacatctcccattacccaattctaaagccgctttcacatattcagctatctttataacaaaaccccattcttggtaccagttttctttttctcttttgtgtagckatgaaggaatacctgaggctggataatttgtaaagagaaaaggttcatttggctcacaattctgatgtctggaaaggttcaatattgggcatctggtggtctcaggctgcttccgcacatggcagaaagtagaaggttagggagagcccatgtgtgcagagatggcatggtgaaagaggaagcaaggggctggggagtgccagcctctttttcaacaaccaactctcgaaggaactttagagaaaacctcactcacccctgaggaagggcattactctatttatgaggaatctgcccccatcactcaaacaccttccattaggccccaactccaacactgggtatcaaatttcaacatgaagtttggaggggacaaatatctaaaccatagcagatggtaaatgaaaatagaaaatagac

SEQ ID NO: 938045 - DNA, 594 bp, Homo sapiens
attcaccttgctgtactgtaaaattctgcattattaacattccaaaatccttccactcttgtacgtgtcttagatgggagtgaatatttgagaattcaaaaatgtggagaggatggaggtggcagaagtttattaaattggcccagggcagttttgaaatttgaaagtttctcacactctctggctctgagccaactcgcagccgactcggctgaacagcctgtgtaagggtttctcatcaggtacccctctttccatccttatggaagctgacaagcaagtgtggttgagtaccaagggaggactccagacttctccaggtccatctggactccggggcacaccagaaacaaggcacagaaacataaggaagatactcaagatggcttcacagcaagtgtatcaaatattggttaaattaatgaataatttttaaggcaaataattccaasgcaacttctttttcacgtgagtcagcaatgaaaactcagcagtttcttcctcctctgatctggctgatgtaagctaactgacccattggatagcaaaagatttgggggttttgtttttgtttttctctgttttagaaaaaaa

SEQ ID NO: 938046 - DNA, 554 bp, Homo sapiens
aaacatgcgaggttaaaaagcatttttccccattggtaaagatgataagatgaagcagagggtcagagaaactgggtaatgcactcgagctaaggaatttagtaagtggaagagctggagtttgagtccaaatctaccttaactccagtgcccaagctcttaaccatgattctgttccatgaccaaaggcattttggaatctctgatatactgaacacgggatgttaacttctggctctactgctcgctgcagagcagttgtgtgaccttgagtttgtcactttgcctctctgggtcatctgcctgcctcacagagtggtggtgaygctctcagaggtaaaggctgagactgctcttcctaatgagtaaatgaaactgtacaaatggaaaaggcaatcaaaatgagctttactatcaggaacaggatggcacagcagttaacatctgggaagcagcagcagcaactgcaaaaaggaatggcttttgagaaatgccagggaagcaggctgtatttgagcccacgctctgggacagctacaaagcagagagggtgt

SEQ ID NO: 938047 - DNA, 584 bp, Homo sapiens
ctagatccctgaggaattgccacactgacttccccaatggttgaactagtttacagtcccaccaagagtgtaaaagtgttcctatttctccatatcctctccagcacctgttgtttcctgactttttaatgattgccattctaacttgtgtgagatggtatctcattgtggttttgatttgcatttctctgatggtgccaactaaggaawtaaaacagggttttacaagagagtgacagggtaaaaacaacaaatgcatttgcttacctgtgtatgtgaggttttttaaaattttgaaatataagtatgatcagttgtacagatgttattttgggaccaagttactcatcaaaaatgacattcctgagactgaagttgctttcaacataataacaaattttaactcttccttcatattcatatgaaagccaagaacattctaatacttaaaaaaaaccctaaaattccatttaatgttgccatctagataaattgtcgcaattatgggtaaacaatggtgcaggtagcaacctcctggagggctgaaaaaaagaggttgagaatagtctgttctgtcaggcttt

SEQ ID NO: 938048 - DNA, 778 bp, Homo sapiens
ctttccagaagccccagcaaaggtctttttatatctcactggcctgaattaaggtcacctgttcatcactgatctagtcaatgtctatggggataagcgtgtgccgggcttaagccaagttacccctggatgtaagagtggagtcagcttccttatgtggttacacataagagaatacgcatcctgttactaagaggaaagagaaagactgttgggcagtcaaaaccaacaaaaattcactgcatgatgctgaccacattcaactacttctgtattaatactttggttagtacactaatgaaaatttctgtataaattaatrttcacacaaaaacttgtacatgaacattcatggcatcaatattttttgtttgtgtgtccattttttaactcaaagactttgttttattacagtgcatagactgggatcgatgggaagatgtagatgtcgtgggcaaccatggttagcatcgttagcccatccccatcgtcatgaatgtatcaaagatgcctctactctgcatcatggttttcccaatgccgcccatcacctcctgatcctgcatcccaatcctgagacagagggtgctgaggagcaccgtggccaccatggccactgttcaacccattatcaaagcctatctccatgcagtcaaagcagcctggctgagactgtccctagggacccacaaccactggcatctcgctctcagccttggtcgctcagctctccatagcattgaattcataatagccaaaaagtggaaacaattctagg

SEQ ID NO: 938049 - DNA, 600 bp, Homo sapiens
ttttacaaccatcacctcctggttggaggccaaccaacacagtccattaaagcacctctaggtagaataatattgtgcccaggaagcagaaaataaatgaatgacttcagctatcaccactgcctgcaacaccatggctaaccagaggttctgagtctgtccacatgaaaagttcaataaaattataaccagctttaaaggaagccagcacactaaacctatctacaattaagaaatcacacagagtctatgtcactttcctgacacctccagcagagctggtgctggtacccactgctggkagatttgaaaacaggttacatcagtggatcccttgaagacattgcccagtgccagcacagagtgtggcagccccactggatggctagacaaggagagcaagagcagtcactgtagtctggttgtcagaaactcctacacctaggagaagagggagagcacatcatgagaaaaccctgtgggataaaggaatctggatggcagtccttgagttccatatctttccactgctaggaagtttcttatagcagagtcacaattgaagtgctaggcacagccaggaaagtctgcatctctacc

SEQ ID NO: 938050 - DNA, 600 bp, Homo sapiens
ttttacaaccatcacctcctggttggaggccaaccaacacagtccattaaagcacctctaggtagaataatattgtgcccaggaagcagaaaataaatgaatgacttcagctatcaccactgcctgcaacaccatggctaaccagaggttctgagtctgtccacatgaaaagttcaataaaattataaccagctttaaaggaagccagcacactaaacctatctacaattaagaaatcacacagagtctatgtcactttcctgacacctccagcagagctggtgctggtacccactgctgggagatttgaaaacaggtyacatcagtggatcccttgaagacattgcccagtgccagcacagagtgtggcagccccactggatggctagacaaggagagcaagagcagtcactgtagtctggttgtcagaaactcctacacctaggagaagagggagagcacatcatgagaaaaccctgtgggataaaggaatctggatggcagtccttgagttccatatctttccactgctaggaagtttcttatagcagagtcacaattgaagtgctaggcacagccaggaaagtctgcatctctacc

SEQ ID NO: 938051 - DNA, 600 bp, Homo sapiens
ttttacaaccatcacctcctggttggaggccaaccaacacagtccattaaagcacctctaggtagaataatattgtgcccaggaagcagaaaataaatgaatgacttcagctatcaccactgcctgcaacaccatggctaaccagaggttctgagtctgtccacatgaaaagttcaataaaattataaccagctttaaaggaagccagcacactaaacctatctacaattaagaaatcacacagagtctatgtcactttcctgacacctccagcagagctggtgctggtacccactgctgggagatttgaaaacaggttacatcastggatcccttgaagacattgcccagtgccagcacagagtgtggcagccccactggatggctagacaaggagagcaagagcagtcactgtagtctggttgtcagaaactcctacacctaggagaagagggagagcacatcatgagaaaaccctgtgggataaaggaatctggatggcagtccttgagttccatatctttccactgctaggaagtttcttatagcagagtcacaattgaagtgctaggcacagccaggaaagtctgcatctctacc

SEQ ID NO: 938052 - DNA, 733 bp, Homo sapiens
aagcacctgtatgagctcatctgcctgcatcaataggactgaaaaagaccactggatttagccacatggaatccatcagggatctttgatgagagcagacacaaagacctgattggagtgggtacaagagcgaatggaagaagaggaattagagatgagtattccacacctctactgaggaatcttactattgagtgatgcaagaaatggagtggtaggtaggkagagggggatatagcacacacacacacacacacgtatacacacacacatataatttgagatgagaaaaatacatgttactatgctaatgggaaagatccagtagacgaaaaaaaaaataaatgcaggaaagagaacaactgtaggaattatgccctagtttaaggatgggatctaatacactagaggacgacttgatcttaggtaagagaacaaagtgtcaaccatagcaacagaaagaatgcaagaataagatgcacagagaagaggaattatcttctgattccttttttaaaaaaattatttttttgagaccacgttatgagactcatttttttttgcatttttggtagaaacagagttttgccatgttgcccagactggtctcgaactcctgggctcaagaaattcgcccacccagcctcccaaagtgttgagattaaaagtgtgagtcactgcacctggcctcttctgattccttttcttgttctcagttaactaggaaataagg

SEQ ID NO: 938053 - DNA, 733 bp, Homo sapiens
aagcacctgtatgagctcatctgcctgcatcaataggactgaaaaagaccactggatttagccacatggaatccatcagggatctttgatgagagcagacacaaagacctgattggagtgggtacaagagcgaatggaagaagaggaattagagatgagtattccacacctctactgaggaatcttactattgagtgatgcaagaaatggagtggtaggtagggagagggggatatagcacacacacacacacacacgtatacacacacacatataatttgagatgagaaaaatacatgttactatgctaatgggaaagatccagtagacgaaaaaaaaaataaatgcaggaaagagaamaactgtaggaattatgccctagtttaaggatgggatctaatacactagaggacgacttgatcttaggtaagagaacaaagtgtcaaccatagcaacagaaagaatgcaagaataagatgcacagagaagaggaattatcttctgattccttttttaaaaaaattatttttttgagaccacgttatgagactcatttttttttgcatttttggtagaaacagagttttgccatgttgcccagactggtctcgaactcctgggctcaagaaattcgcccacccagcctcccaaagtgttgagattaaaagtgtgagtcactgcacctggcctcttctgattccttttcttgttctcagttaactaggaaataagg

SEQ ID NO: 938054 - DNA, 733 bp, Homo sapiens
aagcacctgtatgagctcatctgcctgcatcaataggactgaaaaagaccactggatttagccacatggaatccatcagggatctttgatgagagcagacacaaagacctgattggagtgggtacaagagcgaatggaagaagaggaattagagatgagtattccacacctctactgaggaatcttactattgagtgatgcaagaaatggagtggtaggtagggagagggggatatagcacacacacacacacacacgtatacacacacacatataatttgagatgagaaaaatacatgttactatgctaatgggaaagatccagtagacgaaaaaaaaaataaatgcaggaaagagaacaactgtaggaattatgccctagtttaaggatgggatctaatacactagaggacracttgatcttaggtaagagaacaaagtgtcaaccatagcaacagaaagaatgcaagaataagatgcacagagaagaggaattatcttctgattccttttttaaaaaaattatttttttgagaccacgttatgagactcatttttttttgcatttttggtagaaacagagttttgccatgttgcccagactggtctcgaactcctgggctcaagaaattcgcccacccagcctcccaaagtgttgagattaaaagtgtgagtcactgcacctggcctcttctgattccttttcttgttctcagttaactaggaaataagg

SEQ ID NO: 938055 - DNA, 563 bp, Homo sapiens
ctggtctcgaactcctgggctcaagcacttctcttgccttggcttcccaaagcactgggattacagatacgagccaccatgcctggccgaaaaagaagaatcctaaacgattaatatccagaatatgtaaagaattcataaaactcaacaacaacaaaacccaattttaaaaaacaggcaaaggacttgaaaaaacctttctccagagaagatacacaatggccaataagcacatgaaaagatgctcaatatcattagttaatagggaaatgcaaatcaaaatcacaatgagataccacttcacatgcactaggatggctataaaagaaaaraaagaaaacaacaagtgttggcaaggatagagggaaattggaattgtcgtacactgctggtgggaatgtgaaatgatgcagccactgtggaaaacagtttggcagttcctcaacgtgttaaatgtagaattaccacatgacctagcaattcaatgcctaggtatatacctgaaagaaccaaaaggattcaaacagatacttatgcattcatttttacagcagtgttattca

SEQ ID NO: 938056 - DNA, 829 bp, Homo sapiens
agtgctgggattacaggcatgagtcaccgtgcccggccaactttgatcttaatataatactatgctatatgaactttgtgcttcatccaaattttactcctagttattcattgtcattccggagaatgtgtatagtttctgcattttcctttctgaacttttattcatgttatttcttccaactagaatgcccttgtgcctcttcttgtaagtagaaacctttctcccctttgaaatctgtatctctcactgcacttactagaaacctctttgaattactgtagttatttatgttcacaccttatatccatacccctttaataaattgtacattccttgaaggttggtacaagccttcttcatcacggtcatctgtataggacttcctacgctgtattatacaygataggtacacaataaatagctaaagaatatttcattttaacaaaatagtaattatgaaaaaattgtttatagaaatacaaaatgctatgtccatacacagatttttttaaaaaaattttttgagaccgagtctcactgtggcccatgctggggtatagtggcgcaatcttggctcactgcaacctccgccttccaggttcaagcaattctcgtgcctcagcctcctgagtagctgggatgacaggcatgcgccaccacgcccggcgaatttttgtatttttagtagagacggggtttcaccatgttggccaggctggtcctgaactcctggcctcaagtgatccacccgccttggcctcccaaagtgctgggattacaggtgtgagccactgcacccgacccatacacagaatttgatcaattt

SEQ ID NO: 938057 - DNA, 743 bp, Homo sapiens
tcattagttgattacataacaaatatcagtgggctgggcgtggtggctcaggcctgtaatcccagcactttggaaggccgaggtgagtggatcatgaggtcaggagatcgagaccatcctggctaacacggtgaaaccccgtctctactaaaaatacaaaaattagccgggcgtggtggtgggtgcctgtagtcccagctactcgggaggctgaggcatgaacccaggaggtggagcttgcagtgagccaagatcgcgccactgcactccagcctgggcgacagagcgagactccttctcaaaaaacaaacaaacaaaaacaaatagcaagcatgaagttgtgtgcctgagtgaagccctagcaaaggaatcaaagagcaaacttttacatgcaggtcagcaactgttggtgtgctccacggggaatttaccttcagggcacactcgggcccccactgtgccaccatcactgcygacctccctgcccaggggaatccgctcccaggcggattctccctccttatgccacttgtccttcccaccttccatttacttatgtgtgtcaacacaaagctgtccactgactctctcctttgttctggagatatcattctgggaataaaaaggagagtggatgggccataaacagtgtgtgggatggaaagtatcagacaatttagatgtctgtgaggccaggggaagcctcctctttgggggcaaggacactggctcagtccaggctg

SEQ ID NO: 938058 - DNA, 739 bp, Homo sapiens
ataaatggaaagacaaacttatcccttagtctaaagcagggatcagcaaactatggcctgtgggccaaatggtctgcttccattttcgtaaatatggttttattggaatgcagacatactcattcacttatgtactatctatggctgcttttgctaaatattgaagttgattaattgcaatagagaccgtatggccaaaagctgaaaatattttccatttggcgctttactgaaaaagattgccaatccctggtctccaggattgtcagccttatagtatgagtatattacaaattttaaatgataattatcataacaacaaaaaattagaataaggtttagtaaaaattaatttgggctyagtacttgggaatacatagtttcctgaagcaagtatttcagggagactgaaggttaaatgtatgaaagattttaggtcttaggatggcgactgtaaggcaagataacctttgggggaaaaagaaactgagaagagctgcttaagggccaggtgcagtgcctcatgcctgtacttccagcactttgggaagccaaggtgggtggatcacctgaggtcaggagttcaagaccagcctggccaacatggtgaaaccccatctctactaaaaaaaatacaaaaattagctgagcgtggtggtgcacaccctgtaatcccagctacttgggaggctgaggcagaagaatcgcatgaaccggggaggcagatgttgcagtaagc

SEQ ID NO: 938059 - DNA, 739 bp, Homo sapiens
ataaatggaaagacaaacttatcccttagtctaaagcagggatcagcaaactatggcctgtgggccaaatggtctgcttccattttcgtaaatatggttttattggaatgcagacatactcattcacttatgtactatctatggctgcttttgctaaatattgaagttgattaattgcaatagagaccgtatggccaaaagctgaaaatattttccatttggcgctttactgaaaaagattgccaatccctggtctccaggattgtcagccttatagtatgagtatattacaaattttaaatgataattatcataacaacaaaaaattagaataaggtttagtaaaaattaatttgggcttagtacttgggaatacatagtttcctgaagcaagtatttcagggagaytgaaggttaaatgtatgaaagattttaggtcttaggatggcgactgtaaggcaagataacctttgggggaaaaagaaactgagaagagctgcttaagggccaggtgcagtgcctcatgcctgtacttccagcactttgggaagccaaggtgggtggatcacctgaggtcaggagttcaagaccagcctggccaacatggtgaaaccccatctctactaaaaaaaatacaaaaattagctgagcgtggtggtgcacaccctgtaatcccagctacttgggaggctgaggcagaagaatcgcatgaaccggggaggcagatgttgcagtaagc

SEQ ID NO: 938060 - DNA, 590 bp, Homo sapiens
gactgaaagcttttcccttaagattgagagcaagatggggacgttcgctgtccttccttctcatctttatacttgagggcctggaaagtgcaatcaggcaaggaaaagacatgaaaggcacattagtgggaaaagtgaaataaaactgtttctagtcacagataacacgcttttctatgtagaaaagtccaaggaaaatacgagttactagaaatgaatttagcaatttcacagaaaatatacagtcaatacaaaagaaatcgattgtatttttaggtactagcaataaccaatcagaaatttttaaaaattttaagcaccatttacaatattaccaaaatatgtaatactcaggcataagtctaaaaaaattatgttttgtgtggaatctttatgctgaaaactacaaatcactgattaaagaaatcaaagactaaactttggttaygaattggaagacccaattttcttaaaatgtcatctctcctcaaactcatctatgaattcagtgtaatcccaatgaaaatcccagcaggttttttttttaaataaattgacaggctgaaatatatatatggaaagacattcta

SEQ ID NO: 938061 - DNA, 715 bp, Homo sapiens
atctcacgatgtgtttccataaatctgctcaatttataatctcttgcgtgtgagtttgcgcctctttccatgtatgtttccagtctgcacacatggatggcgctgcacacatagatgtgtggtggcctcattagccagtagctactctgagaccctggacatgcccgcctgcattgggatattgctatcgtattgaactgcttgctagaaaatggtcttggaatctcacaagggacatctattcctgatggagtgtgcagttttaataatgacttaagtcaatacaatgttgacagggtagaaatgacttatcaaagacacatacctcttaagtgcccgttctgtgcaggcacccrgcaagggctgaatttgcaagggcaactaaacagaaagggtcctgccttaagaaacttatagtccagagcaggggccaccaagcttttttccatcaagggccagacaggggcttttgggggctctgtgaaagctgccatagatagtacatagaggagtggggttggctggttccacgaaaactttatttatgaaaacaagtgctgtgtgcagtggctcacacctgtaatcccagcactttgggaggctcaggcaggtggatcacttgagttcggtagttcgagaccagcctgggtaacatggcgaaaccccatatctacaaaaaaatacaaaaattagctgggtgcggtggtgcacgcct

SEQ ID NO: 938062 - DNA, 677 bp, Homo sapiens
gtcttttaaaaataataataggctggcatggtggttcatgcctataatcccagtactttgggaggctgaggcaggcagattccttgagcttaggagttcgagaccagcctgggcaatgccatctctactaaaaatacaaaaaattagccatgggtggtggtgaatgcctgtggtcccagctacttggaaggctgagatgggaggatcacttgagcccaggggcggagcttgcagtcagccgagattgcgccactgtactacagcctgggtgacagaaccagatcttgtccaaaaaaaaaaaaaaaagtaataataatacccctctccctccccctctcccctttgcacggtctctccctctgatacctagccgaggctggactgtactgccgccatctcggctcactgcaacctccctgcctgattctcctgcctcagcctgccgagtgcctgggattgcaggcgcgtgccaccatgcctgactggttttcstattttttggtggagacggggtttcgccgtgttggccaggctggtctccagctcctgaccgtgagtgatctgccagcctcagcctcccgaggtgccggattgcagacggagtctcgctcactcagtgctcaatgttgcccaggctggagtgcagtggcgtgatctcggctcgctacaatctccac

SEQ ID NO: 938063 - DNA, 715 bp, Homo sapiens
tcaaggtctggcgaggaccccttcctggttcctagatcacttcttcatgctgtgtcctcacagggtggaaggcatgagggggctctggggggcctcctttttaaaggcactaactttggccgggtgttttggctcacgtctgtaatcccagcactttgggaggccraggtgggcggatcacctgtagtcaggagttcgagaccagcctggctaacatggtgaaaccttatctctactaaagatacaaaaattagctggacgtggtggagcatgcctgtaatcccagctacccgggaggctgaggcaggagaatcacttgaacttgggaggcagaggttgcaatgagccaagatcatgccactgcctcccagcctaggcgacagagtgagacttcgtctcaaaataaaataaaatacataaataaaagcactaacccattcccgagggctccaccctcactacccacctaagcacatgccgaagccccacctcataatgtcatcacattagggattcggtttcagcatatgaactgggggagggggcacaaatgggggaaactggctccactgtgtgaaaattgtcaatactaaggcagagtcacttatgtcaggacccaagcaaaacggagctgggaggcctcaacggaaggtccctcatgctcgggtgcctatgatgagaactgttacagggactccgacagcacacaacattc

SEQ ID NO: 938064 - DNA, 763 bp, Homo sapiens
aatacattgagctttgctcctgtaaaagtgcctctgagtaaccttcggcagacaagagagggatcaccttcaaagaactcaaccaagccatttgctcatccccatcttcccccacacccgctccgctcccgcagtctaaaccaaaccctacgtctgcctttggacgccctctggtggcgctttaggataatgaccacacaaaagtgcagaaggagttgggggtaggctctttattagacggttattgctgtactacagggtcagagtgcagtgtaagcagtgtcagaggcccgcgttcagcccaagaatgtggattttctctccctattgatcacagtgggtgggttkcttcagaaaagccccagaggcagggaccagtgagctccaaggttagaagtggaactggaaggcttcagtcacatgctgcttccacgcttccaggctgggcagcaaggaggagatgcccatgacgtgccaggtctccccatctgacaccagtgaagtctggtaggacagcagccgcacgcctgcctctgccaggaggcctggaaatagaagaaactcctggttggcacaggggataggggaaaaaggagcgagggattgggagcagaatcagaagttcaaagcttttgtgatcaaaggtgcaatgagcggatgatggtctcagaatcaaagagctgagatgggagagcaacagggcatctgctcagcttccatggatattcctgactctctgggaacaccatgaccatcagctgta

SEQ ID NO: 938065 - DNA, 592 bp, Homo sapiens
gtacaatggtttatggcttccaaaggccacagtacatttaaaagatagtcggccaagtgtggtggctcacgcctataatcccagcactttgggaggccgaggcaggcagatcacctgaggtcaggagttctagaccagcctggccaacatggtgaaaccctgtctctattaaaaatacaaaaattagccaggcatgatggcgggtgcctgtaatcccagctactcgggaggctgaggcaggagaattgcttgaacccaggaggcagaggttgcagcragccaagatcgcgccactgcactccagcctgggtgacagagcaagactccatttccaaatgaatgaatgaatgaatgaatgaatgaatgaatgatatatagtaggtctgtggtattacactttctttggagtgggaggtgattaggaaaaactgtctaaaaaggctcctcaggaggggtgataaaaaaaaaaaggtcaagaaacactggattaaggatacagcaaaatgctcacatctcccatgagaaaagtaggttacaaaatgaaaaagcatatgcagtccaaaagtctatttcataatggtgactaattatt

SEQ ID NO: 938066 - DNA, 597 bp, Homo sapiens
gtttcaccatgttggccaggctggtcttgaactcctgacttcaagtgatccacccacctcagtctcctaaagtgttgggattacaggcatgagccactgtgcccagcctattttttggttcttaattgtagtttttattttttattgasacagggtctccactctgtcacccaggctggagtggaatggtacgatcgtagctcactgtagcttcaatcctttgacctttcgagctcaagtgatcctcccacctcagcttcctgagtagcagggactataggcatgcaccacgaagcctagctaatttttttttttttttctgtagaggtgggggtcttgctatgtggcccaggctggtcttgaactcctgagctcaagggattctcctgcctcggcctcccaaagtgctgggattacaggcgtgagctaccgtgcctggcaaaataagacttttataacaccattctcaactattaaatgttggtgactaactagaaaaaaatttaaactccatttaatgagacatgcattttgttctgtatgtataatgtatttcaggtaacatgtaaaaacaaaccttgtgggtaatttaaatat

SEQ ID NO: 938067 - DNA, 483 bp, Homo sapiens
tatttcagcttcagagatgccagcgatgcctctccagaaggaaggaagacaaggagaagggggctggaaatggatgggagtaggggtggagtttctctgaagtggatcctgtggaccagatcctcaggcaggagacccaggtcaggccctgtgagtccagagtgagctggtttgtgcccgagtgagcaagccagggagggccaaaggcctggcttctgagcctaccaggcttcatccagcttcytggtgtctttgtgcctgtcccattttacctccctagattctcagtaaatctctcagtgtttttctgctgggcccaggggactcaggaaagagctaaaaactcacactgatcctttgtggggagtgtttgcagcaggaggtgtatcaggagaaccctaagggtccgtgagctcgagagccccaagcagctcggtattgccaaaatgactgaccagggtttgaattggcttccactgctta

SEQ ID NO: 938068 - DNA, 605 bp, Homo sapiens
tataacaaaaataccataggctaggtggcttataaacaacagaaaattatttctcacagttctgaaggctggaaagtctaagaccaagttgccagcagactcagtgtctggtgagggcccacttcctggtttatggaccgccatcttcttgctgtatcctcacatgatggaagggataagggacctctctggggtcttttttataagggcactaatcccactcatgaggattattccctcatgagggtcatgccctcttgacctaactaccttccaaagaccccacctcctgataccattaccytggagttaggttttaacacatggattttggagggacacagacattcagtctacagcaaaagcctaagcaattgcagcttaatagctagagtcaggtctgagttccaatattcttctgcctcttcccacttactaaattatacctgtaagtataataataataatactgacttcttaggattgttgtgatttttagcatgaaataatatatgtgatatgcctggcccagagaagacaagcaataaagagcagtgtgtgtgtgtgtgtgtgtgtgtgtgtgtgcgtgtttgtttgtgtgtctt

SEQ ID NO: 938069 - DNA, 611 bp, Homo sapiens
aaggagctgggagggcagattgaggaaaggcattacacagaggcaggagcacagcctaggcaaaagcctagaggtaagaggtatagcatctgcaggagaaatggcaggatgccagtcaatgaggtgcaaagggcgtgtgcatggagggtggggccaggcccacagagggcattgcaaggcggaccagcccagtccagttcctggggcctgagagggctctgaagaaatgcccaaggtggcatttcagggagattagtcagactgattggacagacgtgcttgccttgcaacactttcctgccttcaaaccacaagcagtattttaaaaattaatcttgtgtcttaccaatattatgtacatagttcaaaaagtcagatagttctacaaagcccattccccagccccatttccctccacgcccaaatcttascacccagagacagccactgttcaatatttcttccagtatttaagtccgtgcttctaaatattatgtctacatgtctctttcttaattttttcattagttatatggcctactgactttccattacaaaagagaacgacttagctctcttctgtcatggaaacactttacctttcccaactt

SEQ ID NO: 938070 - DNA, 556 bp, Homo sapiens
tttacctaagtgagcctgggcaatggtgggcgcccctcccccagccttgctgctgccttgcagtttgatctcagactgctgtgctagcaatcagctagactccatgggcataggaccctccaagccaggtgcgggatataatctactggtgcgtcgtttcgtaagcccatcggaaaagcgcagcattcgggtgggagtgaccccattttccaggtgccgtctgtcacccctttccttgaccacgaaagggaactccctgaccccttgtgcttcccaagtgaggcaatgcctcrccctgcttcggctcgcacatgatgcgctgcacccactgtcctgcgcccactgtctggcactccctagtgagatgaacccggtacctcagatggaaatgcagaaatcacctgtcttctgcgtcgctcacgctgggagctgtagaccggagctgttcctattcggccatcttggctcctccttccaattttagatctttcctgctttcctcacctccatgtcctggagtcattctcaaggatagcattatctttattatcgtcat

SEQ ID NO: 938071 - DNA, 631 bp, Homo sapiens; identical to SEQ ID NO: 931875

SEQ ID NO: 938072 - DNA, 718 bp, Homo sapiens
cacaaagatgacacgcaaattcgtgaagcattccatacaaaacatcagagttatttttttaaaaatgttttttaaaaggaatgcttctggaagaaagggagggaaagagacagggagagaaagagaggagggaaaagggggaaggaggaattccaaccacacattgactaagtctttgtgtgactttatgttgaaaagagccttctaccgggcagggcgcggtggctcacgcctgtaatcccagcactttggaaggccaaggcgggtggatcacaaggtcaggagatcgagaccatcctggctaacatggtgaaaccccgtctctactaaaaatacaaaaaattagccgggcgtggtggcgggcgcctgtagtcccagctactcgggaggctgaggcaggagaacggcatgaacctgggaggcrgaggttgcggtgagccgagatcgcgccactgcactccagcctgggcgacagagccagactccatctcaaaaaaaaagaaaagaaaagagcctcctaccaaccttttcctctgcaaggccgcaccacttccattatcattctaccatcactgggcaccatcactgtgaagctgccatgtcataatggctaccaaaaaaagggcttgccatctgcctttgaagaatagcctgccttgtgtttgacactataaagacctgaattctactcccagcatccacatttagttttccactg

SEQ ID NO: 938073 - DNA, 832 bp, Homo sapiens
aactctttatctacttttcagtgggtattttcagtaaacttttgctggagaggaagaaagttccttataagcaaatgaatctttgggaagatatagtttattgcatatcaagtatttgaacagtgcagtcatgaactggaatgaaattttagtttcaaagcaattttaaaggtttatataaaaagggctttcattagatttgattgtattaaatcttaaatcactgaatgatttaaaatggatagttatagaaactgatattaatacaatttactgacagtaactaagttgaatataacagttaccttgttttactattttttactcaatttagaataaaattcacctaaattcctctgtctttgccccatagcttgctcagtatgaaccacctcaggaggagaagcgtgckgaataggattcttctcagtttgaaagacaatgaaaaatggttttgtatgacttgaatagtttgtatagtatataatcttttctgaacagatgctatagaactcttttaatatgtttaattcacctatcacactctgttaaaaacacatagaatcatcaataaaaactcaatataactttctttgggtcttaaagcaggagaatccaaagtaaatcctgaacaaaacctaaacacagccatctaactcattaccttaaaagacattctgtttattagtctgattaggaatgatggcactggttgtattttagccaagacagtttagcatggagctattccttggtgcagttcaggatatgaacacaggtacagtcattctttgaaggtgacactgttctgtatattccctataggcagctg

SEQ ID NO: 938074 - DNA, 560 bp, Homo sapiens
acaccctctctgctttgtagctgtcccagagcgtgggctcaaatacagcctgcttccctggcatttctcaaaagccattcctttttgcagttgctgctgctgcttcccagatgttaactgctgtgccatcctgttcctgatagtaaagctcattttgattgccttttccatttgtacagtttcatttactcattaggaagagcagtctcagcctttacctctgagagcrtcaccaccactctgtgaggcaggcagatgacccagagaggcaaagtgacaaactcaaggtcacacaactgctctgcagcgagcagtagagccagaagttaacatcccgtgttcagtatatcagagattccaaaatgcctttggtcatggaacagaatcatggttaagagcttgggcactggagttaaggtagatttggactcaaactccagctcttccacttactaaattccttagctcgagtgcattacccagtttctctgaccctctgcttcatcttatcatctttaccaatggggaaaaatgctttttaacctcgcatgtttatgctg

SEQ ID NO: 938075 - DNA, 590 bp, Homo sapiens
ttttttttctaaaacagagaaaaacaaaaacaaaacccccaaatcttttgctatccaatgggtcagttagcttacatcagccagatcagaggaggaagaaactgctgagttttcattgctgactcacgtgaaaaagaagttgcsttggaattatttgccttaaaaattattcattaatttaaccaatatttgatacacttgctgtgaagccatcttgagtatcttccttatgtttctgtgccttgtttctggtgtgccccggagtccagatggacctggagaagtctggagtcctcccttggtactcaaccacacttgcttgtcagcttccataaggatggaaagaggggtacctgatgagaaacccttacacaggctgttcagccgagtcggctgcgagttggctcagagccagagagtgtgagaaactttcaaatttcaaaactgccctgggccaatttaataaacttctgccacctccatcctctccacatttttgaattctcaaatattcactcccatctaagacacgtacaagagtggaaggattttggaatgttaataatgcagaattttacagtacagcaagg

SEQ ID NO: 938076 - DNA, 577 bp, Homo sapiens
gggcaggatacttcttccattattgcttggggtcagcagagctctgtgtcctgggcagaggaatatgagacaggggacaatgtccttacattcagatgttcagatacccatcagaatattatagagaaaccatagaaagttcaggggttcagggagaccccctaggataggagtcacagcccattctctgcaagcttctattcctggtgacctgcaaggccctgcctgatctccatactgcctgaaccaacatttctcattcatctttgtgccacccccttcacgcactaagtccagacacactgaccttctttcttttcctctctcctatctcatggtcttcacacttgcagtcagttctgcctgaaagaattgcttttcacccagaccttcctcccatasctggctcattttcatcattcaagtctcatctcagaagcctctggctgggcgcggtggctcatgcctataatcccagcactttgggaggctgaggtgggcagatcacttgaggccaggagtttgagactagcctggtcaacatggtaaaaccccatctctactaaaaatacaaaac

SEQ ID NO: 938077 - DNA, 552 bp, Homo sapiens
gaagaagccagggaaagaaggaagtgccatgctcttttcaacaaccagctctcagggaaacaaatagagtgakaactcactcattaccatcaggaaggcaccaagccattcatgagggatctgcctccatgacgcaaacatctcccattatgccccacctccaacactgggaaccaaatttcagcatgaggttttaggagacaaacatctaaactatagcattcttcttctagcctcccaaatctcatgtcctcacatacaaaatacaatcgttctatcccagtagtccccaaaagtcttgttccagcatcaattcaaaagtccgaagtctcatttgagactcaaggcaagtttcttacagctatgagactgtaaaataccaaacaagttatttacttccttccaagatataatggtgggacaggcattaggtaagcactcccatttcaaaagggagaaatcagccaaaaggaatgggtgcaaggtcccaggccagtgcaaaagccagcagggaagacattaaactttagaactccaaaataatcctcaact

SEQ ID NO: 938078 - DNA, 552 bp, Homo sapiens
gaagaagccagggaaagaaggaagtgccatgctcttttcaacaaccagctctcagggaaacaaatagagtgataactcactcattaccatcaggaaggcaccaagccattcatgagggatctgcctccatgacscaaacatctcccattatgccccacctccaacactgggaaccaaatttcagcatgaggttttaggagacaaacatctaaactatagcattcttcttctagcctcccaaatctcatgtcctcacatacaaaatacaatcgttctatcccagtagtccccaaaagtcttgttccagcatcaattcaaaagtccgaagtctcatttgagactcaaggcaagtttcttacagctatgagactgtaaaataccaaacaagttatttacttccttccaagatataatggtgggacaggcattaggtaagcactcccatttcaaaagggagaaatcagccaaaaggaatgggtgcaaggtcccaggccagtgcaaaagccagcagggaagacattaaactttagaactccaaaataatcctcaact

SEQ ID NO: 938079 - DNA, 617 bp, Homo sapiens
tctgagtagataacaagaaagtgtaagggaattgatctagataagttcgtttacttaggccttggaacctggcctttaatcatctgcacaggattgctctctgggggtgggggtgagggggtgggggggggcgaccatgttaattacatgcaagtgtgttgattcaaggcctttgtcattaaatctgtacagaataaatgcccgcagtgccggcttgtcgggccacggctgctacaactctttctgtgagcggcctggtcccctagtccactctttcactggttacatgtatctgagtgcattttttcatccgtctttcagccagggtctgtgggtcagatctggcagtgtgatgcctccagctttgttcttttgcttaggatggttttggctatacaaacttttttggttccatattaattttgtagtagttttttttttcctaattctgcagrgaaagtcaatgtagcttaatgggaatagcattgatctacaaattactttgggaattatggccattttcatgatattgattcttcctatccatgagcatggaatgtttttccatttgcttgtgtcctctcttatttcattgagcagtagtttgtagttctcct

SEQ ID NO: 938080 - DNA, 687 bp, Homo sapiens
accttatttcagcaagctgatcttcaatctcgatattctttcttccacttgatcaattcagctattgatacttgtgtatgctttatgaagttctcatgctgtgtttttcagctccgtcaggtcatttatgttcctctctaaactggttattctagttagcagtttccgtaacattttatcaatgttcttagcttccttgcattgggttagaacatgctcctttagctcagaagagtttgttattacccactttcagaagcctacttctttcaattcatcaatgtcattctctgtccttgctggagagaagttgcgatcatttggagcagaagactcattctggttttttgaattttcagcgtctttgcactggcatttcctcatctttgtggatttatctacttttgatttttgaggctgatgacctttagatggggtctttgtgtggktgtcttttttgttgatgttgatgttgttgctttctgtttattattttatgttttaacagtcagatctctcttctgcagatctgctgcagtttgctggtggtccactcctgaacctgttcaccttggtatcaccagtggaggctgcagaacagcaaagattgctgcctgctccttcctctggaagcttagtcccagagggacactggcctgatgccagctggagctctcctgtaagagg

SEQ ID NO: 938081 - DNA, 670 bp, Homo sapiens
aagcttttggctagcgactatggggttttctaagtgtagaatcatattgtctgtgaagaaagatagtctatctttctcttgtgtgattgctctggttaggacttctagtactatgttgaataggagtggtgacagtgggcatccttgtctcagttctcaaggggaatgcttacagttcttgcccattcagtgtgacgttggctatgagtttgtcacagatggctcttattattttggtgtacattttttcaatgtctaatttgttgagggtttttaacatgaagggatattaaatgttactgaaagccctttctacatctatcgagatggtcatgtagtttttgtttatagttctgcttattgaagaattacatttattgatttgcatatgttgaaccaacmtttgacccaggaataaagcctacttggtcacagtgggttagctttttgatgtactgctgaatatgatttggtagtattttgtgtattattgtgtctgtgttcatcagggatactggcctgaaattttccttgttcactttgtctcttccaggttttggtatggggatgatgctggcctcataaaatgagttagggatgagtccctcattcttactttaataaaatagtttcggtaggattggtatcagcagttcttcatatgtctggt

SEQ ID NO: 938082 - DNA, 591 bp, Homo sapiens
gatggcacctggaaaatcaggtcactcccacccaaatactgtgcttttccaaccatcttagcaaacagcacaccaggagattatatcccgtgcctggctcagagggtcccacacccacggagccccactcattgctagcacagcagtctgagatcaaactgaaaggtggcagcgaggctgggggaggggtgcccgccattgctgaggcttgagtaggtaaacaaagyagccaggaagctagaacttggtggagcccaccgcagctcaaggaggcctgcctacctctgtagactccacctctgggggcagggcatagctgaacaaaaggcagcacaaacctctgcagacttaaatgtccctgtctgacagctttgaagtgagtagtggttttcccaggatggagcctgagatctgagaacagacaaatggccccctcaagtgggtccctgatccctgagtaacctaactgggagccaccctccagtatgggcagactgacacctcacatggccaggtacccctctgagatgaagcttccagaggaatgatcaggcagcaacatttgctgttcagcaatatccgctgttctgc

SEQ ID NO: 938083 - DNA, 622 bp, Homo sapiens
tgactaactagaataaccaatatagagaagtccttaaaggacctgatggagctgaaaaccatggcatgagaactacatgacgaatgcacaagcttcagtagctgattcgatcaactggaagaaagtgtatcagtgatggaagatcaaatgaatgaaatgaagcgagaagagaagtttagagaaaaaagagtaaaaagaaatgaacaaagcctccaagaaatatggcactatgggaaaagaccaaatctacgtctgactggtgtacctgaaagtgaccgggagaatggaaccaaawtggaaaacactctgcaagatattatccaagagaacttctccaatctagcaaggcaggccaacattcaaattcaggaaatacagagaacaccacaaagatactcctcgagaagagcaactccaagacacataattgtcagattcaccaaagttgaaatgaaggaaaaaatgttaaggggagacagagagaaaggtcaggttacccacaaagggaagcccaccagactaacaggcgatctctcggcagaaacgctgcaagctggataagggtgggggccaatattcaacattcttaaagaagagaattttcaacccagaatttcatacc

SEQ ID NO: 938084 - DNA, 613 bp, Homo sapiens
caactaactgtctgctctttgacaaacctgaccaaaaaaagcaatggggaaaggacttcctattcaataagtggtgctgaagtaactggctagccagatgcagaagattaaaaatgtacccctttcttacaccatatacaaaaactaactctagatggattaaagacttaaatgtaaaatccaaaacwataaaatcactggaccagacaacctagacaataccatcctggacatagcaacgggcaaagatttcattatgaagatgtcaaaagcaattgcaacaaaagtaaaaattgactaatgggatttaattgaaataaagagcttctgcaaagtaaaagaaactatcaacaaagtgaacagaatgaaagaaaatatttgtaaactatgcatctgacaaagatctaatatccagcatctataagaaacataaacggctggacgtggtggttcacgcctgtaatcccagcactttgggaagccgaggtgggtggatcacaaggtcaggagttcgaggccggcctggccaatatggtgaaaccccgtctctactaaaaatacaaaaattagctgggtgtggtagcgtgcgcctgtagtcccagctactcgggag

SEQ ID NO: 938085 - DNA, 678 bp, Homo sapiens
caggtacttagctgatcaccctgggggatagtgccatatcagggactcagtgttggtctctgttgctaacagattgaacactcagtcatggctgtagtcagatcagcctcggtgagtggaagtccatgatgctgagcccatatataacaaccctgccaccatggccactttattcatgagctcattgggcagttacctgcatggttggagaaaggggctgaacaggtcatcctatctacttggttattaaaatcctcttctgctgaagtcattctttggtggcattcatatgagacacaaatatcctcacatttttcacccattcagaaagatctgtgtatatacctcttccacagaccgttttgtcaccaattttccagtcatgttccttccaagtccctgaccatccagcaaaccagtggccatagctcatgaattgataactaattgtacatctarccatttcttcttcctagtaaagtgaacaaccaggtggtcaaagttctgcccattgggaggatttccctttaccactttctttcagggctgtcccataactttctttctgtaaagaaagttaccactttcttacagggctgctgtagtattgcagttgtccacttccagatggcacctgcgtatcatgcagaactatctgtaaaccagtcctgagttttc

SEQ ID NO: 938086 - DNA, 786 bp, Homo sapiens
agggaagcccatcagactgatagtggatctctcagcagaaactccacaagcaagaagagagtgggggccaatattcaacattcttaagaaaagaattttcaacccagaatttcatatccagccaaactatgctacataagtgaaggagaaataaaatcctttacagaaaagcaaaggctgagagattttgtcaccaccaggcctgccttacaagagctcctgaaggaagcattaaacatggaaaggaacaactggtaggagccactgcaaaaacatgtcaaaatagcaaacatgatgctattaagaaactgcattgggaaggagccaagatggccgaataggaacagctccggtctacagctcccagcgtgagtgacacagaggacgggtgatttctgcatttccatctgaggtaccgggttcatctcactaggcagtgccagacagtgggcgcaggtcagtgggtgtgtgcaccttgcgcaagacaaaccagggcgaggcattgcctcactcargaagtgcaaggggtcagggagtcccctttcctagtaaaagaaaggggtgacagatggcacctggaaaattgggtcactcccacccaaatactgcgcttttccgacaggcttcaaaaatggcacaccaggagattatatcccgcacatggctcggagggtcctatgcccacggagtctcgctgattgctagcacagcagtctgagatcaaaccgcaaggtggcagcgaggctgggggaggggcgcccgccattgcacaggcttgcttaggta

SEQ ID NO: 938087 - DNA, 620 bp, Homo sapiens
catcaaaagataatacaccatgatcaaatggattgtattccagggaagcaaggatggttcaacatactcatatcaggccaggcgtggtggctcacacctgtaatcctagcactttgggaggccacggcgggaggatcacttgagctcaggagttgaagaccagcctgggcaacatagtgagaccttgtctcttaaaaaaaagaaagaaaaaaaacatactcaaatcaacaaatgtaattaaacataaacagaataaaagacaaaaaaccatataattgtccaggtgtggtggctcatgcctgtaatcccagcactttgggaggctgaggtgggaggattgcttgagcccaggagtttgataccagcccgggcaacatggcgaaaccccgtctccacaaaaaaatgcaaaaatcagycaggcatggtggcacatgcctgtagtcccagctacttgggaggctgagttgggaggatggtttgagcctcggaggaggaggttgcagcgagctgagatcgcaccattgtactccagcctgggtgacagagccagttcctgtctcaaccaaacaaacaaacatatcatcttaatggatgcaaaaaaggcctttgataaaattttg

SEQ ID NO: 938088 - DNA, 584 bp, Homo sapiens
atcagatgtagattgggtcttttcacacagtcccatatttcttggaggctttgtttgtttctttttattctttattctctaaacttctcttctcacttcatttcattcatttcatcttccgtcactgataccctttcttgcagttgatcaaattggctactgaggcttgtgcatttgtcacatagttctcgtgcattggttttcagctccatcaggtccttcaaagacttctctgcattggttattctggttagccattcgtctaattttttttcaaggtttttaacttctttgccatgggttcgaacttcctcctttagctcagtgtagtttgatcatctgaagacttcttctctcaattcgtcaaagtaattctccatccaactttgttccattgctggtgaggagctgcattsctttggagaaggaggggtgctctgatttttggaattttcagtttttctgctctgttttttccccatctttgtggtgttatctacatttggtctttgatcatggtgatatacagatggggttttggtgtggatgtcctttctgtttgttggttttccttcttacagtca

SEQ ID NO: 938089 - DNA, 722 bp, Homo sapiens
tgaagaacactggttggggtggctggaggatatagttgggagaaatgagatcagggaactgcttaaaaaaaagcagtctgaccacattttggtaaagcaactgtgttgtgctgggggatcccttccacccccagttggcttcggttctctaaagcctgaaggctggaacagctaaaccactcaaaaagcaaagatggtagccctcttctcccccaaggaattccatcccatataggtgcaatgctgctaccggtggctggctggaattccaagccagggagtcttatcctrcaagttcctgtggaagtgggatttgcaggctttcactgctcagccctttgattcagcctctttcctagaggtatgtacaggggtctaacctcccactttgctggagttgcagctacttttgccaggaagaccagagagcctgagtaaggctcccaggtctccatgtactcctaagtagctgctttgctgagattctatatagttccttgtgtcaaactaaaggcccttgtggagttggttcagaaggaaatctcctgacctgatggttgcaaagatccgtgggagaagtgttggttcccagggtcacacatttactcactacttccctgggcaggagacgttcccttggctccatgtcacttttgaatggtctgtggtcctgccttgctcttctccactttctgcaggtcaacttgtttccttgattactc

SEQ ID NO: 938090 - DNA, 647 bp, Homo sapiens
cattttggtaaagcaactgtgttgtgctgggggatcccttccacccccagttggcttcggttctctaaagcctgaaggctggaacagctaaaccactcaaaaagcaaagatggtagccctcttctcccccaaggaattccatcccatataggtgcaatgctgctaccggtggctggctggaattccaagccagggagtcttatcctgcaagttcctgtggaagtgggatttgcaggctttcactgctcagccctttgattcagcctctttcctagaggtatgtacaggggyctaacctcccactttgctggagttgcagctacttttgccaggaagaccagagagcctgagtaaggctcccaggtctccatgtactcctaagtagctgctttgctgagattctatatagttccttgtgtcaaactaaaggcccttgtggagttggttcagaaggaaatctcctgacctgatggttgcaaagatccgtgggagaagtgttggttcccagggtcacacatttactcactacttccctgggcaggagacgttcccttggctccatgtcacttttgaatggtctgtggtcctgccttgctcttctccactttctgcaggtcaacttgtttccttgattactcctagtgcaa

SEQ ID NO: 938091 - DNA, 714 bp, Homo sapiens
aatgcactgttccttaggctcattccctaatggcttcccttgggtaggggagaaaattccccactacttgcacttcccgagtgaggcaacgtcccaccctgctttggttcaccctccgtgggctgcacccactgtgcaaccattcccagtgaaatgaactgcagaccacagttagaaatgcagaaatcacctacctttttcatcaatatcactgggagctgcagactggtgcagtttttattcggacatattgccagcagtcccaataatgcatctaatacactaaaacagaaaaatcaatcttaacataaaattagtggaataaaagaaattccaaggatcagagcagaaataaatttaaaatacagaaaacaattaaaaagagcaataaaataaaaagttggctttttaaaaaagcaaataaaattgacaaacttttagccagactaagaaaaaaagagagaaaaccaaaataaataaaatsagaaatgaaaaagcagacattacaacatgtattgcaaaaatccaaaggctcattattggctattatgatcaactatatatcaatacattcaaaaatctagaagatatggacaacttcctagacatatacaacctacaaaactgaacaatgaagaaatccaaaacctgaacagacgagtaacaagtaataatattaaagccataatataaaggctctgaggaaataaaaac

SEQ ID NO: 938092 - DNA, 560 bp, Homo sapiens
tgagcagctccgggggtgaggcttgggaggggcttccgtttaaggaaataacaggatgtgaaaattgagaggagcccaggagcccctcagcgctgccgttccctcctcccttccactaacctctttcaacaaccagacggcgcagacctgctgtccacagggtactagtcgggcactggggcatcttcagacatgacagtcatgtggtccccgcccaggatcattgggaaggtattgtgaacaggtagggataagcccaggaccaggagatggggctggggacagaaatgagttgatacctgcctcggtttccctaaagtgcatgtcctcaaaaggtcaaagatataacgaaccgtgaggctgccgagagaaaaatcctcaaggttatatctacttcaataccagggctacaagkaaaacagttttttgttctatccttggggatctcaggtcaccaggatctgatacttaaaggataattactcctcaaaaagccacaattagaactaccataagatccagcaatcccactgctgggtatatatccaaaggatatgaaa

SEQ ID NO: 938093 - DNA, 591 bp, Homo sapiens
attcaaagatgaattgctaccaatcctattgacactattacacatgacagaaaaagagggaatcctcctctaaatcagtctacgaagccagtatcaccctaatatcaaacaggaaaggacataacaaaaaaaagaaaactacagaccaatatccatgatgawcacagatgcaaaaatcctcaacaaaatactagctaactgaatccaacagcatatcaaaaagataatccatcatgatcaagtgggtttcataccaggatgcaaggatggtttaacatccagaagtcaataaatgtgatacaccacataaacagaattaaaaacaaaatcacatgatgcagaaaaagcatttttaaaaaaatcctgcatccctttatgattaaaaccctcagcaaaatcaacatacaaggaacatacctcaatgtaataaaagccatctatgataaacacacagccaacataatactgaatggggaaaagttgaaagcattccctctgagaactggaaaaagaaaaggatgcctaatctcaccacttctattcaacatagtactagaaatcctagccagcaggcatcacagcatgaaacta

SEQ ID NO: 938094 - DNA, 596 bp, Homo sapiens
agcctcttatttggcctgtgcccctggactgtgaccttcacaggtgtttcctagctgcttttgtctccttaaggctagaggtggctgaagtggagggaatacctttctcgaaaggaaaataaatctgaaaggaaaataaatcttggtgccccagaatcactaagctaaagagaaaagtcaagctgggaactgcttagggcaaacctacctctcattctattcaaagtcacccctctgctccctgagataaatgcatatctgatggcctcatttggagaggctaatcagaaactcaaaagaatgcaaccatttgtctcttatctacctatgacctagaagcgccckccctgcttcaaattgtcctgcctttgcctcgagttgtcccacctttccggactgaaccaatgtacatattacacataatgattgatgtctcatatttccctaaaatgtataaaaccaagctgtgctgagaccaccttgggcacatgtcgtcaggacctcctgaggctgtgtcacagatgcacatcctcaaccttggcaaaataaactctctaaactaattgagacctgtctcagacatttgggggtcacac

SEQ ID NO: 938095 - DNA, 753 bp, Homo sapiens
gaggttcagaatgtccacccccagataagcctcttgggcatgttaaacaaaatttatgggtggccattgttttttgttttgttttgtttgagacagggtctcgctcagttgcccaggctggaatgcagtggcacttattgcaaccttgacctcctgggctcaagtcatctgagtagctgggaccacaggcatgcaccaccacatccagctagtttttaaattttgtgtagggacagggtcttgctctgttgcccaggctggagtgcaatggcacaaccayaactcactgcaactttgacctcctggcctcaagtgaccctcccacctcagccttccaaggaagtgggacgacagacatgtgtcaccaccaccatgcccagctaatttttaatttttttgtagagacagggtcttgctatgttgcccaggctggggttcagtggcatgatcatggttcactgctgtctcagactcctgggctcaggtgatcctcaggggccactgttttgaactgggctcctgcgctgggtcctagaagaccagacccaaccagaatggagtcactggtgctaatgaaaccaaggggttcactgatcaggtcagcctgccctgattgctttttgttattttgtttttcctttttccatgaagctgaaggctgtgcctctgaatgctgacgcccacccttcactggctctttatagataatattcacaggtcaccatgggactggtcgcttcaggaatgtggggc

SEQ ID NO: 938096 - DNA, 690 bp, Homo sapiens
cgctagcatcattgcctcagctccacttcagatcatcaggcattacattctcataaggagtgcacaacctagatctctcacatgtgtagttcacaatagggttcacactccaataagaatctaatgctgcctctgatctaacagaaggcagggctcaggtgctaatgtgagcartggggagtggctgtaaatacagatgaagcttcacttgctcatctgctgctcacctcttgctgtgcagcccagttctcaacaggtcacggactgctactggtccatggtccgggggtcggggacccctgcttgtttttgtttttttttttaagagatggagtctcactctgttgctcaggttggagtgcagtggcgtgatcttggctcactgcaacctccacctcccaggttcaagcgattctcctgcctcatcctcccgagtagctgggactacaggcgcacgccaccacgccctgctaatttcgattgtattttagtagacacagggtttcaccatgttgcctaggctggtctcgaactcctgagctcaggcaatccaccggcctcggcctcccaaagtgctaggattacaggcgtgagccaccacacccagccaaccctgatttttatattaactgtattaccaaacatactttcattgtaaagtttaggggtaagatcaaacaaaaccctctg

SEQ ID NO: 938097 - DNA, 690 bp, Homo sapiens
cgctagcatcattgcctcagctccacttcagatcatcaggcattacattctcataaggagtgcacaacctagatctctcacatgtgtagttcacaatagggttcacactccaataagaatctaatgctgcctctgatctaacagaaggcagggctcaggtgctaatgtgagcagtggggagtggctgtaaatacagatgaagcttcacttgctcatctgctgctcacctcttgctgtgcagcccagttctcaacaggtcacggactgctactggtccatggtcygggggtcggggacccctgcttgtttttgtttttttttttaagagatggagtctcactctgttgctcaggttggagtgcagtggcgtgatcttggctcactgcaacctccacctcccaggttcaagcgattctcctgcctcatcctcccgagtagctgggactacaggcgcacgccaccacgccctgctaatttcgattgtattttagtagacacagggtttcaccatgttgcctaggctggtctcgaactcctgagctcaggcaatccaccggcctcggcctcccaaagtgctaggattacaggcgtgagccaccacacccagccaaccctgatttttatattaactgtattaccaaacatactttcattgtaaagtttaggggtaagatcaaacaaaaccctctg

SEQ ID NO: 938098 - DNA, 618 bp, Homo sapiens
gggcgcggtggctcacgcctgtaatcccagcactttgggaggcagagatgggtggatcgcttgaggtcaggagttcgagaacagcctggccaacatggtgaaaccccatctctactaaaaatacaaaaattagccaggcatggtggcaggtgcctgtagtccagcctgggcaacagagtgagattctgtctaaaaaaaaaaaaaaaaaaaaaaaggcagataagctataagtctgcctttcttcatggtccaggacacatagccctcttgcgcaaataactcacaatctgcctgctcccagctctctctagacccttggctgatagaaaaaatgcacgttagctcactgcaaccttggcatcatcagtactrcacaaaactcttcagcacgcagcacgagctccatcctataaaatccccagccagcctttgtctcctttcactcagcttctcttttgccagcctgcccattgcttccttgcaacatatttttatactttttctaataaatctgcctttctttatctacaactgtcttgataaattcctcttacctcccccccacgccactggccccaatagtcacggctcacctgcagcaagaatcagaaggaattc

SEQ ID NO: 938099 - DNA, 596 bp, Homo sapiens
ctctggcctcggccacacatggagatcctgtctcctaaaaaaaaaaaaaagaaaaggatcaggtcgggcacagtggctcatgcctgtaatcccagcactttgggaggccaaggcgggtggatggcgaggtcaagagttcgaaaccagcctgaccaacatggtgaaaccccatctctactaaaaataaaaaaattagctgggtgtggtgacacrcacctgtaatcccacctactcaggaggccgaggcaggagaatcgcttgaacccaggaggtggacgttgcagttagctgagatcacgctattgtactccagcctgggcaacagagcgagactccatctcaaaaaaaaaaaaaaaaaaggatcactttggctgctgtgttgagaatagattatagggtggtatgtatgacatcagggagagcagtaagtagactactgcaataacttagttgatactaaagtattaaaagacaaggggccagatgcggtggctcatacctataatcccagtaccccaggctaaggtgagtggatcacgaggtcaagagatcaagaccattctggccaacatggtgaaaccccatctctactaaaa

SEQ ID NO: 938100 - DNA, 616 bp, Homo sapiens
atgtcagtggggctggttccttctaagcactgtgagggaaaatctgttccagacctcactcctaccttctcgggccttgctgacaatctttggcattccttgccttgtagatctctatcttcatcctcatgcagtgttctccctgtgtgcaggtgcctatgtccaaattttccctttttatagggacaccactcacactagattagggacctactctactccagtatgacattttatgttaataaactatatctgcagctatcctatttccaaacaaggtgacattctgagttattagctattaggactttgacatatgaattttgtgggggacaattcaacccataacattattaccctgttttacagatggggaataaaaggcacaaaagtgttaagtgacttgcctaargtcacacagctaatatatggtagagtaagaatttgaacccaggaagtctggttctaaagtgagagttcctaatccacatactctacttcctctacaccaccggtccccaacctttttggcaccagggactggttttcgaggaagacaattttcacggaccagggggtggtggatgggaagggagatggtttcaggatgaaattg

SEQ ID NO: 938101 - DNA, 623 bp, Homo sapiens
gccttccctcttctcctcagctttattgaggttataactgacaaacaaatattgtatatatttaaggcatacaataggaagttttaatatacctatatgttgtgaaatgataatcaagctaattaacatatccataacatatagttaccttttttgtgtgtgagagaacaattaagatctattctttgggcaaatttcaagtatacaatagagtatagttaagtatagtcaccgggctatacactagatctccagagcttattcatcctacacatctgaagcttttaccctttcatcaacatctccccatttccctcacttcccatccctgacaacaacctgtattagtctgttctcatgctgcyaacaaagacatagccgagactgggtaatttataaagaaaaagaggtttaatggactcacagttccacgtggctggggaggcctcacaatcatggcagcaggcaagagagaaaatgagagccaacaacagggggagccccttagaaaatcatcaaatctcgtgagacttattcactaccatgaaaacagtatgggagaaaccactcccatgattcaattatctcccacctggtccctcccacaacatgtgggaattatg

SEQ ID NO: 938102 - DNA, 609 bp, Homo sapiens
acttccaattaagaaatgtataaggaaatgtttctaaagattaaaacatggttttaaaatacatgaaatacttataatattttatcttaaaatactgatatattgcagacaattcaagatttcttacttcctaggttcttccctaaaatccctaaaataargattactaagagttaatattgtaacttatataagtaattgaaactactagatacaagagaaacaattctatttgcagaatgtatacgaaaaataggatgtgtttttggtaaacacacaagaagacaggaatatggttttcgtttaagggcaagtaattttgcctagtttagaggttctaaaggattgttttaaattgaaggaattaaaaaagtgtagataaaactaaataaatatagaaagttgagaaagaatgaaaataaaacaaattgtaagaggttataaaaggtttatggaaatcttaccttgcagtcaaaacaaattgagattgaatagatttgtttataaggtcttattaaaattagctgtaatattaaaaatgcgctaatacaaaactaaaaattttggttaaagcaacaaaattttttgaagtattgatttgctctcaat

SEQ ID NO: 938103 - DNA, 609 bp, Homo sapiens
acttccaattaagaaatgtataaggaaatgtttctaaagattaaaacatggttttaaaatacatgaaatacttataatattttatcttaaaatactgatatattgcagacaattcaagatttcttacttcctaggttcttccctaaaatccctaaaataaggattactaagagttaatattgtaacttatataagtaattgaaactactagatacaagagaaacaattctatttgcagaatgtatacgaaaaatargatgtgtttttggtaaacacacaagaagacaggaatatggttttcgtttaagggcaagtaattttgcctagtttagaggttctaaaggattgttttaaattgaaggaattaaaaaagtgtagataaaactaaataaatatagaaagttgagaaagaatgaaaataaaacaaattgtaagaggttataaaaggtttatggaaatcttaccttgcagtcaaaacaaattgagattgaatagatttgtttataaggtcttattaaaattagctgtaatattaaaaatgcgctaatacaaaactaaaaattttggttaaagcaacaaaattttttgaagtattgatttgctctcaat

SEQ ID NO: 938104 - DNA, 609 bp, Homo sapiens
acttccaattaagaaatgtataaggaaatgtttctaaagattaaaacatggttttaaaatacatgaaatacttataatattttatcttaaaatactgatatattgcagacaattcaagatttcttacttcctaggttcttccctaaaatccctaaaataaggattactaagagttaatattgtaacttatataagtaattgaaactactagatacaagagaaacaattctatttgcagaatgtatacgaaaaataggatgtgtttttggtaaacacacaagaagacaggaatatggttttcgtttaarggcaagtaattttgcctagtttagaggttctaaaggattgttttaaattgaaggaattaaaaaagtgtagataaaactaaataaatatagaaagttgagaaagaatgaaaataaaacaaattgtaagaggttataaaaggtttatggaaatcttaccttgcagtcaaaacaaattgagattgaatagatttgtttataaggtcttattaaaattagctgtaatattaaaaatgcgctaatacaaaactaaaaattttggttaaagcaacaaaattttttgaagtattgatttgctctcaat

SEQ ID NO: 938105 - DNA, 437 bp, Homo sapiens
aattccccctttccactcccctcagcccttggcaaccacgcttctgctttctgtttctatgattttgactacttcagatattgcgtatgagtagaatcaatatatttgtcctttcgtgactagcttatttcatttagcatactggcatcaaggttcatctacgttttaacctatgacagaactkccttcttattaaaggatgaataatattttattatatatatatactacattttatttattcattcattggttgattaatatttgggttgtttccagctcttggctattgtaggtagtgctacaatgaacatgggtatgcaaatgatacctttgagatcttgctttgaattcttttggatatgtacccaaaagtgagatagatggatcattgtaatactattttacattttctgaggcacccccacactgttttc

SEQ ID NO: 938106 - DNA, 611 bp, Homo sapiens
aacttcagtgaacttcctaaagtcacttctttctgactttatcttgccttgtaaatgtacagcagcatctgtctttaaactgttaccaatataaaaagtatccaggccgggcggggtagctcacacctgtaatcccagcactttgagaggccgaggcgggcggaccacctgaggtggggagttcgagaccagcctgaccaacatggagaaaccctgtctctactaaaaatacaaaattaaccaagcatggtggcacatgcctgtaatcccagctactcaagaggctgaggcaggagawtcgcttgaacctgggaggtggaggttgcagtgaaccgagattgcaccactgcaccccagcctggggaagaagagcgaaaccccatctcaaaaaaaaaagaagtatccactctcccaataaaaagcattccgcaaaatgcttctgcctagatttgcctggttaaacctcatgaatgtcatttattcctgcacttttgcatcaaccattgagaggcaggcctagagaacacatgtgacctctgtcctcggagctcacaacatacaaggtgcatccttgggctggagactgctaaggcacaaagtgtgtcttcatt

SEQ ID NO: 938107 - DNA, 424 bp, Homo sapiens
agagagctgcctcagcgtaaggcctgtgccgaacagctagtgtacggcgactgagtgatgcccaatcctatttccttttgttcaatgggtgttgattagagtgccccctcgtaaacttcctatgtgctaatctccatctcrcagttggcttccggggaacatcttatctgtgacagtctgtccagtgtagattacagtttgcagaagacagcaaacaagcaaagtagatttgtgatttgtacactgaaggaaatgaacaagatgcaatgatagcagataacagggaggtgtacctggaagaggtgacacttaagccaagaactataaacagatagatgccagccatgtgaaaagcaggtaggagagtgtgtcccagaaagagaaacagttctgataaaagccgatcgcaaagagtcaggcatgt

SEQ ID NO: 938108 - DNA, 631 bp, Homo sapiens
aagactaaagcaacttaaaataaatggacatcttgctgctgctgacaattttctaacaaactgacgtatcatctctcagtggcaaggcttaagagggagaaatgggaagggaaaaggagagcaataagaaatatgcaggtcaattggaaattaggtcatgagggaaaatgccaagaagagttttttttcttagtttgttgttcttctagtttmtgtgttgagacaaggtgctctttagctttgggtctaataatttttggtttgaaaatgagagtgagttgaaacttgcctatggattaattttaggaggactctgaggaaaccagattggcagtgaatatgtggtgacaaagtgagaaacactttagcagaaggcggaacaaattaacttgtgggaagtcggggtccccaaacggagggaccggctgaagctgtggcagaagaatataaattgtgaagatttcatggacatttattagttcccaaaattaacacttttataatttaatacgcctgtctttactgcagtctctgaacataaattgtgaagatttcatggacatttatcacttccccaatcaatactcttataatttcctatgcctatctttaatctcttaatcccatcatc

SEQ ID NO: 938109 - DNA, 631 bp, Homo sapiens
aagactaaagcaacttaaaataaatggacatcttgctgctgctgacaattttctaacaaactgacgtatcatctctcagtggcaaggcttaagagggagaaatgggaagggaaaaggagagcaataagaaatatgcaggtcaattggaaattaggtcatgagggaaaatgccaagaagagttttttttcttagtttgttgttcttctagtttctgtgttgagacaaggtgctctttagctttgggtctaataatttttggtttgaaaatgagagtgagttgaaacttgcctatggattaattttaggaggactctgaggaaaccagattggcagtgaatatgtggtgacaaagtgagaaacactttagcagaaggcggaacaaattaacttgtgggaagtcggggtccccaaacggagggaccggctgaagctgtggcagaagaayataaattgtgaagatttcatggacatttattagttcccaaaattaacacttttataatttaatacgcctgtctttactgcagtctctgaacataaattgtgaagatttcatggacatttatcacttccccaatcaatactcttataatttcctatgcctatctttaatctcttaatcccatcatc

SEQ ID NO: 938110 - DNA, 631 bp, Homo sapiens
aagactaaagcaacttaaaataaatggacatcttgctgctgctgacaattttctaacaaactgacgtatcatctctcagtggcaaggcttaagagggagaaatgggaagggaaaaggagagcaataagaaatatgcaggtcaattggaaattaggtcatgagggaaaatgccaagaagagttttttttcttagtttgttgttcttctagtttctgtgttgagacaaggtgctctttagctttgggtctaataatttttggtttgaaaatgagagtgagttgaaacttgcctatggattaattttaggaggactctgaggaaaccagattggcagtgaatatgtggtgacaaagtgagaaacactttagcagaaggcggaacaaattaacttgtgggaagtcggggtccccaaacggagggaccggctgaagctgtggcagaagaatataaattgtgaakatttcatggacatttattagttcccaaaattaacacttttataatttaatacgcctgtctttactgcagtctctgaacataaattgtgaagatttcatggacatttatcacttccccaatcaatactcttataatttcctatgcctatctttaatctcttaatcccatcatc

SEQ ID NO: 938111 - DNA, 490 bp, Homo sapiens
ttattatttctttccttctacttactttgggtttatatcattatgagatgatcttgtttatctctagcaccacttttctcttaaaatctctttgtgataatgcagctacttcagctttctgatgctttcttatgtttccatggtatgcgttttttcattcttttactttcgactcatttgtacttttgcatttaaatagcatcttttgtagacagcacatacgttcytgtttttattaatatattccacctgctaatctctgtcttttggttcgactgtttcatctatttatatttacttttttttcagggatggagtttctctgttgcccaggctggagtgctgttcacaggtctcctaacattctccatttgtctttttttgtttgtttttgagacagggtctcattttgtggagtgcagtggtacagtcacagctcgctgcaacctcaacctcctgggctcaagcgatcttccctcctcaaccactg

SEQ ID NO: 938112 - DNA, 577 bp, Homo sapiens
gccaatcacaagcaccgtttggtgaggtgagcatattcagatgatcattttaagtagcagttcctctaaaacttccactaaaggccattcagcagaaatcccccaaacacagacaggcttgagatgctgggtggccaaaccaaatggcgagtgccctatgccagcaaaaccagagagagcgttaagtcagggttctggcctggggaggagggagatgacctccactgagtgctctctatgcatccagctctggacaaaggccccgtgtgtctcacaaacctggtttttcaaatcaggaaatcagtggcttgagaagtttaaagtcctgaggcctcccaggtggtacatggctcaaccaacagcatctgtctatatgtttttaagagcatgacaagtagtcattagagtatggagtgtagaaattcacagcaccrcccttgacaggaaaccaggtgtaactacacttttgtgttctacagacacacagatggggttggagaggaggctaccaccaggacactgtggacattggaaggcaagggtaaatagagtcttggggtcccggggagacacaggg

SEQ ID NO: 938113 - DNA, 577 bp, Homo sapiens
gccaatcacaagcaccgtttggtgaggtgagcatattcagatgatcattttaagtagcagttcctctaaaacttccactaaaggccattcagcagaaatcccccaaacacagacaggcttgagatgctgggtggccaaaccaaatggcgagtgccctatgccagcaaaaccagagagagcgttaagtcagggttctggcctggggaggagggagatgacctccactgagtgctctctatgcatccagctctggacaaaggccccgtgtgtctcacaaacctggtttttcaaatcaggaaatcagtggcttgagaagtttaaagtcctgaggcctcccaggtggtacatggctcaaccaacagcatctgtctatatgtttttaagagcatgacaagtagtcattagagtatggagtgtagaaattcacagcaccgsccttgacaggaaaccaggtgtaactacacttttgtgttctacagacacacagatggggttggagaggaggctaccaccaggacactgtggacattggaaggcaagggtaaatagagtcttggggtcccggggagacacaggg

SEQ ID NO: 938114 - DNA, 586 bp, Homo sapiens
ggccccctctgctgctgtttcctcgtggctcctaaaaatagccaacatagcaccaaatagtacttctgtgtattgactctctcctcaactggaacatataagctccatgggagagaaggctgtgtctcatttgcctctgtatctccagcacttagcagagtgcctagggcaccgtaggttctccacatgtatttactgaagacatgaagactatcacatcttttaaattcccaccttaatgcctcttttttgagctttagacctgattattagctcactctcaattactctaattttttttcccataggtttttggggaacaggtggtatttggttacacaagtaagctcttcagtggttatttgwgagatttgggtgtacccatcaccgaagcagtaatcactgaacccaatttgtagtcttttatccatcacccccttcctaccctttccccttgaatccccaaagtctattgtgtcattcttattcctttgcatcctcatagtttagctcccacttatgagtgagaacgtatgatgcttggttttccattcctgagttacttcacttagaataatagtctcca

SEQ ID NO: 938115 - DNA, 588 bp, Homo sapiens
gggaaccagctattagggaagacctaataatattgataaaagctccccagaatgatcatcttcaagtacttaaaaaggtttttatttgaggaaattcagccttaccaaagtaaaggaagttgtattagttcagaatttcccagctataatctatagtactaccataggtaagacaaaacatgcctgcccagaaacgacctggaagatgatttttaaagttagtattttgtatctaggagttcattttttaaacattttttgttcatctgaattttcaaacttttctaaataaatatacattacttttgtaaattaaagttttttaaatattagtttaatttccaactcaggataactacataccatggaattgacctcctagaacagtcacaccatctattacagattgkgaaagtttctcactgctgggcctaggaaagaaaaggaagaaaataatatatcccatcctgaaactggcagggttgctggttctgcaagcaaatgcaaaaattacatgctacaaatttcaaaatagtaagttcctggtatctgaactgaaagctatgaactctcaagataactggtaaa

SEQ ID NO: 938116 - DNA, 532 bp, Homo sapiens
gtagtttaaactcttatttctttattacaatgttgatcatctctttatgttcaaattattcttatttcctttaagttaattatctgttcaaatccattttctacttgtttttatttatctatagtagctctttgaatattagaaagaatactcctttgactgtgatattttggaaatatttttccatgtgtgtcatttgtttaaataagtaaaaaatgatttgtttaaaatttccattaagttattcaaaagaaatgtaacagtatattttaaaacctgaatttaaaaagcatagccattttggaaaatagtttggcagtttctaataaacttacgcattgaagaaaaaagastaaatctctggtaccttggattagacaatggtttcctaatataacaccaaaagcacaagcagcaagagaaaaaaaatcaagtccggatgaactggatttgatcaaaattaaaacttttttgcttcaggggaccctatcaagaatgttagaagacaatctacagaatgggggaaaatatt

SEQ ID NO: 938117 - DNA, 608 bp, Homo sapiens
cttaagactaattttatttcttaaagataaaagtcatgtgaactaaaaatatttgatttaagtgcttatttttctttaagccaatcaatttgagctctttttagagacattatgcataacacatatacagcgacacaaacagacagatgattcagcactggcaagacttttcatttgccagtttaktaattggattactggcttcaaggtggagcctttggaggaacagggccaggtaccatgcatttttagggcctaattagcagacctaattagacagatccctaaaattaaaggtgccattttatactggattttggatccccaaagtagggagaaactacgggagaacacagtgcagtgcttctaccatgtatttcattgaaaggcaatgaaaaagccaatcggcttattttgtaatcagcccatccccctgggactctcatctgtcagtgggggatggggttgttttactatcttttagatggccaacagcatgcttccctgatttataactactattagttatcccttaaagtgtatttcctacctagttattatacaccaaagctctctcatattgtgaagtaacttgatacccccaaaac

SEQ ID NO: 938118 - DNA, 557 bp, Homo sapiens
gtttgctggaggtccattccagaccctgtttgcctgggtatcagcagcggtggctgcagaagagtggatattggtgaaccgcaaatgctgctgcctgatcgttcctctggaagttttgtctcagaggagtacccggccatgtgaggtgtcagtccgcccctactgggggrtgcctcccagttaggctactcgggggtcagggacccacttgaggaggcagtctgcccattctcagatctcaaactgcatgctgggagaaccactgctctcttcgaagctgtcagacagggtcatttaagtctgcagaggttattgctgtcttttgtttgtctgtgccctgcccccggaggtggagcctacagaggcaggcaggcctccttgatctgtggtgggctccacccagttcgagcttcctggctgctttgtttacctaagcaagcctgggcaatggcaggtgcccctcccccagccttgctgctgccttgcagcttgatctcagactgctgtgctagcaatgagcgaggctgcatgggcgtaggaccctccgagccacgtgt

SEQ ID NO: 938119 - DNA, 857 bp, Homo sapiens
ctgtgccctctgggtgcttggacaacagccccaagccaggaagcaggaggcgagtgtacatcccacagtggtgaccatggctgagtttgccaccatgctccaaaatgtgtgtgacatcctgctttttatttatttagtcgtgacctgggagttatagggaagagatggagaagactaagcactgataaatgcaccaccaaagacccctactgaagttaaacagaaccatgggcccccaagagtccacctcctaatgtcyagaacctgtgaatatgttaccttccatggcaaaaagggctttgcagatgtgattaaattatggattttgagatgaggaaatgatcctggattagccaggtgggtcctgcatgtccttataagagagaggtagggcccggcacggtggctcactcctgtaatcctagccctttgtgaggctgagaggggaggatcacctgaggtcaggggttcgagacaagcctggccaacatggtgaaaacccgtctctactaaaaatacaaaattagccaggcatggtgatgcacgcctgtagtcccagctactagggaggctgaggcaggagaatcacttgatcccaggagtcggaggttgcagtgagctgagatcacatcactgcactccagcctgggtgacagagtgactccatctcaaaaaaaaaaaaagagagagagagagagagaggtaggaggagggtgagagtcagagaaggagctgtgatgagggaagcagaggttggaggaatgcgatgtcacaagccagggaatgtgggtgtcctctacacagtagagaatacgaggaaatggattctcttctagagcgtccagaaggaacagcct

SEQ ID NO: 938120 - DNA, 857 bp, Homo sapiens
ctgtgccctctgggtgcttggacaacagccccaagccaggaagcaggaggcgagtgtacatcccacagtggtgaccatggctgagtttgccaccatgctccaaaatgtgtgtgacatcctgctttttatttatttagtcgtgacctgggagttatagggaagagatggagaagactaagcactgataaatgcaccaccaaagacccctactgaagttaaacagaaccatgggcccccaagagtccacctcctaatgtctagaacctgtgaatatgttaccttccatggcaaaaagggctttgcagatgtgattaaattatggattttgagatgaggaaatgatcctggattagccaggtgggtcctgcatgtccttataagagagaggtagggcccggcacggtggctcactcctgtaatcctagccctttgtgaggctgagaggggaggatcacctgaggtcaggggttcgagacaagcctggccaacatggtgaaamcccgtctctactaaaaatacaaaattagccaggcatggtgatgcacgcctgtagtcccagctactagggaggctgaggcaggagaatcacttgatcccaggagtcggaggttgcagtgagctgagatcacatcactgcactccagcctgggtgacagagtgactccatctcaaaaaaaaaaaaagagagagagagagagagaggtaggaggagggtgagagtcagagaaggagctgtgatgagggaagcagaggttggaggaatgcgatgtcacaagccagggaatgtgggtgtcctctacacagtagagaatacgaggaaatggattctcttctagagcgtccagaaggaacagcct

SEQ ID NO: 938121 - DNA, 576 bp, Homo sapiens
aaagaaatgaagtaatggcattcacagcaacctgggtggagttgcagactattattctgaatgaagtaactcaggaatggaaaatgttgcatgttctcacttataagtgggagctaagctgtgaggacacaaaggaataagaatgatataatggactctggggactcaaatgtaaggatgggagggggatgaagaataaaagactacacattgggtatggtatacaccgcttgggtgatgggtgcaccaaaatttcaaaaaccrcctctgaagaacttatccatgtaaccaaaaaccacctgttcctcccccaaaataaaaataaaataacaatttttaaaattttataaaactatatatttatatataaataaatctctatgttatatatatgtatgtatgtatacagagaaagagagagaaagagagattattatacagaattatataaaatttattcaaataattttggaggctgtgaaggcaaagaacttcagtcagcaagctagaaacccagagagctgatggtataattccagtctgagtccaaagtctgagaactaggaaagcaaatgg

SEQ ID NO: 938122 - DNA, 673 bp, Homo sapiens
ccaaagatggaataatttgaacatcaataagaataatcactgcaatgtatttaaaccatcaaatgtattaaaaatccatgaatttatttcaatgcaattaaagtttcattggccaaaaaaaaaaaaaaaaatgcattggttacattcggaggatcctagggaaacaccttattattttgaatattggtaaataaaggaaaacaatcaagcacttagtctcattcctgtgcaatctatatttcagccaaatagtgaataaagagaaagctttttttacagagtatttttgctaaataaattataaaggaatgatataatttgactatcatcaatttgcatttcctaatggatatgggtaggaatcattgatagctgctattaataatatcacacaagaaaggagacaatcaaayattatgtatgtacctcctgatggaagtacacagcatctatggagtattctcaccaaaaaagcttaaattgaaatctgatcaagcctctagatctatttaaaaatttataggacatgcaggggtcagaggaagatgaaatcagcaaaagacagactatatggaaaacactatgacattggtccagtttctccaatgaataggttgcaaggaaagaaacaaaaaaagaaaatagttgaagcctgtaaattaaaacagactta

SEQ ID NO: 938123 - DNA, 536 bp, Homo sapiens
ccaaaatgctgatagcaatatggacaataaggtccaggctgaggtggtctcaggtggagatgaggaacttgttgggaactcaagtaaaggtgactgttgttatgttttaacagagagacgagtggcattttgcccctgccctagagatttgyggaactttgaaattgagagagatgatttagggtatcttgtggaagaaatttctaagcagcaaagcgttcaaaaggtgacttgggtattgttaaaaacatttcatttttaaatggaaacagagcataaacgttcagaaaacttgcagcctgataatgcaggagaaaaaagaattttttttttgaggagaaattcaagcccgctgcagaaatttgcataagtatcaaggagcctaatgttaatccccaagaccacaggaaaatgtctccaggccgtcagagaccttcacggcagcctctcccatcagaggcccgaaagcccaggaggaaaaagtggttgcatgagtggggtccagggtccccatgctgtgtgcagcctgcggactt

SEQ ID NO: 938124 - DNA, 717 bp, Homo sapiens
aggagtggcataagcatctctggccactaccactgggactgcactaggtcagacctgaagccagcacagcactgggtcctgcccaaggcccaatgtaatcactacctaatcactacatcactactgcctatattcactcaaggccctagggttctataattagcaggtggtaaagccacccagtcttgcgtttttcccttcagggtgatgagttcccccaggccccaggcaggtccagagattctgtccagtagccagggcctggagttggaaaccttagcaatctatctggtgttctagtctactgtgactgagctggcacccaaaccacaagacaaagtcttttccattattttcttccctttccccaggcagagaagtcttctccacatccatgatcaccacaggcccatggggagtactgccaggataccactgatgtttacttaacccaagggctcctcagtcagcttgcggtgaatgctgccaggcctgggactcamccttcagggcagtgagctcccctctggcacagggtaggtccagaaatgccttctaagagtcaagtcctggaattagggaccccaaaagcctgcttattgctctctccctttgaggctgagctggtacctaagctacaagacaaagtcccctttactcttccctctgcttttttcaagcagaaggcatcccttctgatagctaccacagctttga

SEQ ID NO: 938125 - DNA, 715 bp, Homo sapiens
caggcccatggggagtactgccaggataccactgatgtttacttaacccaagggctcctcagtcagcttgcggtgaatgctgccaggcctgggactcacccttcagggcagtgagctcccctctggcacagggtaggtccagaaatgccttctaagagtcaagtcctggaattagggaccccaaaagcctgcttattgctctctccctttgaggctgagctggtacctaagctacaagacaaagtcccctttactcttccctctgcttttttcaagcagaaggcatcccttctgatagcwaccacagctttgaatgtgctgggtcacacctgaagcaagcgtgtctcagagtctcacccaaggtccatgatgtgtactacctcatcaccactgctgattattcatggcccaggggctctttagtcagaaggtgatgagtcctgccaggactgggtccttcccttcaaggccgtgagttcccttctggcctagggtgtgtatagaagcgtcatctgggagctagggcctggaatggaggcctcactactctgtcttgtgccctagcctactgtggctgatctggtatccaagtagtaagacacagtcctctatactcttccctttcctctcctcaagcagaatgaaggagtctattttggagctgtgagttgcattgcccaggactgagggagtggtgatgcaaacactctcttag

SEQ ID NO: 938126 - DNA, 715 bp, Homo sapiens
caggcccatggggagtactgccaggataccactgatgtttacttaacccaagggctcctcagtcagcttgcggtgaatgctgccaggcctgggactcacccttcagggcagtgagctcccctctggcacagggtaggtccagaaatgccttctaagagtcaagtcctggaattagggaccccaaaagcctgcttattgctctctccctttgaggctgagctggtacctaagctacaagacaaagtcccctttactcttccctctgcttttttcaagcagaaggcatcccttctgatagctaccacagctttgaatgtgctgggtcacacctgaagcaagcgtgtctcagagtctcacccaaggtccatgatgtgtactacctcatcaccactgctgattattcatggcccaggggctctttagtcagaaggtgatgagtcctgccaggactgggtccttcccttcaaggccgtgagttcccttctggcctagggtgtgtatagaagygtcatctgggagctagggcctggaatggaggcctcactactctgtcttgtgccctagcctactgtggctgatctggtatccaagtagtaagacacagtcctctatactcttccctttcctctcctcaagcagaatgaaggagtctattttggagctgtgagttgcattgcccaggactgagggagtggtgatgcaaacactctcttag

SEQ ID NO: 938127 - DNA, 633 bp, Homo sapiens
accccactgcactccagcctggatgacagagcgagactccacctaaaaaaaaaaaaaaaatttacacaggttgaacatcccttactcgaaaatctgaaatctgaaatgctccaaaatgcaaaacgctttgaacactaacatgatgccacaagtggaaaatttcacgcctgacctaatgtgatgggttgtagtacaaacacaggtgygtaacatacagtttatccagcatccccaaagaaaaaaacaaaattaccttcgggttacatatgtgatataacttggatctttctcctcgccgaaatttcacaacgaattgttagaggtggagcctgggggaaggtgattgtatcatgagggtgatgtctgatgaatggttcagcaccatcctcttggtgttctcgtgatagtgagtcagttctcgcaagatctggctgtttaaaagtgcatagcacctcctcccttgctttctctcttcctcctgctctggccatgtgaaatgtctgctcccccttcaactgcaaccataattgtaagttttctgaggcatctccagaagccaagcagatgccactatgcttcctgtacagcctgcagaaccgtgagctaattaaacctcttttctttgtaaattac

SEQ ID NO: 938128 - DNA, 564 bp, Homo sapiens
cggtcctcagaccacacattgccaactcatgctctgtttttcaggagcaagtcaccaagtcttacctgtacatgaggggaagggaactaacctccatatcctggaagaaggagtaacaaaaactttggtaaaaccacyaaggcaaatagtaattattttggggcaaagcattgaagctatgcaaatactctgtttctcctcaaagtttttctgtctgactttagcattcatccatggatattacctgcaacaattactactgttgtcttctaatgctaactttccatgtcctcatttcatctacatttattatttgaaattcttctttaaggaagatttgtcccatctctcccacttatttatttattcagtcaactatttttatcagtatgaagtcatgattacaaattttattctttgggttattagctcagtgtcatgatttattttgtgacccaaattactctatcttggacaactaggagctcattcaggttctcctgtccttgtgacatgctcccatctttttgcggggggcaccattttaactttctggcactacaa

SEQ ID NO: 938129 - DNA, 614 bp, Homo sapiens
aagactcttagtcagggttcttctgagggacagaaccaataggatatatgtgtatataaaggactatccaggagaactgcctcacatgattacacagcaaagtctcttaataggatatctgcaagctggggatagagagaagccagtaggggctcagtccaagtctgaaagtctcaaaaccagggaagccaacagtgcagccttcagtctgaggtcaaaggccaagagcccccaggaggcttctggtgcaagtcccagagtccaaagacagaagaacctagagtctgatgtccaagggcaggaggagaggaagcaggcatcctgcatggaaagcagagagaaggagaagactctgcaagttgtttgtccccttcttctgcctgctttgttccagccgcactggccgctgattggatggggtgggtcttcytctcccagtccaccatctcaaatgtcagtcatctctggcaacaccttccagacacccagaaacaatgcttcaccagccacctaggcatccctcaatttagtcaagatgccacctaatactgaccatcataaacacctaatccattgcttaggatttacttccaaatgctgacctttcatagcag

SEQ ID NO: 938130 - DNA, 750 bp, Homo sapiens
atgaaaagatgtaaactagttcaacccttgtggaagtcagtgtggcgattcctcagggatctagaactagaaataccatttgacccagccatcccattactggctatatacccaaaggactataaatcatgctgctataaagacacatgcacacatatgtttattgcagcattattcacaatagcaaagacttggaaccaacccaaatgtccaacaatgatagactggattaagaaaatgtggcacatatacaccatggaatactatgcagccataaaaaatgatgagttcacgtctttggagggacatggatgaaactgcaaatcatccttctcagtaaactatcgcaaggacaaaaaaccaaacaccgcatattctcactcataggtgggaattgaacaatgagaacacatggacacaggaaggggaacwtcacactctggggactgttgtggagtgaggggaggggggagtgatagctttaggatatataactaatgctaaatgacgagttaatgggtgcagcacaccagcatggcacatgtatacatatgtaactaacctgcacattgtgcacatgtacgctaaaacttaaagtataataataataaaataaaataaaataaaaaaagaaaagatgtggctccaggtttctttgcttctaagaagaaagtacataaaaacaaactctcttgggggaaaaaaatgcccaacttcctctctgaaagctcacagtgcatgtcacacaat

SEQ ID NO: 938131 - DNA, 621 bp, Homo sapiens
  misc_feature 183: n = A,T,C or G
tttcttttctttttttttttttttttttttcatttttaggctggttatgaagaagaaactcaaaataacaggagtggcttatggaactacatggaggtaacagaggagggtaccaaccaaaggcccttgagcaatcaggatgttgggtaacagatttttgcttttaaatgactcctgggtggngcttccccaatgcatcgtcattccctgacccttgcatctgaccctgtgggtgggaccctccgcctccaccatccactcaaggctcacccctggctcctccaccacccggstcctgccccacacccccgatggcctttcctcccctgtaaggcgactgaggtgactcaggtcaccctgctccttcctcgtctcatctcgtccctcctttcctgcttagactgtgccagatgacccttcttgcaaaggggtgggcgggaggccccccatgcagccaggcagtgctgatttgaactggcatcccagcagcagtgccctggatggaagccacgtccctgtcaccctctcaatccagggcaggcctggcagagcggggtctgataaacgccagggaacctccgattaagtgaggaggaagtgaccgtccacgctgtacccacc

SEQ ID NO: 938132 - DNA, 557 bp, Homo sapiens
tacattcccattgttgcgcaaccatcaccatcatctacccccagagcgttttcatcttcccaaactgacactctgcctctataaaacaacaactccgcttgctcctctcctcccagcccctggcagccactattctactttctgtctctgtgaactggactattctaggttgcctcatacgggagaaatcatatacaatttgtccttggttgctggcttatttcactcagtatagtgtcttcaaggttcacgcatgttgtagcatatgtcagamcttccttccttttttaagactgaataatgttccattgtaaggatataccacattttgtttatccattcattcactgatgggcatttcggttgtttccacttttggctatggtgaatagtgctgctgtgaacattttggtacaaatatctgtttgactcatattttcagttcttctgtgtctatcatattttattggacaggactatgccagtgatctccatagccacataatttgaaatatccctaaaccaggaactacccaaatgctcatcgacagcagaac

SEQ ID NO: 938133 - DNA, 612 bp, Homo sapiens
acacaaatgataaggaagataaacaaccttattaaccaacacagagacagttttagtgatctggacagaagttcaaatcaggctcaggcctgtaatcccagcactttgagagaccgaggtgggcggatcacctaaggtcaggagttcaagaccagcctagccaacatgatgaaaccccgtctctgccaaaaatacaaaaattagccaggcatggtggcrggcacctgtaatcccacctactcgggaggctgaggcagaagactcgcttgaacccggaagacggaggtcgcagtgagccaagatcgcgccactgcactccagcctgggtgacacagcaagactccatctcaaaaaaaaaaaaaaaagttcaaatcagccacaacattgagcctgatgcagagcaaggccctacctctctttaattctttgaaggctgggagaggtgaggaagctacagaagaaaaggtagaaactagcagaggttggttcatggggttaaggaaataagctgtctccataacataaaaatgcaagataaagcagcaaatcctgatatagaagcttcatcaagttagccagaagacgtagctaaggtcaaaacaacagtttttc

SEQ ID NO: 938134 - DNA, 612 bp, Homo sapiens
acacaaatgataaggaagataaacaaccttattaaccaacacagagacagttttagtgatctggacagaagttcaaatcaggctcaggcctgtaatcccagcactttgagagaccgaggtgggcggatcacctaaggtcaggagttcaagaccagcctagccaacatgatgaaaccccgtctctgccaaaaatacaaaaattagccaggcatggtggcgggcacctgtaatcccacctactcgggaggctgaggcagaagamtcgcttgaacccggaagacggaggtcgcagtgagccaagatcgcgccactgcactccagcctgggtgacacagcaagactccatctcaaaaaaaaaaaaaaaagttcaaatcagccacaacattgagcctgatgcagagcaaggccctacctctctttaattctttgaaggctgggagaggtgaggaagctacagaagaaaaggtagaaactagcagaggttggttcatggggttaaggaaataagctgtctccataacataaaaatgcaagataaagcagcaaatcctgatatagaagcttcatcaagttagccagaagacgtagctaaggtcaaaacaacagtttttc

SEQ ID NO: 938135 - DNA, 605 bp, Homo sapiens
gtatatatgcaaaggattataaatcattctactataaagacacatgcacacatatgtttactgccacactatttacaatagcaaagacttgcaagcaacacaaatgcccatcaatgatagaatgaataaagaaaatgtgggttccaagatggccgaataggaacagctccagtctacagctcccagcgtgagcgacacagaagttgggtgatttctgcgtttccaactgagataccgggttcatctcactgggacttctcagacagtgggtgcaggacagtcagtgcagcccaccgagcgtgagccraagcatggcgaggcatcacctcacccaggaatcgcaagtggtcagggaattcccattcctagccaagagaagctgtgacagatggcaactggaaaatcgggtcactcccaccctaatactgtgcttgttcaacggtcttagcaaacagcacaccaggagattatattccgcacatggctcggagggtcccacgcccatggagactcactcattgctagcacagcagtctgagatcaaactgcaaggcagcagtgaggctgggggaggggcacccaccattgctgaggcttgagtaggt

SEQ ID NO: 938136 - DNA, 605 bp, Homo sapiens
gtatatatgcaaaggattataaatcattctactataaagacacatgcacacatatgtttactgccacactatttacaatagcaaagacttgcaagcaacacaaatgcccatcaatgatagaatgaataaagaaaatgtgggttccaagatggccgaataggaacagctccagtctacagctcccagcgtgagcgacacagaagttgggtgatttctgcgtttccaactgagataccgggttcatctcactgggacttctcagacagtgggtgcaggacagtcagtgcagcccaccgagcgtgagccaaagcatggcgaggcatcacctcacccrggaatcgcaagtggtcagggaattcccattcctagccaagagaagctgtgacagatggcaactggaaaatcgggtcactcccaccctaatactgtgcttgttcaacggtcttagcaaacagcacaccaggagattatattccgcacatggctcggagggtcccacgcccatggagactcactcattgctagcacagcagtctgagatcaaactgcaaggcagcagtgaggctgggggaggggcacccaccattgctgaggcttgagtaggt

SEQ ID NO: 938137 - DNA, 605 bp, Homo sapiens
gtatatatgcaaaggattataaatcattctactataaagacacatgcacacatatgtttactgccacactatttacaatagcaaagacttgcaagcaacacaaatgcccatcaatgatagaatgaataaagaaaatgtgggttccaagatggccgaataggaacagctccagtctacagctcccagcgtgagcgacacagaagttgggtgatttctgcgtttccaactgagataccgggttcatctcactgggacttctcagacagtgggtgcaggacagtcagtgcagcccaccgagcgtgagccaaagcatggcgaggcatcacctcacccaggaatcgcaagtggtcagggaattcccattcctagccaagrgaagctgtgacagatggcaactggaaaatcgggtcactcccaccctaatactgtgcttgttcaacggtcttagcaaacagcacaccaggagattatattccgcacatggctcggagggtcccacgcccatggagactcactcattgctagcacagcagtctgagatcaaactgcaaggcagcagtgaggctgggggaggggcacccaccattgctgaggcttgagtaggt

SEQ ID NO: 938138 - DNA, 579 bp, Homo sapiens
atctggcaggttcccctctggggccaagcttccagaggaagcagcaggcagaaatctttgcttttctgcagcctccactggtgatacccaggcaaacaggctctggagtggacctccagtcaactccagcagacctgcagaagaggggtccaactgttaaaaggaaaactaacacagagaaagcaatagcatcaacatcaacaacaacaacaaaaaatgaccactcaaaaaccctatctgaaggtcaccaacatcaaaggccaaaggtagacaaatccacgaagatgagaaaaaaccagtgcgaaaaggttgaaaattccaaaaaccaggatgcgtcttctttcccaaaggatcayaacacctcgccagcaatggaacagaactggacagagaatgagtttgataaattgacagaagtaggcttcagaaggtgggtaataacaaactcctccgagctaaaggagcatgtactaacccaatgcatggaagctaagaaccttgatataaggttacaggaactgctaattagaataaccagtttagagaggaacataaatgacctaatggagctgaaaaaca

SEQ ID NO: 938139 - DNA, 578 bp, Homo sapiens
attcggtaaataaaatgtggcatatccaaaaactggaatattactctgtcacagaaaggaataaggaattcgtatatgttccaacatggatgaaccatgaaaatgttatattaagcagcagaaggtaaacacccaaattcacatattgtatgctcccatttacagttggaaatgtgccacataacatttcagtcagcaatggactgcatatatgacagtattcctgtaagattataatactgtatttgtactgtaccttttctatgtttagatacacaaatacttaccattgtgttacaattgtcagagtgttccctacagtaatatgctgtacaggtttgtaacttaggagcaagaggctataccatatagctaggtgtgaagtaggatctaccatctaggtttttgtaagcrcactctgatgtttgcacaatgacaaaattgccttatgacacacttctcacaacatgtccccatcattaagggacacatgactgactgtatatgaaataacaagaccagagaaaaccataaaaacagaaagcagattagtaattgccaggagtttagtggaaggg

SEQ ID NO: 938140 - DNA, 551 bp, Homo sapiens
actcttttcttgcttgcatggtttctgaagataagtctgatgtaattcttaaccttgttcttctataggtgtccactttctgttgctataacagaatacctgagactgagtaatttataaagaaaagaggtttatttagctcatgattctggaggctgggaggtccaagattgggcatctacatctgctcagtttctgaagagggcttcatgctgtgtaataacatggtggaccatgggtgcatgcaaagagaaagatgaagctggctgacctgttttgtaacaacctgctcttgaaagaactaatccagtctcttragaaccgcattaatcccttcatgagggcagagcccccatgactcaaacacctcttaacggctccattacctctcagtactgttatgttgggaatttaatttcagcattaattttagaggggacaaaccacttccatagtattctgcccctggacccccaaaactcacatacttctcacatgcaaaatacaatcattccatctcaatagtaccataaatcttaatgtgttccagc

SEQ ID NO: 938141 - DNA, 482 bp, Homo sapiens
gattaagaaaatgtggcacatatacaccatggaatactatgcagccataaaaaaggatgagttcatgtcctttgtagggacatggatgaagctggaagccatcactctcagcaaactatcgcaaggatagaaaaccaaacaccacacgttctcactcataggtgggaatcgaacagtgagaacacctggacacagggcggggaacatcacacaccagggcctgctggagggtgggggctrggggagggatagcattagaaatacctaatgtaaatgatgaattgatgggtgcagcaaaccaaactggcacatgtatacctatgtatcaaacctgcacattgtgaacatgtatcctagaacttaaagtataataaaatttagaaaaaaagaaagaaagaaaattggagtggtgtggtcacaaaccgagtagtaccaccaaccaccagaaaatggaagaagctagaaacaaattctctccgaga

SEQ ID NO: 938142 - DNA, 610 bp, Homo sapiens
ctggcaggtgcctctctgggatgagtcttccagaggaagacaggcagcaatctttgctgttctgcaggctctgctggtgatacccaggcaaagagggtctggagtggacctccagtaaactccagcagacctgcagcagagaggcctgaattttagaaggaaaagtaacaaatagaaaagaatagcatcaacatcaacawaaaggacgtccacacaaaaaccccatccgaaggtaaccaaggtcaaagaccaaaggtaggcaaatccacaaagatgaggaaaaaccattgcagaaagactgaaaattccaaaaaccagaacacctcttctcctccaaaggatcacaacttctcaccagcaagggaacaaaactggatggagaatgagtgtgacaaattgacagaagtaggcttcagaaggtggctaataacaaactactccaagctaaaggagcatgttctaacccaatgcaaggaagctaagaaccttgaaaaaaggttagaggaattgctgactagaataaccagtttggagaagaatataagtcacctggtggagctgaaaaacacagcatgagaactttgtgaagcatacacatgtatcagtagcc

SEQ ID NO: 938143 - DNA, 610 bp, Homo sapiens
ctggcaggtgcctctctgggatgagtcttccagaggaagacaggcagcaatctttgctgttctgcaggctctgctggtgatacccaggcaaagagggtctggagtggacctccagtaaactccagcagacctgcagcagagaggcctgaattttagaaggaaaagtaacaaatagaaaagaatagcatcaacatcaacataaaggacgtccacacaaaaaccccatccgaaggtaaccaaggtcaaagaccaaaggtaggcaaatccacaaagatgaggaaaaaccattgcaraaagactgaaaattccaaaaaccagaacacctcttctcctccaaaggatcacaacttctcaccagcaagggaacaaaactggatggagaatgagtgtgacaaattgacagaagtaggcttcagaaggtggctaataacaaactactccaagctaaaggagcatgttctaacccaatgcaaggaagctaagaaccttgaaaaaaggttagaggaattgctgactagaataaccagtttggagaagaatataagtcacctggtggagctgaaaaacacagcatgagaactttgtgaagcatacacatgtatcagtagcc

SEQ ID NO: 938144 - DNA, 643 bp, Homo sapiens
caccgagaagaatgaaaagggcaagtggatcctgcacctccaactgtggtatccaggttctctcattggggctgactaggtggttggcgcaacccacggagagtgaagaaaagcagggtggaatgacggcgcacctgggagcctcatggggtaaggggagctcctatccccagcccaggtggtaagtaacccacagatcaagagatccgctcctgagcccacatcaccagggccttgggtcccaagcatagagctgcgcagaccctcggcagccgcttgggttgcagccagcggcagcaggctggaggttgcctaagacgatctcgttcccaggggaggggcgaccaccatcactgcagctccagttggccatcctcccctgcyagtgccagggagactgggcggtttgaaccgggaggaattcccgcagcagagtggctgtggcagatcatgaccagaccgcttctttaggtgggacctggatccagccctcctcaccaggcagggcctccctgtgggaatttcagcaactccacccaggggtttacagacagaattctgtctgtaatgatctccctgatctccctgagacagagcccctagcgggagagactgccaccgtctctgcagtgcagcggactta

SEQ ID NO: 938145 - DNA, 642 bp, Homo sapiens
ggctagctacatgtaggagaatgaaactggatccttatctctcaccctgtacaaaaatcaactcaagatcaatcaacttaaacctaagatctgaaactataaaaattctagaagataacattggaaaaacccttctagacatcggctaaggcaaggatttcattaccaagaacccaaaagcaaatgcaataaaaaacaaagataaatagctgggacctaattaaactaaaagagctttcgtatggcaaaaggaacagtcggcagaataaacagacaacccacagaatgagagaaaatcttcagaatctatacatctgacaaaggactaatattcagaatctacaatgaactcaaacaaagcagtaagaaaaaaagtctcatcaaaaagtgggctaaggacatgaatagacagttctcaaaacaagatctacaaatggccaacaaacttatgaaaaaatgctcaacatcacaaatraccagggaaatgcaaatcaaaaccacaatgtgataccaccttactcctgtaagaatggccataatcaaaacatcaaaaaacagtaatgttggcatggatgtggtgaacaggaaacacttctacactgctggtgggaatgtagactagtacagccactgtggaaaatg

SEQ ID NO: 938146 - DNA, 722 bp, Homo sapiens
aaacagagtaggcacgagaaggttctagaaatatgtggctggctttgctgatatccaaggatatgtgatcattgcaaagcgattcactcctgttgtcttacccatcagaatgcagtagactagaaaccacaagaaatgaacagatgtaaacagaaacactggcccctcatccaggtggcctaagaaacacccacagactctaaagccaggtctggggactgctcctccctccctctttgggctgtcccatcacacacaggcactttccctcgggagggccttccctagaggtgcctctgaccccagggcggggctccctctttccagagctagccattcatccgcacctccatccatccagggcggggctccttctttccagagccagccattcatccgcacctccatccagtcagtggaaatgcacctcttggctggaagcackgggagcatgtctccaccgccaccttgttctcccacggcaggtgccactgagctgggacagaccctgtggtctgtgtccagtgggcctagggactcgcggtcactggagggcgtgagagccacatgtcccgctctccgtgtggtccctgggtggcagtgccctcagaaaacactgattctgctggaccagggcaggggcacagcatggtgggcaccgcctcagtgaccatctcttcctcctcagccatcgactacagtgacagcgccatgctccaagc

SEQ ID NO: 938147 - DNA, 246 bp, Homo sapiens
aagtctctccctaatgtaacatactttttaataaaggaaactgtcagagatgctataatacagaggaaaacgtttatatactctttcattataattttcccacaacttccaaaatgaagaaaaagacatggaaacattaagttcakagaataattgtggcagacaattccctcctcctgaaagttcagttaccccaacacaggcataatttcttactgtctcaaaaggaactgaattcacatacaa

SEQ ID NO: 938148 - DNA, 770 bp, Homo sapiens
gtcccacacaactgaatttggttccgtgtgcatagcagtgttcgctggacatgcctggaagtctgaaggtgtgcccttttataggcaggaattccaccaggatgggtatagcttgtttttttaaaaggcttgggactrgatatgattgcccaagaagacagtgtagacagcgaggagggctgagcatgaatgggatgacctaccagcacaaaaacagcaggcaggaaggcagtaaagaaatcagcagggcccaaaccaggagagtgtggcatgccacggtggagactgaacagaaacaaagccacgggcgactgtagtgttgttccctgttgaaggagagacactctattatagaagacctggacttcagttcagttcagtttccttagtaaaggacaaaatggggagagaagacagggaatcagggaagaaaaactcattcacttatgtgaggcaaacatcgcatgcagtcgtaccaaccaacaaaacatgataagctacaaagaactacggttttcgctactctcaaaacgctactgagattaccaggttttaagcttatttcaagattatttataggtgattccccaactgggaaggtcatttctgaatttcttctcttctaaaatagatctagaaaaattaacaaaccttattccagtaagaaagtttgggatgtactgcttcagcccctgtcctaaggaaattatcaagcctggagggtggggtgctatcaactgcctgccaacatgttaccttctggcatccag

SEQ ID NO: 938149 - DNA, 631 bp, Homo sapiens
aacatcgcatgcagtcgtaccaaccaacaaaacatgataagctacaaagaactacggttttcgctactctcaaaacgctactgagattaccaggttttaagcttatttcaagattatttataggtgattccccaactgggaaggtcatttctgaatttcttctcttctaaaatakatctagaaaaattaacaaaccttattccagtaagaaagtttgggatgtactgcttcagcccctgtcctaaggaaattatcaagcctggagggtggggtgctatcaactgcctgccaacatgttaccttctggcatccagaagcttccctgtgccagatgtagccaccaatgtggggaggagagcacaaagagcagagaatccacagaaaccatacctgcagggagcaaacaccatcacaccccactgctgtgaatgcaaatgcatttacctgttcttaccatctccctcagcattttgaatctattctgggattagacaagctcccagacttaactgctatgtttaataaaaacatggtaaaggaagaatcggggctattaaaatgcttaagaatgagaaagttgaaaaaagaaaaaaagaggtagattgtgtttggcctgtcttctccccaccgt

SEQ ID NO: 938150 - DNA, 621 bp, Homo sapiens
ccaggtgcagtggctcacatctgtaatcccagcactttgggaggccaaggcaggcagatcacttgaggtcaggagttcaagaccagcctggccaacatagtgaaactctgtctttactaaaaatacaaaaattagccgggcatggtkgtgcacacctgtaatcccagtgactcagaaggctgaggcaggagaatcacttgaacccaggaggcggaggttgcagtgaccgagattgcaccactgcattccagcctgggtgacagagcaagactccatctcaaaaacaaacaaaaaataggctgggcgcggtggctcatgcctataatcccagcactttgggaggctgaggtgggtggatcacctgaggtcaggagttcgagagcagcctggccaacttggtgaaaccctatctctactaaaaatacaaaaattagctgggtgtggtggcaggcgcttgtaatcccagctacttgggaggctgagccaggagaatcacttgaacctgggaggtggaggttgcagtgagccaagactgcgccattgcactccagcatgggcaacaagagcgaaactccctctcaaaaaaaaaaaaaaaagaaatcatttcctttgcagcatcat

SEQ ID NO: 938151 - DNA, 655 bp, Homo sapiens
gaatcaaaagaacatacttcaaaatagagccatgggccaggtgcagtggctcacatctgtaatcccagcactttgggaggccaaggcaggcagatcacttgaggtcaggagttcaagaccagcctggccaacatagtgaaactctgtctttactaaaaatacaaaaattagccgggcatggttgtgcacacctgtaatcccagtgactcagaaggctgaggcaggagaatcrcttgaacccaggaggcggaggttgcagtgaccgagattgcaccactgcattccagcctgggtgacagagcaagactccatctcaaaaacaaacaaaaaataggctgggcgcggtggctcatgcctataatcccagcactttgggaggctgaggtgggtggatcacctgaggtcaggagttcgagagcagcctggccaacttggtgaaaccctatctctactaaaaatacaaaaattagctgggtgtggtggcaggcgcttgtaatcccagctacttgggaggctgagccaggagaatcacttgaacctgggaggtggaggttgcagtgagccaagactgcgccattgcactccagcatgggcaacaagagcgaaactccctctcaaaaaaaaaaaaaaaagaaatcatttcctttgcagcatc

SEQ ID NO: 938152 - DNA, 575 bp, Homo sapiens
tcaacaaaggtgccaagaatccaagatgaggaaaggacagtctcttcaataaacgatactggggaaactgaatatccacttgcagaaaaatgaaattgcaacctatctcacccaatatacaaaaatcaactcaaagtaaatgcttaactgtgaaacatgaaattggaaaactactagaagaaaagataggtgaaaatcttcttgacattggtctgggccaagatatttttggatatgactgaaaagcataggcaacgaaagaaaaagtagacaaatgatactgtatcaaactaaaacgcttttgcacagcaaaggagatatttatagagtaaagagacaacctacagaatgggagaaatatctacaaagcatacattcgataataggttaacagrttttttaaaaaaggaattcagacaacacaatagcaagagaacaagttacttctctagaaaatgggcaaagaacctgaaaagatatttctcaacagaagacacacaaatggccaagaggtataatgagaaaatgctaaacatcattaatcatcagggaaaagcaaattaaaaccacaaaga

SEQ ID NO: 938153 - DNA, 646 bp, Homo sapiens
acctaaagcttggggttgagtgacataagcacctctgtggccaccactactgtgactgcattgggtcagacctgaggccagcacagcacggggtcttgcccaagacctgctgtaaccactccttagctattgcaggagtttactgaaggccctggggctctacagtcatcacatcgtaaaaacagccaggcctgtgtccttgccttcaggatggcaagttctcctagcctacaggtggatccacaggtgctgtctgggaatcagggcctagatcaaaaactgtaaaagtctacctagtgttttattgtgctatggctgagctgtcactcaaaccacaagatgcagtccttcccactctttccacccctgtccaaaggcagaggagcatcaatccatggccacctcaaacacaggmcattgggggggtactgccagactaccaccaatgttctcataaggcccaaaggctcttaagtcagtttgtagtgaatgctcccgttaattattttaaaatgcttttttttttttttttttgagatggagtctcaccctgtcacccaggctagagtgcaatggcatgatctcggctcaatgcaacttctgcctcccaggttcaaacgattctcctgcctcagcctcccaaaca

SEQ ID NO: 938154 - DNA, 646 bp, Homo sapiens
acctaaagcttggggttgagtgacataagcacctctgtggccaccactactgtgactgcattgggtcagacctgaggccagcacagcacggggtcttgcccaagacctgctgtaaccactccttagctattgcaggagtttactgaaggccctggggctctacagtcatcacatcgtaaaaacagccaggcctgtgtccttgccttcaggatggcaagttctcctagcctacaggtggatccacaggtgctgtctgggaatcagggcctagatcaaaaactgtaaaagtctacctagtgttttattgtgctatggctgagctgtcactcaaaccacaagatgcagtccttcccactctttccacccctgtccaaaggcagaggagcatcaatccatggccacctcaaacacaggacattgrgggggtactgccagactaccaccaatgttctcataaggcccaaaggctcttaagtcagtttgtagtgaatgctcccgttaattattttaaaatgcttttttttttttttttttgagatggagtctcaccctgtcacccaggctagagtgcaatggcatgatctcggctcaatgcaacttctgcctcccaggttcaaacgattctcctgcctcagcctcccaaaca

SEQ ID NO: 938155 - DNA, 604 bp, Homo sapiens
tgttgctgcctgattgttcctctggaagcttcgtctcagaggggtacctggccgtgtgaggtgtcagtctgcccctactggggggtgcctcccagttaggctacttgggggtcagggacccacttgaggaggcagtctgtcygttctgagatctgaaactctgtgctgggagaaccactactctcttcaaagctgtcagacagggacatttaagtctgcagaggtttctgctgccttttgtttggctatgccctgcccccagaggtggagtctacagaggcaggcaggcctccttgagctgtggtgggatccacccagttcgagcttcctggttgctttgtttacctactcaagcctcagcgatggcaggcgcccctcccccagactcactggcacattgcagttcgatctcagactgctgtgctagcaatgagtgaggctctctgggcgtgggaccctccgagccaggcgcaggatataatttcctggtgtgccatttgctaagaccattggaaaagcgcagtattagggttggagtgacccgattttccaggtgccttctgtcacagctttgcttggctaggaaagggaattccctgacccc

SEQ ID NO: 938156 - DNA, 593 bp, Homo sapiens
acccagatactaaacctacttatacttaaatatatttaatatttttataatataaaaatactattactacccaatagttattttctgctcctctctctcctcctaccattcacctcaggcagggcccagtgtctgttgtcccctccttgtgtccatgtgctgtcatcatttacctcctacatacaagtgataccaggcagtatttggtttactgattatgcattagtttgcaaaggataatggcctccagttccacacaagtcctgtaaaagacacaatatcattttttatggctgcatagcatcccatggtgtatatcttctacattgtctttatcaagtagactattgatgggcatttaggttgattccatgtctttgctattgtgaataatgatgcaatgaacatacrtgtgcatgtgtctttatgacagaatgatttctattcctttggggatatatgcagctctttaagaaattgccacactgcttttccataatggttgcaaagttttcattcccatcaacagtatgtaagtgctccctttgttcagcaaccttgctaacatctgttattttttgactttttaaaaa

SEQ ID NO: 938157 - DNA, 604 bp, Homo sapiens
ttgctaaagttgttttaatagtcctatgagctctacagtacattccttggtatttatatgcagataatcatgttgtctctgaatagagatagtttatttccttccattctgtgttaatttttttttaagtttgcctaattacactggcaaggcaagaacttccaatactatgttggatagaagaggtgagactggatttctgtgccttctataattctagctttatgtttgcttgcttgtccacttgttgtgtataggttctwtttaagatgaaggaagtttttttctatttgtagggtgctaagaagttttattataaataaaagttgaattttatcaattgatttttctgcagaaattgacatgactatgtgatttttttctttattctgttaatatgacggaaaatcaattattttttaaaaaaacagactttatttttagatcagttgtaagttcttagaaaaattcaatagaatgttaagagaattcccatatatgatttgctcccacacagcccacacatgcacaacatcctgctctatcaatgtcccacatcacagtgatacatttgttacaattgataaatctattgacacgtcat

SEQ ID NO: 938158 - DNA, 705 bp, Homo sapiens
tttgtagtaattattctgctttgttttggttgtttttttctagcttcttgagtggaataattagtccatttaatttaaaccatcttgttctttaataaaagcaattaagattataaattttcctctgggaatccctgtgcccatattttataggttttaagttgtagtattctcactgacatttattctaaatagtccataaattccactcttatttcctctttaacacaagtatttttaaactttcaaatrgggaggagggcctagcctttttgctgctgctgttaatatttccttttattgagctgtaattagaaaacataaaataggttttctaattaacttagaaataatgttttccagccgggtgtggtggctcacacctgtaatcccaacactttgggaggccaaggcgggcggatcacgaggtcaggagttcgagaccagcctggccaacatggtgaaaccccgtctctactaaaagaaaaatacaaaaatcagccaggtgtagtggcgcatgcctgttatcccagctactcgggaggctgaagcaggagaattgcttgaacccaggaggcagaggctgcagtgagccgagatcgcaccacagcactctagtctgggcgacagagcaagactccatctcagaaaaaaaaaaaagaaataacattctgcaaagatatgggcagattgttccctctgcct

SEQ ID NO: 938159 - DNA, 705 bp, Homo sapiens
tttgtagtaattattctgctttgttttggttgtttttttctagcttcttgagtggaataattagtccatttaatttaaaccatcttgttctttaataaaagcaattaagattataaattttcctctgggaatccctgtgcccatattttataggttttaagttgtagtattctcactgacatttattctaaatagtccataaattccactcttatttcctctttaacacaagtatttttaaactttcaaatagggaggagggcctagsctttttgctgctgctgttaatatttccttttattgagctgtaattagaaaacataaaataggttttctaattaacttagaaataatgttttccagccgggtgtggtggctcacacctgtaatcccaacactttgggaggccaaggcgggcggatcacgaggtcaggagttcgagaccagcctggccaacatggtgaaaccccgtctctactaaaagaaaaatacaaaaatcagccaggtgtagtggcgcatgcctgttatcccagctactcgggaggctgaagcaggagaattgcttgaacccaggaggcagaggctgcagtgagccgagatcgcaccacagcactctagtctgggcgacagagcaagactccatctcagaaaaaaaaaaaagaaataacattctgcaaagatatgggcagattgttccctctgcct

SEQ ID NO: 938160 - DNA, 641 bp, Homo sapiens
tgttagttatagaccagtaactcctttatgtctcccatttcccctctttttgaaccagaatgtctgtagtagttgtcctatggctatcccaccattgtacctagggtgtgttggggacagataacttgcctcttaagtctcacaaatcagccaggcacggtggctcatgcctgtaatcccagcactttgggaggccaaggtggaaggattgagcccaggagtttgagaacagtctgggcaatatagtaagatctcgtctctataacaaaataaaaataaaaaataattttcttttttttttttgagacggagtctygctctgtagcccaggctggagtgcggtggcgtgatctcggctcactgcaaactccgtctcccgggttcaagcgattctcctgcctcagcctccaggcgcccaccaccactcccggctaattttttgtatttttagtagagacggggtttcaccgtgttagccaggatggtctcgatctcctgaccacatgattcgcccgcctcggcctcccaaagtgctgggattacagacgtgagccactgcacccggccaaaaaataattttttacaaaaaaacaattgtctcacaaatctaaagatggagaaaaatagtagttaagaagcca

SEQ ID NO: 938161 - DNA, 587 bp, Homo sapiens
taaactatgattcttagacttttatcacctcagagatatgctaggaaaatactgtattttttaagaatccctttaaaaactttccttaaagcaataacacaagcattctagatggttccacatagaagcagaaaaaaaatacaagaaagaaagctctatataaccaatccctgatttaaaattgtgaaacaatctcaaataggtccagtcccatttcattaccaaacatctacaagtttatgctctgggtttaccatcttttgatatctcctccctaataccagtgaaagggatatggaaatttgttgatayagatgttactgtagaattaatactgacagtgatcagtgaaatttacattggggtggtaattagttattaatgatttaaaatttttacagtgtcacctttactgtcttctaacgatgtgtgtccaaaacagtatttatacatgagactcttttttttttttttttttttttgagacagagtctcactcactctgtcgcccagcctggagggcagtggtgtgatctgggctcactgcaacctctgcctcccaggctcaagcaattctcctgcctcag

SEQ ID NO: 938162 - DNA, 579 bp, Homo sapiens
gcacggtgactcatgcctgtaattccagcactttgggaggccaaggtgggtggatcacttgagatcaggagtttgagaccaccctggccaacatggtgaaaccccgtctctaccaaaaaatacaaaaactagctggtcgtggtgrcacgtggctggaatcccagctacttgggaggctgagtcatgagattcacttgaattcgggaggtggaggttgcagtgagccaagatcacgccactgccctccagcctgggcaacagagcaaggctctgtctcaccaaaaaaaaaaagaaaaaaaaagaaaaagaagcaaggagaggaaataattgagagttgttgtaaaaccctagaatgtcagtcaacttactgctatggactgaattgtgtccattcaaaattcacatgtggaagtcctaacccccagtacctttaaagatatgactaagataaggtctttagggtggggccctaattcaatataagtggtgtccctataacaagaagaagagacaccaaatatgtgggtgcaggtgagggcacagcaagaaggcaactatctacaagccaagaagagagac

SEQ ID NO: 938163 - DNA, 579 bp, Homo sapiens
gcacggtgactcatgcctgtaattccagcactttgggaggccaaggtgggtggatcacttgagatcaggagtttgagaccaccctggccaacatggtgaaaccccgtctctaccaaaaaatacaaaaactagctggtcgtggtggcacgtggctggaatcccagctacttgggaggctgagtcatgagattcacttgaaytcgggaggtggaggttgcagtgagccaagatcacgccactgccctccagcctgggcaacagagcaaggctctgtctcaccaaaaaaaaaaagaaaaaaaaagaaaaagaagcaaggagaggaaataattgagagttgttgtaaaaccctagaatgtcagtcaacttactgctatggactgaattgtgtccattcaaaattcacatgtggaagtcctaacccccagtacctttaaagatatgactaagataaggtctttagggtggggccctaattcaatataagtggtgtccctataacaagaagaagagacaccaaatatgtgggtgcaggtgagggcacagcaagaaggcaactatctacaagccaagaagagagac

SEQ ID NO: 938164 - DNA, 535 bp, Homo sapiens
tggcatgaacctgggagaaggagcttgcggtgagccgagatcacgccactgcactccagcctgggcgacagagtgagactctgtctcgagataaaaaaaaagaaggtcaaaccaggccgggcacggtggctcacgcctgtaatccttgcactttgggaggccgaggctggtggatcatgaggtcaggagatcaagaccagcctggacaacatgatgaaatcctgtctctactaaaaatacaaaaaattaggcaggcatggtggctcrtgcctgtagtcccagctacttgggaggctgaggcaggagaatctcttgaacctgggaggtggaagttgcagtaagccaagattgtgccactgcactccagcctgagcaacagagcgagactccgtctcaaaaaagaaaaaaaaaaaaaatcaaactagccacaatattcccttaagccaaagcctaattcagaacaaggccctaactgttcagttctgtgaaggctgagagaggtgaggtgagaaagctatagaagaaaagttggaag

SEQ ID NO: 938165 - DNA, 677 bp, Homo sapiens
agaatgtggattgtgaagatttcatggacatttattagttccccaaatgaatacttttatgatttcttacacctgtctttactgcaatctctaaacagaaattgtgaagatttcatggacacttatcacttccgcaatcgatacccttgtgatttcctatgcctgtctttactctcttaatcctgtcatctcgtaaactgaggaggatgtatgtcacctcaggaccctgtgatgattgcgttaactccacaaattgtasagcatgtgtgtttgaacaacatgaaatcttggcaccttgaaaaaagaacaggataacagcaatgttcagggaacaagagagataaccttaaactctgaccaccactgagccagacggaacagagccatatttctcttatttcaaaagcaaatgggagaaatatcgctgaattctttttctcagcaaggaacatccctgagaaagagaatgtgcccctgagggtaggcctctaaaatggcccccttgggtgtggccgtcttctatggtcgaaactgtagggatgaaataagccccagtctcccatagcgttcccaggcttattaggacgaggaaattcccacctaataaattttggtcagaccggttgctctcaaaccctgtctcctgataagatgttatcaatgacaatggtgcctga

SEQ ID NO: 938166 - DNA, 573 bp, Homo sapiens
gcattagagtggttttcaaactttaacaggcgtaagaattatctggagggcttgttaaacagcttcctgggttccacccacccctagaatttctgattcagcaggtctgtgttggggcctgacagtttgcatttgcaacaagtttccaggtgatgctgctgctgctgctctggatctcacacttttgaggcactgatagaaagtaatgatcagtctctgcagtagaccaagtatgaattcataatgcttactataattcctgaatttattyttcccttataaacaaaaaaacccttaaaaggattatatagtagggctaacctggtttgctttagcctatgtgaaatcaaatgtaatttaagctttaattgcaaaacagctaataagtagtatatctttcactgtttttctgttcagcatttattttgactcacgaagttaattcgctttacagatgttactgggtacctaccatgtgtcatatactgtttagagttggggctctagcagtgaattccttctccatggggcttaacgtctagtttgagggagattgacaataaacaaataata

SEQ ID NO: 938167 - DNA, 566 bp, Homo sapiens
ggtggggcttcaccatgttgcctaggctggtcttgaacttctgggctcaagccatctgctcaccttggcctctcctagtgctgggattacaggtgtgagccaccgcgcccggcctagcatatacttttttttttttttttttttttgagacggagtctcgctctgtcacccagcctggagtgcagtggcgtgatctcggctcactgcaagctccacctcccaggttcacaccattctcctgcctcagcctcccgatagctgggactgcaggtgcccgctaccacgcccggctaatttttttgtacttttagtagagatggggtttcaccgtgttagccaggatggtctcgatctcctgaccttgtgatccrtccgccttggcctcccaaagtgctgggattacaggcgtgagccactgcgcccggctgcacatactttttaatgttaacatcatgtaactcttttcatgtcaattaatatatattagattaccattttaagtgatcattaccattttaagtgattacacagtataccattaaatggaaatgctacatttacccagt

SEQ ID NO: 938168 - DNA, 566 bp, Homo sapiens
ggtggggcttcaccatgttgcctaggctggtcttgaacttctgggctcaagccatctgctcaccttggcctctcctagtgctgggattacaggtgtgagccaccgcgcccggcctagcatatacttttttttttttttttttttttgagacggagtctcgctctgtcacccagcctggagtgcagtggcgtgatctcggctcactgcaagctccacctcccaggttcacaccattctcctgcctcagcctcccgatagctgggactgcaggtgcccgctaccacgcccggctaatttttttgtacttttagtagagatggggtttcaccgtgttagccaggatggtctcgatctcctgaccttgtgatccayccgccttggcctcccaaagtgctgggattacaggcgtgagccactgcgcccggctgcacatactttttaatgttaacatcatgtaactcttttcatgtcaattaatatatattagattaccattttaagtgatcattaccattttaagtgattacacagtataccattaaatggaaatgctacatttacccagt

SEQ ID NO: 938169 - DNA, 566 bp, Homo sapiens
ggtggggcttcaccatgttgcctaggctggtcttgaacttctgggctcaagccatctgctcaccttggcctctcctagtgctgggattacaggtgtgagccaccgcgcccggcctagcatatacttttttttttttttttttttttgagacggagtctcgctctgtcacccagcctggagtgcagtggcgtgatctcggctcactgcaagctccacctcccaggttcacaccattctcctgcctcagcctcccgatagctgggactgcaggtgcccgctaccacgcccggctaatttttttgtacttttagtagagatggggtttcaccgtgttagccaggatggtctcgatctcctgaccttgtgatccatccgcctyggcctcccaaagtgctgggattacaggcgtgagccactgcgcccggctgcacatactttttaatgttaacatcatgtaactcttttcatgtcaattaatatatattagattaccattttaagtgatcattaccattttaagtgattacacagtataccattaaatggaaatgctacatttacccagt

SEQ ID NO: 938170 - DNA, 649 bp, Homo sapiens
gctgcttcctggggacacacagacgctggaggggtctaccaggtcctaccattctgctcccacaccagtgaaggtcccatgggcaccagcaacaaagggaggcctgagcatttttctgcatatcattaagaaagtgccccagagcccagcctctgcaggatatggctggggcagggcatcgcttatgaagaatatcaaggtataacaccataatgcatggtgtcacacatgggagggcctcatagatcaccacaggggaagagtgscccaaaggagaaccaaacccaggccatggcataaaggattccggacagacactagctgtgacttcccaacaatggatctttctgacggcacaggatgtttgggggcatttacctgtctgttctgttttgggacatacctctactggccatccccaccttttctttgggaagaccctggttcagtcttcactccagcgggcccaacctgcccctggccccccacctgcctactaccttctcctgcctccaggcattctagcagaccactcttctgagtgcaggccttccaggggagcattcccagacggtctctcagtgccccccatagccctagtgttggtgcttgtttcagtgtgtgaagtggggagaggggtggggcccca

SEQ ID NO: 938171 - DNA, 637 bp, Homo sapiens
acaggtgcatgctaccatgcccagctaatttttttgtttgtttgtagagacagggtcctgctatattacccaggctggtcttgaactcctgggctcaagcaatcctcttgccttggcctcccacactgctgggaatactaggcgtgagccactgcaccaggctgctttttttctttcccagagacctagtttacagcacaccactggttctcactggtttcttttatagaagtattactttgatacaaataaaactatttaaaaaataggatggtattgcccagttgttatgagggcttaagaaaaagaactttctcatacactgcaagtgaaagtgaaaattgttacacatttctagraagaaatttaactatatgcattagaagcattttaaaaataggccaggagcagtggctcatgcctgcaatcccagcactttggaaggctgaggagggcgaatcacttgagatcaagagttccagaccagcctgaccaacatggtgaaaccactgtctctactaaaaatatgaaaattagccaggtgtggtggcaggtgcctgtaatcccagctacttgggaggctgaggcaggagaatcgcttgaacctgggagcagaggttgcagtgagccaagatca

SEQ ID NO: 938172 - DNA, 624 bp, Homo sapiens
cgccgcccgctcgctgcatgagcgcccgagtcctgcttcccacccaccggggcaggcgctcacagactgtgtccactgaacttcatcttgtttttgttattattattattctctctcctctctctctctctctctctctcccctccctctctttttctctcctccccctctctctctcttcctctctgccttcccgtcctccctgtgatccaaacttctgggaaactttttttccgctaaattcctcccttcccgaggaacagggggcaggcggtgcgctcctgtccgaggggtgagggagagggagggggagcaagaaaaagactgagggggaaaaaagccagcccccaaccaatagcgaggagggaacaagagaaactccgagagcgcgaaccaatgasaggaagggagagactgaggcccgggccaaagcgcagcgccagtcgtcccctggatgctcctgggccgactttaacccctggcttcccggtttccccatgggttactccaagagggaggtaggacagttgaaagttgaggtctgatctgcgcctttacaaactcctgcaaatcccaaatccatacgtttttcttccagatctgctggtctcatagacgctgcaa

SEQ ID NO: 938173 - DNA, 603 bp, Homo sapiens
aatgtgggaaagtttggaacttcctagagaattggagggctcagaggacagaaagatgcgggaaagtatggaacttcctagagacttgttgaatggcttggagcaaaatgctgatagtgatgtggacaatgaaatccaggctgacatggtctcagatggagataaggaacttgttgrgaactggaacaaaggtgacttttgctgtgctttagcaaagagactgacggcttttagcctctgccctagatatatgtggaactttgaacttgagagagatgctttgggatatctggtggaagaaatttctaggtagcaaaatgttcaagaggaagtgaaacattaaagtttggaaaatttgcagcctgaccatgcaatagaaaagaaaaacccattttctggggagaaattcaagcctgcatcagaaatttgcataagtaaccaggagcccaatgtgaatcaccaagaaaatggaaaatatgtctccagggcatgttggagaccttcctggtagcccctccatcgcaggcttggaggcttaggagagaaaaagtggattcctgggtccccctgctgtgtgcaggccaggggcttggcaccctgcag

SEQ ID NO: 938174 - DNA, 599 bp, Homo sapiens
catggctagagggagccaaggtaccgttcaggcagtggcttcggagggcgcaggccctgggccttggcagcttccacacggtgttgggcctgcaggtacacaaaggccaggaattgaagtttgggcccctcttcctggatttcagaggatgtgtgcagatgcctggatatccagagattggctrcagggtcagggccctcatggagagcctctgctagggcagtacggaggggagatgtgaggttggaacccccatgcagagtccccactgagacactgcctagtagagccatcagaggagggctcccatcctgcagaccccagaatgtggatctcccaaaggcttgtgcggtgtgcctggaaaagccttagatactcaatgccagcccatgaaatcagtcaggaggggggatgtaccctgcaaagccagagggacagagctgtctcagattatgagaacccaccttttgcattggcgtgacctggatgtgagacatggagtcaaaggagatcattttggagctttaagctttgactgcctcactgaaattcataattgggtggggcctgtagccccttcattttggccaattgctacc

SEQ ID NO: 938175 - DNA, 599 bp, Homo sapiens
catggctagagggagccaaggtaccgttcaggcagtggcttcggagggcgcaggccctgggccttggcagcttccacacggtgttgggcctgcaggtacacaaaggccaggaattgaagtttgggcccctcttcctggatttcagaggatgtgtgcagatgcctggatatccagagattggctgcagggtcagggccctcatggagagcctctgctagggcagtacggaggggagatgtgaggttggaacccccatgcagagtccccactgagacactgcctagtagagccatcagaggagggctcccatcctgcagaccccagaatgtggatctcccaaaggcttgtgcggtgtgcctggaaaagccttagatactcaatgccagcccatgaaatcagtcaggagrggggatgtaccctgcaaagccagagggacagagctgtctcagattatgagaacccaccttttgcattggcgtgacctggatgtgagacatggagtcaaaggagatcattttggagctttaagctttgactgcctcactgaaattcataattgggtggggcctgtagccccttcattttggccaattgctacc

SEQ ID NO: 938176 - DNA, 757 bp, Homo sapiens
tgtctgatctgccctgagagccaagttcccatccaagagtctgctgcctgacaacctgtcagtcactccccaaggagagctccttcccagggtagctccttcccaggctcccttggcctcagggcctgctaggacccaagcaaatgggcaacatgtacagggctttgacaaggaagggaggcagccactcagacgccaacaacagacagacgcacgctttttcagcctcctgctttttaagccgattctctgaacacttagtcccaattctaaattccttaagctcctttgcttactgctttaagagatgcaaacttttcttargcatttctccttcccctggacttcatcctcacttcctaggttggcctacttggttggacatgcctggccactgcacatcctgccctgtgtatcctgttggcctgaatgtgggaccaggaagaaaggagggagggaaagacccacaccatctagggtggggtcatgctgctgaggtcgaatccagagggaagggtgactgttggaattacagactctgctcatcactcctttggggagctgaagttgaggggagtgctgccctgttgtgcttctgtactggttccatttcaacaaacaggcattgatgcctgctctgtgacagaccctatgctaggcccctggtccaggcatgattccagctcctgaagggcttttagactgatagggacaagagctcagcaaacaaataatgaggacgcagatgatcattgct

SEQ ID NO: 938177 - DNA, 749 bp, Homo sapiens
ccttcccccagctgtcccacatctcaaaagaagagctaccgggataaagccttgttgtagctttggccttagccctgtcctggttcttcattctcatctgagcaacaaggctgcataaaagaacagaagccctggggcagtggtgtttgcagggttcagttgactctatctgttatgctcatttgtctgagattccggaagcctttgaatagcacttgtgataattacagaatccccacatatattgatgaaaaacagctacataaatagcaaagcttggtatttgtgaagtgccagttttctgtaaatatagaatgttggcagttactgccgtgtggtttgtctactctctggagccagcactggttttattacagccctttccagggagggttttatatcctgcctacctgtggccagtccactggcctcacaggtacaaytgcaaaaagcaacaggcaatctgagaccaagagaggcaatcctcaatctcttttaagtgtggagagtcctgtttgacatccaaaaaggcttttctgttgttgtttttttgttttgttttgttttgtgacggagtctcgctctgtcacccaggctggagtgcagtggcacgatcttggctcactgcaacctctatctcccagattcacgtgatcttcctgcctcagcctcctgagtagctgggattacaggcatgtatcaccacgcctggctaatttgttcgtatttttagtagagacaaggtttcc

SEQ ID NO: 938178 - DNA, 773 bp, Homo sapiens
gctctttgacttgtcaaagtctcaatttcctcatctgcaaagtggagatggtagaatttacagttcagcaggctgttgggaagacgaaatgttaaacagttacctatttttaaagtacttgtgaactgagttgttggttttccagtcattactgaatttacactgaacctaagattttattctgtgagcagcaaccagatttcctaaatatcagcttctccagaacagtcccaatgtctttaaatacccaaagtttgaaatatagatgaaacagaaaggaaaagttagggtgtaaaaaytctgaaggtagactgcttagacttaaattctggatttgctactttctagctttttaacttaagactactcaagtttcctgtgtctccaatttttcctctgtaaaatagggggttaaaataatatgtgcctcttatggttgttgtaatgaagtaatataaacaaaatacttaataccagtgcctggcacataactaagacctgctatcttataggagatgttaaatgcttgcaaaatcatttagtactttaaaactgcctagactggctgggcatggtggcttatgcctgtaatcccagcactttgggaggccgaggcaggcagattacttgaggtcaggagttcaagaccagcctggccaacatggtgaaaccccatctccactaaaaatataaacattagccgggcatggtggcgcaaacctgtaatcccagctactcgggagactgaagcaggagaatctcttgaattgagg

SEQ ID NO: 938179 - DNA, 632 bp, Homo sapiens
acacacacacaaatataggggtgtgaagtgggaaatcaggggtctcacagccttcagagctgagagccccgaacagagatttacccacatatttattaacagcaaaccagtcattagcattgtttctatagatactaaattaactaaaagtatcccttatgggaaatgaagggatgggccgaattaattgcagcaggaacacgtccttaagacacagatcactcatgcttttgtttgtggcttaagaatgcctttaagcagttttctgccctgggcgggccaggtgttccttgccctcattcctgtaaacccacaaccttccagcttgggcgttaggrccattatggacatgtcgcagtgctgcagagattttgtttatggccagtcttggggccagtttatggctagattttagggggctttctcccaacacaaagtaagtagaagaaaagaaataataaggataagataatcggtgaaaatagagtaccagaaaatcagagaacagtatcaaagttaaaaacttgttttttgtttttttaaaaaagagcaaaattgataaacccctagttaggctgatgaagaaaaggaaataacacaaattaccaatctggaatgagaatggggctatc

SEQ ID NO: 938180 - DNA, 532 bp, Homo sapiens
cccaaactgtggattataggaacaatatttcctgtggcgggttactccctggggtttcttctggctagaattgctggtctaccctggtacaggtatggcatttagtaaatcacattgggaattttaatctgtaatatctgttgtattcctttgctagaggtgccataagacagaaccacaaactgagtggcttaaacaacagacacttattgtctcayggtttcagagactagaagtgaaaatgaaggtgtcactgaattgattctttctaagggctatgatggagggatcccttactggccttcctcgtggcttgcagacatccatcttcttcctgtgtctttcctcagtgcacctctctgtggcctggctccccttttgataaggacaccagtcattggataagggcctcctctaatgaactcatcttaactaattatatctgcaatgaccctgttcccacataatgtcacatcctgaggtgcggagtgttaggacttcaacatatgaatttgggggaaagggagacata

SEQ ID NO: 938181 - DNA, 606 bp, Homo sapiens
taccaggccaattgtggacatcaggcctgagaagggtcctcaggctccaggtggacatcaggcgccaggtgaacatccagcactcagatgaacgttaagcttcaggtagacatcatgcctcaggtgaactccaggccccagctaaacatcaggccccaggtggatgcccaggttccgggtgcacatctggccacagttggacattcaaccccaggtgaccatcaggccatgggtgaatacacggtttccaggtggacatcagatcaaaggkgaacatcagtcctccagtggacatcaggcccaaggtgaacactgaactagaggtttacatcaggccacacgttgacacctagtcccaggtggacatcaggccccaggtggatacctaggctcccagtgaatttgacaccaggttgacattcaggcccccagtggtcatctggcctcatgtgaacactcagtccccaggtgcacatgatgtctcaactggacaccaaatccctagtttgatacccaaggcccaggtggacaccaggtccaaggctgacactcaagccttaaatgaataccaaagtctaggtgaataattcaacccaggtggtcatt

SEQ ID NO: 938182 - DNA, 606 bp, Homo sapiens
taccaggccaattgtggacatcaggcctgagaagggtcctcaggctccaggtggacatcaggcgccaggtgaacatccagcactcagatgaacgttaagcttcaggtagacatcatgcctcaggtgaactccaggccccagctaaacatcaggccccaggtggatgcccaggttccgggtgcacatctggccacagttggacattcaaccccaggtgaccatcaggccatgggtgaatacacggtttccaggtggacatcagatcaaagggraacatcagtcctccagtggacatcaggcccaaggtgaacactgaactagaggtttacatcaggccacacgttgacacctagtcccaggtggacatcaggccccaggtggatacctaggctcccagtgaatttgacaccaggttgacattcaggcccccagtggtcatctggcctcatgtgaacactcagtccccaggtgcacatgatgtctcaactggacaccaaatccctagtttgatacccaaggcccaggtggacaccaggtccaaggctgacactcaagccttaaatgaataccaaagtctaggtgaataattcaacccaggtggtcatt

SEQ ID NO: 938183 - DNA, 606 bp, Homo sapiens
taccaggccaattgtggacatcaggcctgagaagggtcctcaggctccaggtggacatcaggcgccaggtgaacatccagcactcagatgaacgttaagcttcaggtagacatcatgcctcaggtgaactccaggccccagctaaacatcaggccccaggtggatgcccaggttccgggtgcacatctggccacagttggacattcaaccccaggtgaccatcaggccatgggtgaatacacggtttccaggtggacatcagatcaaaggggaacatcagtccyccagtggacatcaggcccaaggtgaacactgaactagaggtttacatcaggccacacgttgacacctagtcccaggtggacatcaggccccaggtggatacctaggctcccagtgaatttgacaccaggttgacattcaggcccccagtggtcatctggcctcatgtgaacactcagtccccaggtgcacatgatgtctcaactggacaccaaatccctagtttgatacccaaggcccaggtggacaccaggtccaaggctgacactcaagccttaaatgaataccaaagtctaggtgaataattcaacccaggtggtcatt

SEQ ID NO: 938184 - DNA, 606 bp, Homo sapiens
taccaggccaattgtggacatcaggcctgagaagggtcctcaggctccaggtggacatcaggcgccaggtgaacatccagcactcagatgaacgttaagcttcaggtagacatcatgcctcaggtgaactccaggccccagctaaacatcaggccccaggtggatgcccaggttccgggtgcacatctggccacagttggacattcaaccccaggtgaccatcaggccatgggtgaatacacggtttccaggtggacatcagatcaaaggggaacatcagtcctccagtggacatcaggcccaaggtgaacactgaactagaggtttacatcaggccacacgttgacacctagtcccaggtggacatcaggccccaggtggatacctaggctyccagtgaatttgacaccaggttgacattcaggcccccagtggtcatctggcctcatgtgaacactcagtccccaggtgcacatgatgtctcaactggacaccaaatccctagtttgatacccaaggcccaggtggacaccaggtccaaggctgacactcaagccttaaatgaataccaaagtctaggtgaataattcaacccaggtggtcatt

SEQ ID NO: 938185 - DNA, 776 bp, Homo sapiens
gactaaaatttttaaatgaaagctataagatctttgtgtgtatatgtgtttatgtgtgtttagacacatatgcatgtgttatgttgtatgttgtatatacataatacaatctggcatagttggccagaaatcctttaaggaattcttttcaagttggcttagagataagatatgcaaatgacacttaaaagtgtaaaaaaaaaaaaamcccaaatgccttttagctcatgggattcatatgaatctttgataaataaattggttttaaatttgttggtaaaataaaaatttgtttcagaattgttagcttacattttgttgcctgggtttgctggttagacaggattacattgatctctgttagatgttttacagtcataaaactataaattcagcttaggccaggtgcagttgctcatgcctgtaatcctagcactttgggaggccaaggtgggtggatcacctgaggtcaagagttcgagaccagcctgaccaacatggtgaaaacctgtctctactaaaaatacaaaaattagccaagcatggtggtggcctcctataatcccagctacttgggaggctgtgtcaggagaatcactggaagccagggggcagaggttgcagtgagctgagatcatgccacttcactctagcctgggtgaaagagtgaaactccatctcaaaaaataggtaaaataaaataaaatatattcagcttaatagcaaaatagattttgtttgtgtagctctttaaaaaagatgactaatattgttgg

SEQ ID NO: 938186 - DNA, 772 bp, Homo sapiens
cgctgtcagctgaggagagcatcaggaagtgccagggaagctcggatctgccttgctctgggaggggtaagtgaggtctctcagggcttcccacggcctctccatcacaattcaaatgaattcaatgcacacacatctttttgtttgtttgtttgttttttgttttctgctttttggtttttttgttttttatttttttattttattttttattattatattttaagttttagtgtacatgtgcgcaatgtgcaggtttgttacatatgtatacatgtgccatgatgatgtgctgcatgcattaactggtcatttagcattaggtatatctcctaatgctatccctccccgctgcccccaccacacaacagtccccagtgtgtgatgttccccttcctgtgaccatgtgttctcattgttcaattcccacctatgagtgagaatatgccgtgtttggttttttgtccttgcratagtttgctgagaatgatggtttccagtttcatccatgtccctacaaaggacatgaactcatccttttttatggctgcacagtattccatgctgtatatgtgccatatttccttaatccagtctatcattgttggacatttgagttggttccaagtctttgctattgtgaatagtgccgcaataaacatacgtgtgcatgtgtctttatagcagcatgatttataatcccctgggtatatgcccagtaatgggatggctgagtcaaatggtatttctagttctagatccctgaggaatt

SEQ ID NO: 938187 - DNA, 682 bp, Homo sapiens
  misc_feature 1, 2, 3, 4, 5, 6, 7, 8, 9, 10, 11, 12, 13, 14, 15, 16, 17,18, 19, 20, 21, 22, 23, 24, 25, 26: n = A,T,C or G
nnnnnnnnnnnnnnnnnnnnnnnnnnagtttatatggacattgaagggacttatagcgaaaccagtcttgaaaaagaatgaagttagaggattcacattcccagatctcaaaaattactacaaaccaaatcaagaagtatgccagtatacatggcataagagtagacatatatataatataattatatgaatatatatatatgcatgtctgtgtgtgtttatatatgtgtgtgtgtatatatataaattccattttacatatgtatatatatatatacaccartaaaactgaattgagattctggaagtacatcctaacattgatggtcaattgatttttgacaagggtaccaagactattcagtgggggaaatggtagtattttaacaaatggtgctggaataactgaacagccacatgaaaaagattgaagttacacctttacctcacaccatatacaaaaattgaatcatcgacctaaactataaaactcttagaagaaaaattggtgtacatattcatgatagtaaattaggcaaagttttcttagaaaagacacaaaaatcacaagtcacaaaagataaaatagatacatttaacttcattaaaattaaaaatacttatgttccaaaggagaccatcaaaaagtgaaaaacgcttcatattatggaaggaaatattt

SEQ ID NO: 938188 - DNA, 724 bp, Homo sapiens
actgaacagccacatgaaaaagattgaagttacacctttacctcacaccatatacaaaaattgaatcatcgacctaaactataaaactcttagaagaaaaattggtgtacatattcatgatagtaaattaggcaaagttttcttagaaaagacacaaaaatcacaagtcacaaaagataaaatagatacatttaacttcattaaaattaaaaatacttatgttccaaaggagaccatcaaaaagtgaaaaacgcttcatattatggaaggaaatatttacaagtcatgtatctyatgagagatttgttttcagaatgtaaaaacacagaccacattaaaaagaaaaataacccaattaaaatgggaaaagcatttgaatagacagttctccagaaaagttgtataattaccaataaacacaagaaaactgctcaacatcattagtcattatggaaatgcaaatacgaactacaatgagatacctcttcccactcctaggataaccaaaattaaaagtcagacagaaataagtgttggcaagaatgtggaggaattagaatcctcatgcgttgctggcagaattgtaaaatggtacagacactttggaaaacacatacagttctttaaaatgtgaaacagagtaactcaggaattttatttctaggaaaatttttatatacctaagaaaattttttaaaaacacatgttcatgtaaaacttgtac

SEQ ID NO: 938189 - DNA, 724 bp, Homo sapiens
actgaacagccacatgaaaaagattgaagttacacctttacctcacaccatatacaaaaattgaatcatcgacctaaactataaaactcttagaagaaaaattggtgtacatattcatgatagtaaattaggcaaagttttcttagaaaagacacaaaaatcacaagtcacaaaagataaaatagatacatttaacttcattaaaattaaaaatacttatgttccaaaggagaccatcaaaaagtgaaaaacgcttcatattatggaaggaaatatttacaagtcatgtatcttatgagagatttgttttcagaatgtaaaaacacagaccacattaaaaagaaaaataacccaattaaaatgggaaaagcatttgaatagacagttctccagaaaagttgtataattaccaataaacacaagaaaamtgctcaacatcattagtcattatggaaatgcaaatacgaactacaatgagatacctcttcccactcctaggataaccaaaattaaaagtcagacagaaataagtgttggcaagaatgtggaggaattagaatcctcatgcgttgctggcagaattgtaaaatggtacagacactttggaaaacacatacagttctttaaaatgtgaaacagagtaactcaggaattttatttctaggaaaatttttatatacctaagaaaattttttaaaaacacatgttcatgtaaaacttgtac

SEQ ID NO: 938190 - DNA, 638 bp, Homo sapiens
cagagtaagactccatctcaaaaaacaaaacaaaacagaacaaaacaaacaaacaaaacccctggcggccaggcgtggtggctcatgcctgtaatcccggcactttgggaggccgaggcaggcagatcatgaggtcaagagatcgagatcatctggccaacatggtgaaaccccgtctctattaaaaatacaaaaataagctgggcatggtggcatatgcctgtagtccsagctactcgagaggctgaggctggagaatcgcttgaacccaggaggcagaggttgcagtgagccaagatggtgccattgcactccagcctggcgacagagcaagacctccgtctcaaaaaaaaaaaaaacccacaatgcaataccaccttactcctgcaagaatggccattaaaaaaaaaaaaaaagatattggtgtggatgcagtgaaaaggaaacacttctacactgctgatgggaatgtaaactagtacaaccactatggaaaacagtgtggagattccttagagaactaaaagtagaaactaccatttgatccagcaatcccgctactgagtatctatccagaggaaaagaagtcattaaatgaaaaagacacttgtacacgcatgtttatagcagcacaatta

SEQ ID NO: 938191 - DNA, 681 bp, Homo sapiens
gaggttgagtgagccaagatcatgccactgcactccagcctgtgcgacagagtaagactccatctcaaaaaacaaaacaaaacagaacaaaacaaacaaacaaaacccctggcggccaggcgtggtggctcatgcctgtaatcccggcactttgggaggccgaggcaggcagatcatgaggtcaagagatcgagatcatctggccaacatggtgaaaccccgtctctattaaaaatacaaaaataagctgggcatggtggcatatgcctgtagtcccagctactcgagaggctgaggctggagaatcgcttgaacccaggaggcagaggttgcagtgagccaagatggtgccattgcactccagcctggcgacagagcaagacctccgtctcaaaaaaaaaaaaaacccacaatgcaataccaccttactcctgcaagaatggccattaaaaaaaaaaaaaaagatattggtgtggatgcagtgaaaaggaamcacttctacactgctgatgggaatgtaaactagtacaaccactatggaaaacagtgtggagattccttagagaactaaaagtagaaactaccatttgatccagcaatcccgctactgagtatctatccagaggaaaagaagtcattaaatgaaaaagacacttgtacacgcatgtttatagcagcaca

SEQ ID NO: 938192 - DNA, 702 bp, Homo sapiens
gctcctacagctgatcctgaggaaaaaccccttcctaattaaaaaagataagtgaaaacctacataatctttaacacctctccttgcccatttaatggaatccttttactgtttcatcacattattaagcagcatactaaccatactctttgcagtaggactatatctgtacctcctgccaggacraaagtcttaatcacatcaaccttttttctatcatccttccttctgacagcaatttactcctacctttaactcagactggataaaatgatctcatcttccagggcactctctttaccttcctacttactctttgcctatctatccctcctgattccttggataccctacatagtcacccatccctttccactagctcctaattacctctacgagactctcaatttaacctactctctgttaagccagttcagtccttccctggcaaatgactgttggctttgtacctctctatcaaccactgcttacgttgccactcccattcccgcaaaactgggtctttattaacttaacctaccactcctgttaagaaggaaaagaccctttccaacttctaaatatgcaatcattagctgacttccccatctctgataggaccaaaaataccctaataggacatgcaatccagcttttacgctcttacatttccaacctcacctattacacgagcaatgaaaa

SEQ ID NO: 938193 - DNA, 653 bp, Homo sapiens
taacattaaaacagagattctgagactgatgaaacagactttttttttttttttttttttttgagatggagtctcactctgtcgcccagcctagagtgcagtggcttgatctcggctcactgcaagttccgcctcctgggttcacaccattctcctgcctcagccttccaagtaggtgggactacaggcacccgccacsatgcctggctcattttttgtatttttagtacagacagggtttcaccatgttagccaggatggtctccatctcctgacctcgtgatccgcccacctcggcctcccaaagtgctgggattacagaaacagactttttatagcaatcggataccaaattccaacctgactctactatagcatcacataacacacagcaggccctgaaagaaattgaagtattttaccccaaaatacatttttagacatattttgagatggccttgcaaagctatttcttgtggggattatctacattctgtagagaacccttttctttccaggttgttcctctgatccaggagagaattaactaagagtctcccacttttttaggtctaataagagttctgaagtctgctatttgaaggcttcatctgcatgataaaaccttggcctccacaaccccttatcttaat

SEQ ID NO: 938194 - DNA, 604 bp, Homo sapiens
ctattaccttgatatgttagacatatcagggggaattctaattcgcaagactgagatttgcaaagaaacatgacacttacaaatcactggatccagcctttgaataaggatcatgaactacctacttagacaccgtgtaagcaccagaagcactagtagtggttagtgaggggattagggagaaagagactagctgttttgtttgtttgtttatttgtttgtttgttttgtttttgagacagtctcactctgtcgcccaggctggagtgcagtggtgcaatctcggctcactgcaagctccgcctcccgggttcaagccattctcctgccttagcctcccaagtagctgggattacaggtgaccaccaccatgcccagctaattttttgtatttttagtagagacggggtttcaccgtgttagccatgatggtctsgatctcctgacctcgtgatccgcctgcctcggcctcccaaagtgctgggattacaggtgtgagccaccgcgcccggcctttttttttttttttttttaaagaataactgggatttaatagtccattgtggggcccaggaatatgtattggaaaacattccactggcaa

SEQ ID NO: 938195 - DNA, 618 bp, Homo sapiens
cctctcccctcccaggagttttgaggatggagatgaaattcccaaccttctaatcctgtctggttttctggtgaccagcttccatccagaagctacctaggggcagccagctaacagtcatctcattagcatataaaagayactttgatcacttcagaggctattccaagggttgcaggagcttcttgccaggagacaggacaaaaaccaaatatatatttcacaatatcaaaccaggtgacattactccagataaaattgactctggattggtaaacaaactgcatctggactggaggactgagtaaactatgactggctggtaggaagccatggattggggttttctgagcacattgccactcagtgataagtaactgggcccatcttttgctgggatcctcgaagccatgccactgggaccattacaagagatactggtctatggaacaggttagggcttccaagcaacatcatcctagcactcagcagtgtggttttgttccccagcaccggagctatcacgagggaggggcagattgggctaacagctcctggattgctctgagaagccctcctgctggagaagcctgcctgtccccaccctctggcacgctg

SEQ ID NO: 938196 - DNA, 618 bp, Homo sapiens
cctctcccctcccaggagttttgaggatggagatgaaattcccaaccttctaatcctgtctggttttctggtgaccagcttccatccagaagctacctaggggcagccagctaacagtcatctcattagcatataaaagatactttgatcacttcagaggctattccaagggttgcaggagcttcttgccaggagacaggacaaaaaccaaatatatatttcacaatatcaaaccaggtgacattactccagataaaattgactctggattggtaaacaaactgcatctggactggaggactgagtaaactatgactggctggtaggaagccatggattggggttttctgagcacattgycactcagtgataagtaactgggcccatcttttgctgggatcctcgaagccatgccactgggaccattacaagagatactggtctatggaacaggttagggcttccaagcaacatcatcctagcactcagcagtgtggttttgttccccagcaccggagctatcacgagggaggggcagattgggctaacagctcctggattgctctgagaagccctcctgctggagaagcctgcctgtccccaccctctggcacgctg

SEQ ID NO: 938197 - DNA, 618 bp, Homo sapiens
cctctcccctcccaggagttttgaggatggagatgaaattcccaaccttctaatcctgtctggttttctggtgaccagcttccatccagaagctacctaggggcagccagctaacagtcatctcattagcatataaaagatactttgatcacttcagaggctattccaagggttgcaggagcttcttgccaggagacaggacaaaaaccaaatatatatttcacaatatcaaaccaggtgacattactccagataaaattgactctggattggtaaacaaactgcatctggactggaggactgagtaaactatgactggctggtaggaagccatggattggggttttctgagcacattgccactcagtgatawgtaactgggcccatcttttgctgggatcctcgaagccatgccactgggaccattacaagagatactggtctatggaacaggttagggcttccaagcaacatcatcctagcactcagcagtgtggttttgttccccagcaccggagctatcacgagggaggggcagattgggctaacagctcctggattgctctgagaagccctcctgctggagaagcctgcctgtccccaccctctggcacgctg

SEQ ID NO: 938198 - DNA, 737 bp, Homo sapiens
tgtcttgtaaaactctcacaagaatctctcttgtgacccaccataacctgtagaaaaggaaattcttggaaacataacttggcttagccagttggatacattacaaacccaagtgttaagtggagacaattggtaggaactactttctcattggaagacagatagggttacaggaagaggagatatgttgagcaagggcacagatgtgaggtatggggtatgtttgagaatcaataactagcctagtttttcagacatttggactgtaggaataggaatatatgaaactaaaataaagtttggagtaaaacaaagcaattcttgaatgctagatgacaaaaytaatgccatgttgaatggagaaaatattaaaagttgctaagcaggtgaatgccatttttggaaatttaatctgtcaagtaggtacacgattgaacagaggagggaaggactaaggcaggagataagcttgctgccaaacagaggacttggcctcatttttgctccatcctagttctcaagccttggagaggcatgaaagggcacaggagccactcaactgctccatggcattcagttgctagctcttgtgctctgtgtgatccttcagccccttagttctagtaacaaatttctctctatctctcaaatacccctcactgtgcccaagaggtcttttgcaataatcgatgattggtgtgacaacaagagatacaaggtttttctgagaggatcag

SEQ ID NO: 938199 - DNA, 579 bp, Homo sapiens
tctgttagctcctgcattgttttttcatgattcttagctttcttgtattgggtttcaatgttctcctgcatctcaataatcttcattcctatccatattctgaattctatttctgtaatttcagcccacttcagaacgtgtgcttgagagttttatgtggtcgtttggaaaaaaagaaggcattctggctttttgaattgtcagagttcttgtgctgatactttttcatatttatgggcttgtctaccttcagtctttgaagtttctgatctttggatttgttttcttttatcctgtttgatgactttgagggtttgattgtggtataaggtggatttagccaactggcatcatttctggaatattttagggggccaacattcagccaccaactcctaaactacatgctctaattctgggggacttgtrttgggcctcgaccttgttctctggctccttaaggttaggaatctactgcactagggtggccgaggtgctcctggactgctggtcactacattcagatgggtggtgttagccaaaatgtttaatagtgtggtcatagctggatccatcctc

SEQ ID NO: 938200 - DNA, 556 bp, Homo sapiens
ggcgtggtggctcatacctgtaatcccagcacttcgggaggccgaggtgggcagatctcttgaggtcaggagtttgagaccagcctggccaacatgatgaaaccccgtctctactaaaaatataaaaattagccaggcgtggtggcatgcacctgtaatcccagctacttgggaggctgaggcaggagaatcctttgaacccgggaggcggacgtgacagtgaactgggatcgtttccactgcactacaacctgggtgacagagtgaaactccatctcaaaaagaaaaaaaaaaaaaagaaagatagaaagaaaaacagaacaagcaaaaaaaacaaaaacaaaccaacaaaaaacagaaataaactgtcttccaaataaaagtacrggaaatcttagtggagaaagtaacgtattagtgcctatgacacacacaagtgaatgtacaggtgacccttgaacaaggccagtttgaactgcatgggtcccccttttacagggattttttccagcaaatcgcagatccaaaatatagcattggagggaggcaaaattca

SEQ ID NO: 938201 - DNA, 558 bp, Homo sapiens
gaagggatttcagctgcaacccaccaaaaccaactcagttcaattaaaagagaacaagacatagttaaagaactttaaggaggtgcttagttttactggagaatcacatttttccactcactttcccactctacctgaaggacgatgtcatgccttctccttcttgtcaaacttgcaacctaaattcataattttgtgtcgatcacacacacacacacacacacacacacacacggaaaatacaattaaagccattagaaaagatgccactagaacatttgtctacttacttgtatctcagtccacagtttcagtggaaactttagtcggcatggtggctggcgcctgtaatcccagctactctggaggctgagrcaggagaatcacttgaatccaggaggcagaggttgcagtgagctgaggtggtgccactgcactccagcctgggtgacaagagtcaaactctgtttcaaaaaaaaaaacagaaagaaagaaagaaagcctaaagcagttgttcataaacatacaggggcagagtcataaacatacaggggcaga

SEQ ID NO: 938202 - DNA, 609 bp, Homo sapiens
agacctaaatgtaagagctgtaattataaaactcttaaaagaaaactaagtgtaaatctttgtgaccttgaaacaatggcttctttaatgtgacaccaaaagcacaagaaacaaaataaaaaatggataactggactgcatcaaaattaaaaagtttaatgcttcaaaagatactagcagcgaggtgtggtggctcaygcctgtaatcccagcactttgggaggctgaggtgggaagatcgcttgagtccaggagtttgagaccagcctgggcaacatagtgtgatctcatatctacaaaaaaaaattttaaaaattagccaggcttggtggcacacacctgtgatcccagctacttgggaggctgaggcgggaggattgctggggcctgggaagttgaggcttcagtgatttgtgttcaggccactccattcaagcctgagcaacagaaagagatgtctccaaaaaaaaaaaaaaacagataaaataacaataaaaacctattactattataacagttttttaaaggaaaataactattttccaaagcaaacaaatatttagtgagatgagagtcattctacatttttactaatctcattaatgtctg

SEQ ID NO: 938203 - DNA, 609 bp, Homo sapiens; identical to SEQ ID NO: 928731

SEQ ID NO: 938204 - DNA, 618 bp, Homo sapiens
gggatgacctgactacagagaggagctacccactgcaggtctcccctgagctgttctaacactcaataaatctcctctttgtcttgctcaccctctgcttgtctgcatacttcattcttcctggatgcaggacaagaattcaggcaaaagcgccatcaggcacagaggtttctggccagaaaagcaacaccccaaaaatcctgtacgatttgtggggggctygtctgggatctgcagaaggttgagtaaaagcagatctttctgtccttttttttttttttggagtctctaaactacacagcagtcaaaatgaaagaaaaataccaggcctctgttagccagttaaaagtgactagcgtgggtgctgcacaagacacagaatacaggcttgctggggaggacactgtcaatcccccatccccctcacgggctggaaacattggctttgttccaacccagtttttcttcacaagggtctggccgtagcatgggaccagaaagaggtcctgggtagggcaactgagggtatttgactgaggctacacctcagtgttatccaaaggcccctggactaactcctgtccccagccaccgattaggatgtcagcactaggagct

SEQ ID NO: 938205 - DNA, 618 bp, Homo sapiens
gggatgacctgactacagagaggagctacccactgcaggtctcccctgagctgttctaacactcaataaatctcctctttgtcttgctcaccctctgcttgtctgcatacttcattcttcctggatgcaggacaagaattcaggcaaaagcgccatcaggcacagaggtttctggccagaaaagcaacaccccaaaaatcctgtacgatttgtggggggctcgtctgggatctgcagaaggttgagtaaaagcagatctttctgtccttttttttttttttggagtctctaaactacacagcagtcaaaatgaaagaaaaataccaggcctctgttagccagttaaaagtgactagcgtgggtkctgcacaagacacagaatacaggcttgctggggaggacactgtcaatcccccatccccctcacgggctggaaacattggctttgttccaacccagtttttcttcacaagggtctggccgtagcatgggaccagaaagaggtcctgggtagggcaactgagggtatttgactgaggctacacctcagtgttatccaaaggcccctggactaactcctgtccccagccaccgattaggatgtcagcactaggagct

SEQ ID NO: 938206 - DNA, 618 bp, Homo sapiens
gggatgacctgactacagagaggagctacccactgcaggtctcccctgagctgttctaacactcaataaatctcctctttgtcttgctcaccctctgcttgtctgcatacttcattcttcctggatgcaggacaagaattcaggcaaaagcgccatcaggcacagaggtttctggccagaaaagcaacaccccaaaaatcctgtacgatttgtggggggctcgtctgggatctgcagaaggttgagtaaaagcagatctttctgtccttttttttttttttggagtctctaaactacacagcagtcaaaatgaaagaaaaataccaggcctctgttagccagttaaaagtgactagcgtgggtgctgcacaagacacagaatacaggcttgctggggaggacactgtcaatcccccatccccctcacgggytggaaacattggctttgttccaacccagtttttcttcacaagggtctggccgtagcatgggaccagaaagaggtcctgggtagggcaactgagggtatttgactgaggctacacctcagtgttatccaaaggcccctggactaactcctgtccccagccaccgattaggatgtcagcactaggagct

SEQ ID NO: 938207 - DNA, 672 bp, Homo sapiens
ctctctgctgagaggtgaacactcatcaggatgacctgccaacagagaggagctacccactgcaggtctcctctgagctgttctaacactcaataaagcttctcttagttttgcccaccctccacttgtgtgcgttcctcattcttcctggatgcgggacaagaatgaaggcaaaggcaccactggccacacaggtttccagccacaaaagcaataccccaaagatctcgtaacattgtgatggaaataaatcagttgatattttcaactttaaataatgagattcagaaactattatagagtttatacaagcacaagcttaaggatggccacctggaaaacacaggctccaaaagaatgggtcagcattgcaaagtgggaaagtaagatttttacttatatagacagtgaatggggctgcaaccctctctacacgagatcactatacacattacagtgatttgattggttacagcttgctacgttccaaggaagawtgctttaacattccatgaggaggggtgatgatctaaaggggtcttatccttggtgtcatctctgtggcctttcctaatcatttataggaaaaagcagaagttgtaactgcatgctatgtgactcagaccacatagccagccaccacatgcctctcaaggctcaaaatagtttaaa

SEQ ID NO: 938208 - DNA, 745 bp, Homo sapiens
ctacttccacccctttctaagaactggtagctcatatatgtcatctccttattctcgttctctctttctctctttcctactctctctctctcctgctaatattttaatgggtaaaagttccattaaaaaaatctattgcaaaatatttcatcatcattttttttctgtatcaatatttctatattttctgtcagtgttaatcatctttcwgtaagttctgattctgtttgtttatcatctatatttaaaatagcattttatcaatggtttttagtttctctgtattactaatcataataaattgcagtttcctggtgtgacaacttgcaggtttcctggggtgagctgggaagctgactttcttcccctttttatgtagtctcagaggccatatgggtgattcttttctgttcgtttatttgtttgttttgagaagaggtatcactctgtcacccaggccgtagtgcagtggccaaatcttggctcactgcagactccccttcccaggttcaagcgattctcctgcctcagtctcttaagtagctgggactacagtcacgcacctccacacctggctttttttttttttttttttttttttagtggagacagagtttcaccacattggtcagactggtctcgaactcctgacatcaagtgatccacctgcctcggcctcccaaagtgctttataggcatgagccaccacgtctggcctggatgattctttacacagccatgttgg

SEQ ID NO: 938209 - DNA, 745 bp, Homo sapiens
ctacttccacccctttctaagaactggtagctcatatatgtcatctccttattctcgttctctctttctctctttcctactctctctctctcctgctaatattttaatgggtaaaagttccattaaaaaaatctattgcaaaatatttcatcatcattttttttctgtatcaatatttctatattttctgtcagtgttaatcatctttctgtaagttctgattctgtttgtttatcatctatatttaaaatagcattttatcaatggtttttagtttctctgtattactaatcataataaattgcagtttcctggtgtgacaacttgcaggtttcctggggtgagctgggaagctgactttcttcccctttttatgtagtctcagaggccatatggrtgattcttttctgttcgtttatttgtttgttttgagaagaggtatcactctgtcacccaggccgtagtgcagtggccaaatcttggctcactgcagactccccttcccaggttcaagcgattctcctgcctcagtctcttaagtagctgggactacagtcacgcacctccacacctggctttttttttttttttttttttttttagtggagacagagtttcaccacattggtcagactggtctcgaactcctgacatcaagtgatccacctgcctcggcctcccaaagtgctttataggcatgagccaccacgtctggcctggatgattctttacacagccatgttgg

SEQ ID NO: 938210 - DNA, 773 bp, Homo sapiens
aattcctctctttgtactttttctctttatttctcagaccggccaacacttagggaaaatagaaagaacctacattgaaatattgggggcaggttcccccaataagggagaaaaacaaaaataagcccagcctacatcacactcagtactaatcagtaggtcagctcactctctgacctgctttcttgtagttgtttgcctgttgccttagaatcacatagaccctacattatggttcccttaactgctctacagataacaacttcggcattatgaaatgttaagttttccactggagacattctttcaggtcctgtgtaccagcraaactactgacatccactggtcagaaggacgtcgtgagaaactgactaaccaataaatgcagttgccacatcctgatgatttcattccccttactctgaccaatcaatgactccagttttccagcccctcgctctccatgattctcttaaaaactccagcccagaactcctcatggagatggatttgagggtatcctcccatctcctcattcagtgctctgcaatcattaaactttctctgctacaaaccctgctgtgtcagtgtattgatctcttactgtgcagcaggaatatgaaactgttggtccaataacaactgggagatcgacattgtagcagggtgttgcatgcctaccctcctccccaacagaacttgaaagtcaccaagacctagcattttcagaaccccaaccaacaactaaactagcctgggtaggctccttccat

SEQ ID NO: 938211 - DNA, 633 bp, Homo sapiens
agctgaattctaccagaaatacaaagaggagctgctaccattccttctgagactattctgaacaattgaaaaggagggactcctccctagctcattttatgaagccagcatcatcctcttaccaaaacctggaagagacacaacaaaaaaagaaaatttcaggccaatatccctgttgaacatcaatgcaaaaatcctcaatataatattggcaaactgaatccagcagcacatcaaaaagtttatccaccatgatcaaatcagcttcatccctaggatgcaaggctgtttccacatacacaaatcaataaatgtaatctatctcataaacagaaccaaagaaaaaaactacatgattatttctcyatagatgcagaaaatgccttcaataaaattcaacatcccttcatgttaaaaactctcaataaactaggtattgaaggaacatctcaaaataataagagctatttataacaaacccacagccaatatcatattgaatgggaaaaagctggaatcattccctttgaaatcaggtacaagacaaggatgccctctctcaccactcctattcaacatagtattggaagttctggccaggacaatcaggcaagagaaaaaaataaagggtat

SEQ ID NO: 938212 - DNA, 584 bp, Homo sapiens
aaggtgttttgaagcataaaaattttgatgaagtccattttatcatttttttcttttttattttcacttatgctttaagtgtcatatgtaaaaacacattgttattccaagaccacagagatttatctctacatgtttttttctaaaagttttacaattttagctcttacgttagatctgtgaccattctgagttaatttttgtgaatgatgtgagatagaattcagttgaaattctattgcattgatctatacatctttactgtgccagccagcaccacacttgtcttgattacygtagctgtgtactaagttttggaatcgggaagagtgagtcttcccacctcgttatttttaaagattgtttgtggattcctcgtctcttgcatttgcatatacattttaggatcaacatcattttctgcaagaaaaaaaaaggcagctgggtttcaatagagactgcactgaaaccgtagaggaatgtggggattattgccatttaagtattattaaaccttctgatgaatgcacatgggatgtctttccattcatttaggtcctctttagttatttttcccaacactt

SEQ ID NO: 938213 - DNA, 548 bp, Homo sapiens
cgtctggtcctgggcattttttgggtggtaggctattaactattgcctcaatttcagaacttgttattggcctattcagggatttgacttcttcccagtttagtcttgggagggtgtatgtgtccaggaatttatccatttcttctagattttctagtttatttgcatagaggtgtttatagtattctctgacggtagtttgtatttctatgggatcagtggtgatatcyccttgatcatttttcattgtgtctatttgattcttctctcttttcttctttaatagtctggctagcagtctatttattttgtttatcttttcaaaaaaccagctcctggattaactgatttttttgaagggtttttcatgtctccatttccttcagttctgctctgatcttacttatttcttgtcttctcctagtatttgaatttgtttgctcttgcttctctagatcttttaatgtaatcttttattgtgatgtttgggtgtcaattttggatctttcctgctttatgttgttctccaaactggttattccagttac

SEQ ID NO: 938214 - DNA, 575 bp, Homo sapiens
ctccagcctgggcaacagagccagactccatctccaaaaaaaaaaaaagaaaaaggctttgaaggtcatacatctccatctttttaaaagattatgaagcctcaaaatcaagcaaaccacacacacgcacacactaccaacccagtacaatcattctgttaaatattttaccttgcaatatttttttaaattgtgtcagacaaaagaaaatcttgtttggcctgctttttgtcctttacccaaagtgggacagtttggacatccctggtgaaacactcatacacttaaatgcagaggcaggaattatagygcatcccctccaacatcagtcagaacccacctcacagagccccctaatgaatagataaattatcagttaatagggatgaaggcagggatcaaatggctcagatctggccgggcacagtggctcgcacctgtaatcgcagcactttgggaggccaaggtaggcagatcacctgaggtcagggagttcgagaccagcctggccaacctggtgaaaccccgtctctaccaaaaatacaaaaatcaggcgggcatgatggtgggtgcct

SEQ ID NO: 938215 - DNA, 821 bp, Homo sapiens
gggctcttcgaccgtttggctacataaatgtgctagagcaacagagcgagcggctcgcaggccaatctgccagtgttggttcgctgggaaagggggcgaaaccgaggacacttttaagctgaccagattggggttggctgccctacctgcggggtggctgtggggagttaccctcagctctgaagatgcctccccttaactgaaaacgtctttggccggtaaagccgcccacgcgggccgcgcctcttccaagtctgcgcaggccgcctttgtccctgcagtgactgccgcgagggcaaggagcgagcgcggagaatgtcaccagagtttattgaagtgkttataagccgagaactctggtttttgcggggaggcggagtgcttatccaacttcactggagcaaaaattctgtgggcctagaatcccaggaggcctctgcgcaccctcgctgggcgagccggagtcccggcctctcccgaggatacgaagccgggggtcaaagcttgcccccgcgccatactcctttgcctcgtcgaactttcagcacggtcccattcagtctggaatttcagctcaagacccgggccaaaagttccctgcggagttggtatattaacatccgcgttcgcttttccaagggggttgaggggctccggacaacttctagcagctcccgggcgccctccagggaccgcccccacccagtttctgcgcagctcgggcccccaccgtcgcctcgcgacctcagatcttggcctcccacggccgcgctcagggaagctattgcaactgatgcgccccgggtgctttcgttttgctt

SEQ ID NO: 938216 - DNA, 821 bp, Homo sapiens
gggctcttcgaccgtttggctacataaatgtgctagagcaacagagcgagcggctcgcaggccaatctgccagtgttggttcgctgggaaagggggcgaaaccgaggacacttttaagctgaccagattggggttggctgccctacctgcggggtggctgtggggagttaccctcagctctgaagatgcctccccttaactgaaaacgtctttggccggtaaagccgcccacgcgggccgcgcctcttccaagtctgcgcaggccgcctttgtccctgcagtgactgccgcgagggcaaggagcgagcgcggagaatgtcaccagagtttattgaagtgtttataakccgagaactctggtttttgcggggaggcggagtgcttatccaacttcactggagcaaaaattctgtgggcctagaatcccaggaggcctctgcgcaccctcgctgggcgagccggagtcccggcctctcccgaggatacgaagccgggggtcaaagcttgcccccgcgccatactcctttgcctcgtcgaactttcagcacggtcccattcagtctggaatttcagctcaagacccgggccaaaagttccctgcggagttggtatattaacatccgcgttcgcttttccaagggggttgaggggctccggacaacttctagcagctcccgggcgccctccagggaccgcccccacccagtttctgcgcagctcgggcccccaccgtcgcctcgcgacctcagatcttggcctcccacggccgcgctcagggaagctattgcaactgatgcgccccgggtgctttcgttttgctt

SEQ ID NO: 938217 - DNA, 657 bp, Homo sapiens
ttggaacctcctggagacttgttgaatggttttgacaaaaatgctgatagtggtatgaacaataaggtccatggtgcggtggtctcagatggagatgaggaacttgttgggaactggaacaaaggtgactcttgctatgttttagcgaagagactggtggcattttactcctgccctagagatctgtggagctttgaacttgaaagagatgatttarggtatctggtggaagaaattcctaagcagcaaagcattcaaaaggtgacttgggtgctgttaaaagcattctgttttaaaagggaaacagaggataaaagttcagaaaatttgcagcctgacaatgcagtagaaaagaaaaaccattttttttttaaggtgaaatttaaggcggctgcagaaatttgcataagtagcaagtaacctgttaatcccctagaccatggggaaaatgtctccaggccatgtcagagaccttcatggcagcccttcccatcacaggcccgggggcccaggaggaaaaagtggttttgtgggccaggcccagggtccccatgctgtatacagcctagggacttggtgccctgtgtcccagccgctccagccttggctgaaaaaggccaacacagagctcgggctgcagcttcagagggtggaagc

SEQ ID NO: 938218 - DNA, 788 bp, Homo sapiens
aaacattgccacatggttacaggtcatgctctcaaggatgtaaaacaagatggaggcctgcagcgaagtttgctgctgactatacagaaagtcatgcaaagcacaccagattggctacagcttaagacaaaccttacagatcctttttcatagttaaaactttacagagaatataaacaatgatccttatcatttctggcctagtaaaatgtcttctaaaaagaaaaaagaaaaaactcttacttaaaagttaactgctgacagggtagagaaaaggaaaaagtttaaagtgcagggttggaaagacacctggaggaagaacctcttactcttaaatgcaartgggttcttccaacagggagagaaacttaagaggggagcaggggagctgccagtttgcctgtctatccagaaaaagaaggaaaaggctgacattcccaacccctgggagcaacagtggttggggggggagggaggcatagttttctctaccttcagaagttcgaggacaaaaaggcttagaagcaaaaggaaaaaagtttttggtttgcatcttactcttcctcaagtcctacatctgggtgccaaaatgtagcagaattttgctccttagttcagctaaaaccagaatcttgtcacacgatcaggaaaatttaggcacgtggacacattgaagggtgagtagagcaggattttattgggtgaaagggaaaaaaagaataaaactcagcaaagcaaaatgtagtcctgctaacaggccccccccacctcacagattgattcccagg

SEQ ID NO: 938219 - DNA, 788 bp, Homo sapiens
aaacattgccacatggttacaggtcatgctctcaaggatgtaaaacaagatggaggcctgcagcgaagtttgctgctgactatacagaaagtcatgcaaagcacaccagattggctacagcttaagacaaaccttacagatcctttttcatagttaaaactttacagagaatataaacaatgatccttatcatttctggcctagtaaaatgtcttctaaaaagaaaaaagaaaaaactcttacttaaaagttaactgctgacagggtagagaaaaggaaaaagtttaaagtgcagggttggaaagacacctggaggaagaacctcttactcttaaatgcaagtgggttcttccaacagggagagaaacttaagaggggagcaggggagctgcyagtttgcctgtctatccagaaaaagaaggaaaaggctgacattcccaacccctgggagcaacagtggttggggggggagggaggcatagttttctctaccttcagaagttcgaggacaaaaaggcttagaagcaaaaggaaaaaagtttttggtttgcatcttactcttcctcaagtcctacatctgggtgccaaaatgtagcagaattttgctccttagttcagctaaaaccagaatcttgtcacacgatcaggaaaatttaggcacgtggacacattgaagggtgagtagagcaggattttattgggtgaaagggaaaaaaagaataaaactcagcaaagcaaaatgtagtcctgctaacaggccccccccacctcacagattgattcccagg

SEQ ID NO: 938220 - DNA, 607 bp, Homo sapiens
gaaaggaaagtttggaaaataagatatccacattgggctttgaaaagctctgacatattcctggaaatctagaaggtgacatgcatgctcagtgttgtgtgtatgcccaggtaatacctaagatggccctaatctgtcacctctgtctgaccttgaggcttccggcaagcagggagtgaaggcacggtagagttgtaaactgcctgcaaaagcattgaaagtgtgctccaacatgcacrtagagctcacttggcaaaggcagggagacttacttgtttgaggtaattatggaaacctctgtctaatcataagctaaccactaaactaacagtaaaacttcaaggatcatacacaatatattacagatgacatgatcttgcgtatagaaaaccataagaaatctactaaaaagctattagaatcagtaagtaaaatcagtgaggttgcagaatacaagatcaacatgcaacactgcatttctatacagtagcaatgaataatctgaaaataaaattaataaaataattcaatttaccatagcataaaaaagagcaacacactaagaaacacattgaacataagaattgtaagacttacattataaact

SEQ ID NO: 938221 - DNA, 607 bp, Homo sapiens
gaaaggaaagtttggaaaataagatatccacattgggctttgaaaagctctgacatattcctggaaatctagaaggtgacatgcatgctcagtgttgtgtgtatgcccaggtaatacctaagatggccctaatctgtcacctctgtctgaccttgaggcttccggcaagcagggagtgaaggcacggtagagttgtaaactgcctgcaaaagcattgaaagtgtgctccaacatgcacgtagagctcacttggcaaaggcagggagacttacttgtttgaggtaattatggaaacctctgtctaatcataagctaaccactaaactaacagtaaaacttcaaggatcatacacaatatattacagatgacatgatcttgcrtatagaaaaccataagaaatctactaaaaagctattagaatcagtaagtaaaatcagtgaggttgcagaatacaagatcaacatgcaacactgcatttctatacagtagcaatgaataatctgaaaataaaattaataaaataattcaatttaccatagcataaaaaagagcaacacactaagaaacacattgaacataagaattgtaagacttacattataaact

SEQ ID NO: 938222 - DNA, 617 bp, Homo sapiens
gagaaaggacacttacttctacacttcacacctgtaaggtgaatttaaatttgttttgtaaccacttgttgtgggacttggagtcttaatcatttcttctgagcttcaaccttgtcttccaaaggtactttagattttctacatctaatggtggcaaataaatccactagctgccaaatacatgggaaatgacctgtgaaaaccacaagtggcccaacaaactgtacgtcttcaatttgacagcacaaaggaattattggttagtatttcattggttgaatcttttgtttaatctggcctggaatattagtattaaaagacttaaaaatttatttggaaataattccaaacttactagaagttgctaaaataaaaatagtacaaggaatagtcatgtatccttcacccaaatttgcctrttcttaacatttcactccatttgcttaatcttttgctctctctttctctttctttcttcatgatgttttttgaaccaattgagagtacgctacatatatcatggctctttctccctaaatgctttgagtatttcttaaggataagaatattctcttctattgttttatccacagaacagaagctgaaaaagcatactg

SEQ ID NO: 938223 - DNA, 765 bp, Homo sapiens
agagtatgactaactacagacctctacccttgacccaccatccaacatttacatccatcattttgcaacttctttcatttttttatttttttgagacagagtctcgctctgtcgcccaggctggagtacagtggcacgatctcggctcactgcaacctccaccttctgggttcacgccatctcctgcctcagcctcacaagtagctgggactacaggtgcccaccaccacgctcggctaattttttgtatttttagaaacctaacacggctttcaccgtgttaggccaggatggtctcgatctcctgacctcgtgatctgcccaccttggcctcccaaaatgctgggattacaggcatgagccactgtgcccggccttgcaacttctctaaatagaattctttgccagatggaaacaactcaccaaaatattaacagcttcattgccytctgctggagttttgagagttggtttctgttttttggtttttgcctgcttatttttccccttcatgggcatctgctaccaagtgccagaatcaagctggcttggtctaggctttgcaactgcaaggttaacagtcaaaattggttatactcttggtacaaaccatagtatttagtatctactcaactataccttagagaactcaaatgttaaaataggcttttttcatatgaagcgggtagggccacaaggaagcaagtatcagcactgcataaagaatactcaaggttttatgtgttttaggaaatgaggtgtgaa

SEQ ID NO: 938224 - DNA, 765 bp, Homo sapiens
agagtatgactaactacagacctctacccttgacccaccatccaacatttacatccatcattttgcaacttctttcatttttttatttttttgagacagagtctcgctctgtcgcccaggctggagtacagtggcacgatctcggctcactgcaacctccaccttctgggttcacgccatctcctgcctcagcctcacaagtagctgggactacaggtgcccaccaccacgctcggctaattttttgtatttttagaaacctaacacggctttcaccgtgttaggccaggatggtctcgatctcctgacctcgtgatctgcccaccttggcctcccaaaatgctgggattacaggcatgagccactgtgcccggccttgcaacttctctaaatagaattctttgccagatggaaacaactcaccaaaatattaacagcttcattgccttctgctggagttttgagagttggtttctgttttttggtttttgcctgcttatttttccccttcatgggcatctgctaccaagtgccagaatcaagctggcttggtctaggctttgcaactgcaaggttaayagtcaaaattggttatactcttggtacaaaccatagtatttagtatctactcaactataccttagagaactcaaatgttaaaataggcttttttcatatgaagcgggtagggccacaaggaagcaagtatcagcactgcataaagaatactcaaggttttatgtgttttaggaaatgaggtgtgaa

SEQ ID NO: 938225 - DNA, 635 bp, Homo sapiens
cgtgttggtcaggctggtctcagactcctgatctcaaatgatctgcctgcctcggcctcccaaaatgctgggattacaggtgtgagccattgtgcctggcctgactccatactcttaaccacagtgtcatagtcgaagatatgcatatactaggttaacttcattttgtcctttagtgtacctgagggcttggagggagtgtttttgtrataaagtcattaaacattgagctgatatataaacgaataagaatatgaattcaaggttgtatcttccaaactaggggaaaaaagggtattttattcttgaactagttgcaagaataggatgcttttggggtcgtccatagtctgggtgtcttctgcatgtttatggtagaagacgtgaagaaaaagacaatccaatttatgttttgtttctacaactaatttgtgaatgggagactagttcataaatataatatttctttcattaaatatgactgaaataaataatgtcaagtggtatttcagaacattacaaataaattgttgggatttccaagtttcaaagattgttcttgtaggctaaaggatcttgtgaattaagccaaaaactaagtttgatatagttgaagaataaaccacgttttttaa

SEQ ID NO: 938226 - DNA, 563 bp, Homo sapiens
aataccatgaagaaaattaaaagagtggaatgcaagcaacttggggatgccatttatattgcaagggaggaggggagaggtgttcaaggaaagcctcttggaggaggtgacatatgaacagaatcctgaaaggtgagggggaggtatccatgcaaagatgtggaggcagcatgttcctgaaggagggaacagcaagtacgaagtccctaagcggacacaacactgatatgttcaagkaaggagagattattgtgtgcagagggtgagaggggcctgcaaggaggctgaagagatggtcaggaggcagacaaggccgggccttgtggacaggcgatgaaggcaggctttattttgtgtgcagggagggtttaagcacagaggtagcatgatccttcctgtggcattaaagtggtttctggctgctgggaggaaaaagaattggagaagctggagaggaatggagaagccatggagctgaagccagatggtagaaagaggggaacaaggacagaagtatttttgaagcagagcaggccccgggattgctgatggctttgatcacc

SEQ ID NO: 938227 - DNA, 474 bp, Homo sapiens
ctctctaagtgaccccatggggcttgctttaaaaagccttctgggctaggcgcggtggctcacgcctgtaatcccaacactgggaggctgaggcgggcagaccacgaggtcaggagttcgagaccagcctggccaacatagtgaaaccctgtctctactaaaaatacaaaaaaattagccgggcgtggtggcaggcgcctgtaattccagctactcgggaggctgaggcaggagaatcacttgaacatgggaggtggaggttgcagtaagccgagatcrtgccattgcactccagcctgggtgacaattgtgaaactcttgtctccaaaaaaaaaaaaaaagggaggaaaggaagaaagcctcatttccttgtggtgattcatccctccaggaagcctcctacagtagtcaggtttctctcccattactgaatcttttcggctcctatgggttcagctctcccgccttgtcgga

SEQ ID NO: 938228 - DNA, 786 bp, Homo sapiens
ctactcacttattcgctgggtgagttgcttcacttctttgaacgtcagtcttccctctgcgggaaagtaacaatgcatgccctcctgccttacagtatgtgaggtatttgtttctgggtatcctattattaaatgtgattaaataatcattaatagcaacacagcctttccaatctcaccctgccaggcctgtaggtaaaccctcagtgttggctgagggtaggttgggggagtggttaaataatggtccacagacttggccactcattggaattacctggacatttacaagagcatactgatgcctgacttactccaaccctcctgcattctgaattaatttatatggggtgaccagggcatcagatgtttttttagacaaggtctcagtctgtcccccaggctggagtgcagtggcacgatcacggctcactacaggctcgacctcttgggttcaattctcccaccttagcctcccaagtagcaccaaggactataggtgcatgccactatacccggctaatttttaaatttttaatagagacaaggtctcactctattgcctaggctggttttaaactcctgagctcaagccatcttcccrtcttggcctcccaaagtgctgagattacaggtgtgagccactgtgcccagccatgcatcagaatttttgaaagttccccaggtgattctaatgggcagccaagtttgaaaaccactgggtaaaagccagtacaaatgaactaaagagaatgagtctttaagcagcaacctgagctgtagata

SEQ ID NO: 938229 - DNA, 639 bp, Homo sapiens
gtgatttaaactatatgatattctggaaatggcaaagctatgcagaaagtaaaagtatcagtgactgccaggtgcttagtggaggaaatacataggtggggcacacaggattttaaggcagtgaaactattctggataatactgtaatggtgcatacatgtcactgtacatttgctcaaatccttaccatgcaggacaccaaaagtgaccctaaagtaagccatgagagctacctcccccattcagtatcccacttgtaaatcaggagtgctactctaagayaagggtgccattgtctctacctctagcacgagagctgtggtgcagaggtttcattcaggggatggggaggcctaagaacagacatggggaggttcaaacctaagggtgatgtttaaattaatggtgattttggtggtaatcaattaagaggagagcttcatgatagcaacaagctaaactgaagaccagctagaagtttaacagagagaaccagggaaagaaacagctaagaagagcccttctggggtcggaaaaaaatctcactgcctagcctcaaagactatttctgcaaaggggcctgaatcagactgtggagaagtgtatgatgcatgattttatggaatacaatagagaaat

SEQ ID NO: 938230 - DNA, 639 bp, Homo sapiens
gtgatttaaactatatgatattctggaaatggcaaagctatgcagaaagtaaaagtatcagtgactgccaggtgcttagtggaggaaatacataggtggggcacacaggattttaaggcagtgaaactattctggataatactgtaatggtgcatacatgtcactgtacatttgctcaaatccttaccatgcaggacaccaaaagtgaccctaaagtaagccatgagagctacctcccccattcagtatcccacttgtaaatcaggagtgctactctaagataagggtgccattgtctctacctctagcacgagagctgtggtgcagaggtttcrttcaggggatggggaggcctaagaacagacatggggaggttcaaacctaagggtgatgtttaaattaatggtgattttggtggtaatcaattaagaggagagcttcatgatagcaacaagctaaactgaagaccagctagaagtttaacagagagaaccagggaaagaaacagctaagaagagcccttctggggtcggaaaaaaatctcactgcctagcctcaaagactatttctgcaaaggggcctgaatcagactgtggagaagtgtatgatgcatgattttatggaatacaatagagaaat

SEQ ID NO: 938231 - DNA, 651 bp, Homo sapiens
agagagagaagcacaagatatgagaaatgaataaattttaggtggtaaaaaatgactggacttcatattatattgttaataggggaataagacagagagggatttaatgcatgactcgctggttttttatttgtataaatggaagaatgttggtgtcagacacagaggtcagaagtctgaaagtgggcaagtttgggaagaaagatccaagatttggtattagacatcatgggttttgcaatcaaaatggaaatgtgtcatttgtatatattgggtagttaaacacagcttaaatggaaaaacagaccttcagaaagtactgtagtacattaattttgcacaaagtagcactaatttgatacrcatctctaattgctctcacttaaagcagtttcaagacaaataataaactctttttaattgcaacgttgtaaaaaacacttttctatgctgtttattctctaggaaactatgctatataaacatattatataagctattccttttccagaatttgttcagatatccacaaactgagactcagaccacacacatttacgctgccgatgtcagcacagcatgtattcagaacctggagaatttcgcagattggggttttagatgttggggtgactttctgagttggtgaaa

SEQ ID NO: 938232 - DNA, 596 bp, Homo sapiens
ggccaacatagagctcaagctgtggcttcagagggtgtaagccccaagccttggcagcttccatgtggtgttgagcctgcaagtgcacagaagtcaaggattggggtttgggaacctctgcctagatttcaggagatgtatggaaacacctggatgcccaggcagaagtttgcctgtacccccatcgtatctaggaagtaactaacttgcttttgattttacaggctcataggtggaacggacttgccttgtcttggatgagactttgaactgtggacttttgagttaatgctgaaatgagttaagactttgggtgactcttgggaaggcatgattgtttttgaaatatgaggacatgagatttgggagggacyggggcggaatgatatggtttggctctgtgtccccacccaaatctcatcttgaattgtactcccacgtgttgtgggagggacctggtgggagataaatgaatcatggggcagttttccccatactattctcttggtagtaaataagtctcatgagatctgatggttttttaaaggatttctgcttttgcttcctcctcattctcttctcttgtctgccgccat

SEQ ID NO: 938233 - DNA, 723 bp, Homo sapiens
gatcatgaagatgaagtgtcaaaaaagtccaaatatgttgtattagttcattctcaaattgctataaaaaatagctgaaactgggttatttaaaagaataggtttaattagctcatgattgtgcaggctatacaggaagcacggtagcatttttttctggggaggcctcaagaagattccaatcatggcagaaggcaaaggggaagcaaggtgtctcacaaggcagcaacaggggcaagaaagagagcaacggggaaagtgctgcacaatttttttttttttttttttgagacagagtctcactctgttgcccaggctggagtgcagtggcatgatcttggctcactgcaagctccgcctcccaggttcatgccattatcctgcctcaacctcctgagtagctggaactacaggcactggccaccaygcctggctaatatttttgtatttttggtagagatggggtttcacaaacagcgtatgtcacaagaactcactcaccatcatgagaacagctccaaagggataatgctaaaccattcgtgagaaatctacccccatgatccaaccacctcccatcaggtcccacttccaacattggggactacagtttgacattagctttggtgtgaacacagatccaaattatattattccacccttggctcccccaaatctcatgtccttctcacatttcaaaataaaataatgctttcccactta

SEQ ID NO: 938234 - DNA, 861 bp, Homo sapiens
caatttttttttttttttttttgagacagagtctcactctgttgcccaggctggagtgcagtggcatgatcttggctcactgcaagctccgcctcccaggttcatgccattatcctgcctcaacctcctgagtagctggaactacaggcactggccaccacgcctggctaatatttttgtatttttggtagagatggggtttcacaaacagcgtatgtcacaagaactcactcaccatcatgagaacagctccaaagggataatgctaaaccattcgtgagaaatctacccccatgatccaaccacctcccatcaggtcccacttccaacattggggactacagtttgacattagctttggtgtgaacacagatccaaattatattattccacccttggctcccccaaatctcatgtccttctcacatttcaaaataaaataatgctttcccacttattcccaaagtcttaactcactgtagcattaactcaaaagtctgaagttcaaagtctcattacagacaaggcaagtccyttccacctacaagcctgtaaattaaaaaaaaaatcaggttagttacttccaatatacaattgggatactggcaatgggtaagtactattattctgaaaggcgaaaataaactggccaaaagaaagcagccacaggcccagtgtaaatccaaaacccagcaggacagtcattaaatcctaaagctccaaaataatctcctttaacaccatgccccacatcatccagggcatactgatatggcaggtgggttccctagggcttgggcagctccacccctgtgactttggtgggttgggccaccatggctgctctcacaggctggcatt

SEQ ID NO: 938235 - DNA, 536 bp, Homo sapiens
tccaacattggggactacagtttgacattagctttggtgtgaacacagatccaaattatattattccacccttggctcccccaaatctcatgtccttctcacatttcaaaataaaataatgctttcccacttattcccaaagtcttaactcactgtagcattaactcaaaagtctgaagttcaaagtctcattacagacaaggcaagtcccttccacctacaagcctgtaaattaaaaaaaaaatcaggttagttacttccaatatacaattgggatactggcaatgggtaagtactattattctgaaaggcgaaaataaactggccaaaagaaagcagccacaggcccagtgtaaatccaaaacccagcaggacagtcattaartcctaaagctccaaaataatctcctttaacaccatgccccacatcatccagggcatactgatatggcaggtgggttccctagggcttgggcagctccacccctgtgactttggtgggttgggccaccatggctgctctcacaggctggcat

SEQ ID NO: 938236 - DNA, 606 bp, Homo sapiens
ccattccaccatgattataagtttcctgaggcctccccagccatatggaactgtgaatcaattaaacctcttttccttatgaatacttagtctcaggtatttcttcaaagcagcatgagaacagagtaatatagcaaattggtaccaggagttgggtactgctataggaatacctgaaaatgtggaagcaactttggaactgggtaacatgaagaggttggaacagtttggagggctcagaagaagaccrgaagttgtgggaaagtttgggacttcccagagacttttaaatgtctttgaccaaaatgctgatagtgatatgaacaatgaagtccaggctgaggtggtctcaaatgaagatgagaaacattttagaaactggagtaaaggtcacatttgctatgttttagtaaagagactggaggttttttgcccttgccctagagatctgtggaaatttgaacttgagagaaatgatttagggtatgtagcagaaaaaatttctaagcagcaaagcattcaagagaggacacagcataaaatttgggaaaatttgcagcctggaaaatgcagtaaaaaagaaaaaccaattttctggggagaaac

SEQ ID NO: 938237 - DNA, 626 bp, Homo sapiens
tctctcacttgaaatcaaaagctagaaatgattaagcttagtgaagaaggcatactgaaagccaaaataggctgaaagctgggcgtcttgtgccaaatagttaggcaagttgtaaatgcaaaagaaaagttattgatagagatcaaaatcctacagcagtgaacacgcaagtgataagaaagcaaaccaccctcattgctgatatggagaaagttttattggtctggatgaaatatcaaaccaaccacaaaacttcattaagctgaagcataatccagagcaatgccccaactctcttcaattctatgaaagctgagagaagtgaagaaacttcagaagataagttggaaattagcagaggttgattcatgacgtttaagtaaagaagccatctccataacataaatgtrcaaggtgaagaaacaagtggtgattgagaagctgcagcaagttatctagaaggtctagctaagataattgatgaatgtggctacactaaatgacagattttcaatgtagatgaaacagccttctattagaagatgccatctaagactttcctagctaaagagaagaagccaatgactagcttcaaatcttcaaaaagcaagctgactctcttgtta

SEQ ID NO: 938238 - DNA, 626 bp, Homo sapiens
tctctcacttgaaatcaaaagctagaaatgattaagcttagtgaagaaggcatactgaaagccaaaataggctgaaagctgggcgtcttgtgccaaatagttaggcaagttgtaaatgcaaaagaaaagttattgatagagatcaaaatcctacagcagtgaacacgcaagtgataagaaagcaaaccaccctcattgctgatatggagaaagttttattggtctggatgaaatatcaaaccaaccacaaaacttcattaagctgaagcataatccagagcaatgccccaactctcttcaattctatgaaagctgagagaagtgaagaaacttcagaagataagttggaaattagcagaggttgattcatgacgtttaagtaaagaagccatctccataacataaatgtacaaggtgaagaaacaagtggtgattgagaagctgcagcaarttatctagaaggtctagctaagataattgatgaatgtggctacactaaatgacagattttcaatgtagatgaaacagccttctattagaagatgccatctaagactttcctagctaaagagaagaagccaatgactagcttcaaatcttcaaaaagcaagctgactctcttgtta

SEQ ID NO: 938239 - DNA, 576 bp, Homo sapiens
tgcctcggtagtgtgttcatttttcttgctgagtagtattccattgtttggatgtaccacacatcatactcattcatttaccaattgtttctagtgttgggctagaataaagccattaaaatattcacatgtaggtttttttataaaaatatgttttatatctctttggtaaatacttaggagtaggattgcagggttgtatggtaagtgtatatttcacttttttaaagacarggtcttattctgttgcccaggttggagtgcagtggcacaatcacagctcgctgcagcctagatctctgaggctcaagctatccttccacctcagccgcttgagtagctgggattacaagcatgcaccaccatgcccaactaacagtgcatgtttcaactttgtaaaagaaagtgttaaactgttttccaaagagactgtattttgcactaactcagggcacgtgacttcatccaaacttctgcactaagtgatgaccagctttctagcatgtcttctagcagtgcaaagttgtgtccttaagatgaccccagccccacattaaaattcctgcctgagaaagc

SEQ ID NO: 938240 - DNA, 642 bp, Homo sapiens
actgctctcttcaaagctgtcagacagggacattcaagtctgcagaggttactgctgtctttttgtttgtctgtgccctgcccccagaggtggagcctacagaggcaggcaggcctccttgagctgtggtgggctccacccagttcaagcttcccaactgctttgtttacctaagcaagcctgggcaatagcgggcatccctcccccagcctcgctgccaccttgcagtttgatctcagactgctgtgctagcaatcagcgagactcygtgggcgtaggaccctccaagccaggtgcaggatataatctcctggtgcgctgttttttaagcccgttggaaaagtgcagtattcaggtgggagtcacccgattttccaggtgccatctgtcacccctttctttgactaggaaagggaactccctgaccccttgtgcttcctgagtgaggcaatgcctcaccctgctttggctcacgcatggtgtgctgcacccactgtcctgagcccactgtctggcactctctagtgagatgaacctggtacctcagatggaaatgcagaagtcacccgtcttctgcgttgctcatgctgggaactgtagaccggagctgttcctattcagccatcttggctcccaaccaat

SEQ ID NO: 938241 - DNA, 642 bp, Homo sapiens
actgctctcttcaaagctgtcagacagggacattcaagtctgcagaggttactgctgtctttttgtttgtctgtgccctgcccccagaggtggagcctacagaggcaggcaggcctccttgagctgtggtgggctccacccagttcaagcttcccaactgctttgtttacctaagcaagcctgggcaatagcgggcatccctcccccagcctcgctgccaccttgcagtttgatctcagactgctgtgctagcaatcagcgagactccgtgggcrtaggaccctccaagccaggtgcaggatataatctcctggtgcgctgttttttaagcccgttggaaaagtgcagtattcaggtgggagtcacccgattttccaggtgccatctgtcacccctttctttgactaggaaagggaactccctgaccccttgtgcttcctgagtgaggcaatgcctcaccctgctttggctcacgcatggtgtgctgcacccactgtcctgagcccactgtctggcactctctagtgagatgaacctggtacctcagatggaaatgcagaagtcacccgtcttctgcgttgctcatgctgggaactgtagaccggagctgttcctattcagccatcttggctcccaaccaat

SEQ ID NO: 938242 - DNA, 586 bp, Homo sapiens
tgtagtgcagtgctcctgggctccagtgatcttctcttcagcctcccaagtagctgggactacaagcgaacacaaccacacacccagctaatttattattattattattattattaatttatagggctgggtcttgctaacctccccaggctggtctcaaacttctgggctcaagtgattctcctgcctcagcctcgcaaagggctgggattacagctgtgagctactgcaccgagctggagttctattctaaraactgtatttgaagagggtcactgagaaaaaaagtatcactttattccttcttggccttgttctattctttctaaactgtaaactgaaaattttagtctttctttgggctaactaaactgtaaagcactaaaatttaacagaggtagcttgtgtggatgaaatttatctgatgggaacaaagggagttgtttcagtaccggccctgagtgggctgcacatttataccactaagattctctttcatctaaaatgtaatacacacacacacacacacacacacacacacacaaggaatctcagacttgcaaatattcttattatgaagctgaca

SEQ ID NO: 938243 - DNA, 571 bp, Homo sapiens
gacacaactagtttaatgtcactgagtatgtgcaatggattctcttcctgaaaaactctttagcaataaataacatatgaaaccttccactcaatgttatagtgaatgtggatgtataagatgctgtcgttcgccgtcagtcattatgggagttaatcctgtgctaggaaatgagacggatgactctacaggtgaattcaggaggaagaaaatgctccacccagaagctgcagacagagcctctctctcccttccaggaatacacagcgttttgttaggttcaagaagtatagactcaggttgattataggtcactatggtagtcacaggcatgaaactaacaaacatcttatataaacattatccatgtrttgttatgaactactggtaacttgcattttaagcatgaagtcatgagttctggcaaagaagaaaagatttcaagggaaatcagagaaagacagggtctccctggggtctactgacattgcaatctgtgtaactacaggaaaaaatctcaagaaaccagcccccaagtcttaccttatccacgctggtctggagcccctga

SEQ ID NO: 938244 - DNA, 742 bp, Homo sapiens
ataggcatggagaacgccaagtggacttaaacttactggtctcaggtctcattctcaattattgatagacccagagagcttttatttacataggacacatttattgataattaccgtattagaaattaaagccaggaaattacaaaatgtatattccatgtagaaatgcaataataaacccatagtatgctaacagatatttttatgaaaagactatatttgcgaaaacaaacacttcagtgagaaaagtgacattgttttagaaacctctggcrtagtagttggattctatttctctctccagtctgttgctgtatgttgttttcaagtacacgaagaaaattcatccacagataagtagttagaaaaaggagtatcttaatagccttttcagataattgtggatattcttcttgatactacaccaaaactagacaattggtttcttaaagatcagttgcaatgtggattctgaaatcatttcaatgaacttttcatacattaaagcctgttctattttgctctttgaatggatctttttacctagatgtgattttgtaacatcttgattttgtaatgtcatggttcagtgaattatgcagatcttcttaatgttgacatttttgattagataatattaaaaaatctcattaatatcaccactgatttcattggaaaaggcttcaagtattgggaagctattaagctcctggtggtgggtacaagttttccacttttccag

SEQ ID NO: 938245 - DNA, 595 bp, Homo sapiens
atgacgcatgaatgcccgggctgagctccctggggcccttcttatcctcatcttcccagtcctgttcacacagggcctcatgggggaatggcaggcattgaccttaaccaagtgcccacagcctacctgctctgaatgcgtagtcaggaatggaaggctttccaggaggatggaatgttctggaatttgggcttggttaatatgaaccatgaagcaacaaaagccccataggaatgcttggagaacaacagcaaaccagctaccagaattagacaggcgctccctccttttttgaaatcttaggtgtttttgtttttgtttttgagacgcagtctcccttgtcactcaggctggagtgctgtggagcgatcttggctcaccgcaacctctgcctcccagtttaaagcaattcttgtgcctcagcctcctgagtagstgggattacaggtgtgtgtcaccacaccttgctaatttttgtatttttagtagagatggggttttgcatgttggccaggctggtctcaaactccgggcctcaggtcatctgcccacccctgcctcccaaagtgctgggattacaggcgtgagccaccgc

SEQ ID NO: 938246 - DNA, 761 bp, Homo sapiens
caggctgtctttcaggaggaagatttaggtaagcccaaagtcagcaggggagccaaaaacaaggactctaggggaatttgaagcctctggcacctacagctatagcaaatattaaacacagccaaatccccagccgaataaatatacaagctcacactaaggttctatttatttgaattcccaagacattatagttggctttttacaaaaaactacaatgcatactgaaaggcaaaaacaaacaaacaaacaaaaaaacacagtttgaggacacaaagtaagcatcaaaacaagactcagmtatgacacagatgttggcattatcagataggtgatttaaaatactatgattaatagtttaaagactctaatggaaaatatagatgatatgtaagaacagatgggtaagttaagcagagagatggaagctctaagaaagaatcaaaaggaaatgctagagataaaaaacataatataaattaagaatgcctttgattaactcatcagtagactagtcatggaaataatcagtgaacttaaaaataggtcactagaaattttccaaactcaaatgtaaaaattttataaaaccgacaaagcagaatagaacatgcaagaactgtgggaccattgcagaagatattttatatacaaataatgtaatacaattaattacatacaaacaactgaaatacctgagaagaggaaaatgagccaagtaaatatttgaagcaataatggttgaagaactttcaaaatta

SEQ ID NO: 938247 - DNA, 584 bp, Homo sapiens
ttccaaagaagctaccctattttacatcccaccagcagtgtataagggttctgatttcgctaaatccttgccaacactttttgttatctttctttttgatcatagccttcctattgggtgtggattggtatctcattgtagttttgatttacatgtccctgagagataataacactgagtatcttttcatgtgttaattgatcatttgtatatcttttttggagaaatgtctattcagatcatttgcccatttttcattggattatttgcctttttactaatgaattgtaaatattctttatatattctagatamaagtcctttatcagtgtattagtcagggttttctagacggacagaactagtaggatagatatatatatataaaggggagtttattaagtattaactcaaaggtcccataataggccatctgcaagctgaggaaaaaggagagccagcccaagtcccaaaactgaagaacttgtaatccgatgtttgagggcaggaagcatccagcatgagcgaaagatgtaggctgggaggctaggccagtctcacctcttcatgtttttctgcctgct

SEQ ID NO: 938248 - DNA, 749 bp, Homo sapiens
caaacaaataaaactctctcaattaaaaatttgatgtccagtggaatcatctgtcaaaaataaaggtaagataaaaacatgttcagataaacaaaaaactgagagaaattggtagaagcagacacgtacaacaacaacaaattggtaaggcaaattcttcaggctgaaggaaaacagcacaaataacgctgatttaccagaggcatgaagagtaccagaaatgttgagtatgtggctacatgaaagacattattaatatatacattgtctcttaattttcttgaaagatctgtgactttgtaaagcaaatatgatggcactgtattgatggatttgtaacacctatagatgaaatctataaggcaatartatcacaaagaaggtgtgtggggatacacagaaatatatagttttgagtttcctgtattttacttgcaataattcaatattaactttaagtagtttgatgaaaatttaagatgtatattgtaactcttagagcaaccactaaaaagtaatgcaaagaggtagctacaaagccactaaaggaattaaaatgaaatattgaaatatttctctctatatatttctctctctctcacagacacacacacacacacacacacacacacacacacacacaatctctctctctctcaaggcagggcatgaagaagagatgaaaaataaacaaataagacaaactctaaaaatagtaaaatagcaatcttaaatacaataatattaat

SEQ ID NO: 938249 - DNA, 784 bp, Homo sapiens
catttgctcacggaaagaatcttttttattttccctgactattaaaatggcgatagaactatgaattctgcatagcacaccccaaacaggtagaaatggctttaattcattcagatcgtggctctcgagctagctgaggccagggaaagtacaggccgttctagtcttcagcatggtgcctatgacgcccgcaagagaatattgccaacatgttcttgccttgctagtgccagtacacaaggtatttgatttctccttcacatttctatgygtaaaatggggcaggctgatgcggttgatatgaaaaagcataaataaaattatcatacgctttggaaagagatgttctgaataataacaagattttgttatttatgctgagcaatatgttttgtcatttctacagtatattctagtattaaaatttatacttgtgcaaatttggctaacaagttttccactcattcatttgggttaaagcattgatttctgtctggtttagagtacaggcagttctattcctcaaagcagtgaatccatctctgctaggatagaaggacattgccgttcaaagccttataatatgcaaaacaaaatgtctgagtaatgcccacagatgctgaaattactggataaatcccaaggatttcccttatttaaaaaaattaaaatttttaatgtgtgtattttctttagagaatgaaaaaaatacaagaactacattgtctccccaaaatgtaaaaagaatatctgataggtaacaatctttttgtgtgtgtgtcca

SEQ ID NO: 938250 - DNA, 463 bp, Homo sapiens
cgaatgatctacctccttcggcctcccaaagtgctaagattacaggtataagccactgtgcctggttctaagagtacttttttttacaacatgattttcatcatatacatgcattctattataggctatttttttcattcaacattatatcatagatactttctctcattgtcccatgtctgggcactcctgggaaatgtgataccaagatggccatgtttgsccagcagttccaggagatcacttagagttgaattcttggtattgtattaacttttcacctaatgttggacattaaagtgttcagtctttcattattataaatatcccactatatatagcctttagaattatttttctagttgagactcagatgttatcgttagatataactttcttattttttatgtcatgctgtagtttggcgatcctccttgtgtccctagctaattcttaggcactc

SEQ ID NO: 938251 - DNA, 614 bp, Homo sapiens
atatcatattatgaaatgtttaattcaattacagtctaatcctcatcttacttcggtttataaaatgagtgatattttttatcttccaataacaaaaaataatatgtaagccatcacaatggttggctttttaagcaatatactgtttaaaattaaactcatagaagtttttatacttcatttcattcagaaatgtgctcttgataaaatttatgtttaataatatctatacaattatttcttaagttattaaaataataatgttaatgataattcmacccaagagaaatttttcaaacttagaactttatgaaacaggaaatatgacacattttaaaatacctatttgtagacataattttgttgcaaagagtatgatagagtaatcaataaagtatcgggaagtataataacacacaacactaggatagaactttgtgaaatggccgggtgcagtggctcacacctgtaatcccagcactttgggaggccaaggcgggcagatcacaagatcaggagtttgagaccagcctggccaatatagtgaaaccccgtctttactaaaaatacaaaaaaaaaaaaaaaattagccaggcgtggtggcatgcacctgt

SEQ ID NO: 938252 - DNA, 605 bp, Homo sapiens
acaggtgctcgccaccacgctcagctaattttttgtatttttagcagagacagggtttcaccatgttagccaggatggtctcgatctcctgaccttcatctcctgacccaccttggcctcccaaagtgctgggattacaggcgtgagccaccrcgcccagccacagtcttattgccctcttcacccttctgctatacttttaccatattttcgtcactggttctgtctctcctaagtttgtagtgcctaaaggatattcactgaacaaagatggtggactcttcaacagccttccgctggaatgacacttctgactcagccagattcattaacactgtattagctaaatggtaaaagtaggttatatgatctttgcacacacagagcccatcatactgtttttgcaaactctgaggtttccagcataattacactagagtatttgaaaatgatactgataaattcctttgttattaaaccttgcatatgctctcccaagtaaatgttacagacaccccttcctcaacttatgatggggttgcatctcagtaaacccaccgtaagttaaaaatgtaagttaaaaatgcaccatatacccctaacct

SEQ ID NO: 938253 - DNA, 699 bp, Homo sapiens
aaggacacttgtattagtctgttctcacactgataataaagacatacctgagactgggtaatttataaggaaaagaggtttaattgactcacagttccacatggctggggaggcctcataatcatggtggaagcaaaagaggagcaaagtcatgtcttacatgatggcaggcaagagaaactgagagcccagtgaaagggaaaaccctttatctaaccataagatctcattaaacttattcactaccatgagaacagtatggggaaaatcaccaccatgattcagttatctcccactgggtccctcacataacatgtgggaattatgggagctacaattcaagatgagatttgggtggggaagaaccaaaccacatcattgtgcacttgacccctcccaaatctcaggtcctcacatttcaaaaccartcatgccttctcaacagtcccccaacatcttatctcatttcagcattaactcaaaattccaaaattcgaagtttcatctgagacaaagcaaatccctttcatgtatgtatgcattcccatacatcctctgaaatctaggcagaggttcccaaacctcaatccttgacttctgtgcatccacagactcaacaccacatggaagctgccaaggcttggggcttgcaccctctgaagccacagcccaagctctaccttggcctctttagccatg

SEQ ID NO: 938254 - DNA, 699 bp, Homo sapiens
aaggacacttgtattagtctgttctcacactgataataaagacatacctgagactgggtaatttataaggaaaagaggtttaattgactcacagttccacatggctggggaggcctcataatcatggtggaagcaaaagaggagcaaagtcatgtcttacatgatggcaggcaagagaaactgagagcccagtgaaagggaaaaccctttatctaaccataagatctcattaaacttattcactaccatgagaacagtatggggaaaatcaccaccatgattcagttatctcccactgggtccctcacataacatgtgggaattatgggagctacaattcaagatgagatttgggtggggaagaaccaaaccacatcattgtgcacttgacccctcccaaatctcaggtcctcacatttcaaaaccagtcatgccttctcaacagtcccccaacatcttatctcatttcagcattaactcaaaattccaaaattcgaagtttcatctgagacaaagcaaatccytttcatgtatgtatgcattcccatacatcctctgaaatctaggcagaggttcccaaacctcaatccttgacttctgtgcatccacagactcaacaccacatggaagctgccaaggcttggggcttgcaccctctgaagccacagcccaagctctaccttggcctctttagccatg

SEQ ID NO: 938255 - DNA, 788 bp, Homo sapiens
cttcccaatagaccctcgaaatcttaactcattccagcattatctcaaaagtccaagtccaaagtttcacctgagattaggcaagtcccttctgcctatgagcctgtaaaatcaaaaacaagttagttatttccaagatacaatggcagtacaggcattaggtaaatgttcccattccaaaaaggagaaattggccaaaacaagggagctacaggctctgtgcaagtccagaatcctgcagggtagtcattaaatctcaaagctccaaaataatctcctttgactccatgtctcacatccaggacacactgatgcatgggatgggctcccaaggccttgggcagctctgtacctttggctttgcagggtacagcccttgtggctgctttcacagactggcaatgagtgcctgtgccttttcgagttgcayggtgcaagctgttggtggatctaccattctggggtctggaggatggtggccctcttctcacagctccactaggcagtgccccagtggggactctatatggggactccaaccccacatctccccttgcactgccctagtcaaggttctccatgagggctccacctctgtaccagacttcttctgcttggacatccaggcatttccaaacatcctctgaaatctaggcagaggtttccaggcatcaattcttgccctctgtgcttaataacacatagaagacaccaagacttgcagcttgcaccctttggagaagtggcctgagctgtaccttggcctcttttagccatggttggagctg

SEQ ID NO: 938256 - DNA, 788 bp, Homo sapiens
cttcccaatagaccctcgaaatcttaactcattccagcattatctcaaaagtccaagtccaaagtttcacctgagattaggcaagtcccttctgcctatgagcctgtaaaatcaaaaacaagttagttatttccaagatacaatggcagtacaggcattaggtaaatgttcccattccaaaaaggagaaattggccaaaacaagggagctacaggctctgtgcaagtccagaatcctgcagggtagtcattaaatctcaaagctccaaaataatctcctttgactccatgtctcacatccaggacacactgatgcatgggatgggctcccaaggccttgggcagctctgtacctttggctttgcagggtacagcccttgtggctgctttcacagactggcaatgagtgcctgtgccttttcgagttgcatggtrcaagctgttggtggatctaccattctggggtctggaggatggtggccctcttctcacagctccactaggcagtgccccagtggggactctatatggggactccaaccccacatctccccttgcactgccctagtcaaggttctccatgagggctccacctctgtaccagacttcttctgcttggacatccaggcatttccaaacatcctctgaaatctaggcagaggtttccaggcatcaattcttgccctctgtgcttaataacacatagaagacaccaagacttgcagcttgcaccctttggagaagtggcctgagctgtaccttggcctcttttagccatggttggagctg

SEQ ID NO: 938257 - DNA, 531 bp, Homo sapiens
aaccaactgccatcttgcctttaccctccaaactgtctttaatcattcctgggcttgagccaagctaactttgggagacgtttagtttatagtttaaatgatagtagcccttccccaaaactaaaccatctttataggttaggcagataagagaagcctgaattctgctaaagtgtagacataaatgattactagtcattattccagaagtcacaagatttacaactttcacaaatactcctgcagataacattactattgtagaacctaagattggccttttgagatgtcttttcagggttttgcatttttgacaaccagtggctccaygtggacctgccaacccatcctgtggcccctcccagaggcagactcagcacatatgcagaaggaccattttccacactcctatgattgcatccccagccaatcagcagcactccattccctggactgccaaactatccttgaaaaaccacagcctctgaattttcagggtgactgatttgagtaataaaaccccagtctcct

SEQ ID NO: 938258 - DNA, 695 bp, Homo sapiens
taacgtggtgtgcctaggggcagtttgtggagggagtgggcaattagtgtatggccatgggggctgccccactggagctctccatcagtcaggcatggtccaatggtgcaggagctgtgatgcagtcccctagagaaggagccactaaaccccaggccctggactggtgctggtctggggccgcacaacaggaggtgagcagcaggcaagagagcatgactgcctgagctccaccttctttcagatcattggtrgcattagattatcccaggagagtgaatcctattgtgagctgtgcatgcaggatctaggtcgcatgccccttatgagaatctaatgcctgatgatccaaggtggaacggttccattgcagttccatcataaaaccgttccccgccatccccagttcacagaaaaattgtcttccatgaacctggtccctggtgctaaaaaggatggggcacctgacgctgccatgcaagcagacacggccaggctggggctacggaattggccaggagaccaagggatgctcaggttggactgtccccatctgatgggcaaggccaccctgaagagttcaggtccaacagttcccctagggctaaagcctcctattggagcaagtcaagcctagggagatgggtaaccctgtccatgttccactacagatgcttctgcaccaaaccctctgg

SEQ ID NO: 938259 - DNA, 695 bp, Homo sapiens
taacgtggtgtgcctaggggcagtttgtggagggagtgggcaattagtgtatggccatgggggctgccccactggagctctccatcagtcaggcatggtccaatggtgcaggagctgtgatgcagtcccctagagaaggagccactaaaccccaggccctggactggtgctggtctggggccgcacaacaggaggtgagcagcaggcaagagagcatgactgcctgagctccaccttctttcagatcattggtgrcattagattatcccaggagagtgaatcctattgtgagctgtgcatgcaggatctaggtcgcatgccccttatgagaatctaatgcctgatgatccaaggtggaacggttccattgcagttccatcataaaaccgttccccgccatccccagttcacagaaaaattgtcttccatgaacctggtccctggtgctaaaaaggatggggcacctgacgctgccatgcaagcagacacggccaggctggggctacggaattggccaggagaccaagggatgctcaggttggactgtccccatctgatgggcaaggccaccctgaagagttcaggtccaacagttcccctagggctaaagcctcctattggagcaagtcaagcctagggagatgggtaaccctgtccatgttccactacagatgcttctgcaccaaaccctctgg

SEQ ID NO: 938260 - DNA, 594 bp, Homo sapiens
aggctccattccacaaacctacagtattgaacgtatcaccaccactacccctgtcctccatacccagctatgggagaccttgttggtgtctccctctctgaccatggcaagggaattgctcctagctggccattgccaaaaactgctgtgctttagggtgtraaaggaaaataaatcttgggatcccaaaactactaagccaaaggaaaaagtcaagctgggaactgttaggcaaacccacctctcattctattcctacaaagattaaaaagctacatatggccaggcacagtggctcacacctataatcccagccctttgcaaggctgaggcaggtggatcacctgaggtcaggagttcgagaccagcctggccaacatggtgaaaccccgtctctactaaaaatacaaaaattagccggacgtggtggcgggcacctgtaatcccagctacttgggaggctgaggcagggagaattgcttgaacctggtaggtgaagtgagccaagatcatgccagggcactccagcctgggcaagagagggagactctgtctcaaacaaataaaaaaaaaacaaaactgcctacctctctc

SEQ ID NO: 938261 - DNA, 594 bp, Homo sapiens
aggctccattccacaaacctacagtattgaacgtatcaccaccactacccctgtcctccatacccagctatgggagaccttgttggtgtctccctctctgaccatggcaagggaattgctcctagctggccattgccaaaaactgctgtgctttagggtgtgaaaggaaaataaatcttgggatcccaaaactactaagccaaaggaaaaagtcaagctgggaactgttaggcaaacccacctctcattctattcctacaaagattaaaaagctacatatggccaggcacagtggctcacacctataatcccagccctttgcaaggctgaggcaggtggatcacctgaggtcaggagttcgagaccagcctggccaacatggtgaaaccccgtctctactaaaaatacaaaaattagccggacgtggtggygggcacctgtaatcccagctacttgggaggctgaggcagggagaattgcttgaacctggtaggtgaagtgagccaagatcatgccagggcactccagcctgggcaagagagggagactctgtctcaaacaaataaaaaaaaaacaaaactgcctacctctctc

SEQ ID NO: 938262 - DNA, 581 bp, Homo sapiens
actgagatgagatatctcattatggttttgatttgcattttcctgatgattagtgatgctgaacattttttcatatacttcttggccatttgtatgtctttaaaaaaattttaaacaattttattgaggtatatatctatatctatatatctrtatatattttttagatggattctcactttgtcacccaggctggagtacagtggcctgatctcagctcaccgcaacctccaacctcctgggttcaagtgattctcctgcctcagcctcccaagtagctgggattacaggtgcctgtcaccaaaaattagtcgcctggctaatttttgtatttttagtagagacagggtttcgccatgttggccaggctggtcttaaattcctgatctcaagtgatctgcccgccttggcctcccaaaatgttgggattacaggcgtgagccttctagccactgcacggagtggtggcagcaccctaccacccttgtttatttcccattagggagagccttagcaccccagacctacacggtttgggacaaattcatcccctttcacaactcaccagttaaggtgagatc

SEQ ID NO: 938263 - DNA, 418 bp, Homo sapiens
cttttgatgtgccaacagttttcttagcacattatttcctttttgcctttctgatacctgtgacatgagccttgactgatacaaacagagaatgaatggttttctctatttctctaaagactgaaataaggagttttctggcatatcaccaggattgactagaaacaaatgagtccccagaaaatatttgtttaatacatatttctttttacatatatacatatgtttatatacatatatttttttaatattcaycatattaaacatatggatgctagtttagactgataaagagaaaattcactttgtgccatgcaaataaatcaatcaacaattctgtgattgtgattagactctgctctagagtctgggagatgagaaacacaaaaaatatatgatataagttcttctttaaaaa

SEQ ID NO: 938264 - DNA, 581 bp, Homo sapiens
attgtatacatgtgtcatgttggtgtgctgcacccattaactcaccatttacattaggtattcctcctaatgttatccctccccactcccgcaaccccacaacaggccccagtgtgtgatgttccccaccttgtgtccaagtgttctcattgttcamttcccacctatgagtgagaacatgcggtgtttgatttttttgtccttgtgatagtttgctgagaatgatggtttccagcttcatccatgtccctaaaaaggacatgaactcgtccttttttatggctgcatagtattccatgttgtatatgtgccacattttcttaatccagtctattattgatgaacatttgggttggttccaagtctttgctattgtgaatactgctgcaataaacatacatgtgcatgtgtcttataaaagcatgatttataatcctttgagtatataccaagtaatgagatctctgggtcaaatggtatttctagttctagatccttgagtaattgccacactgacttccacaatggttgaactagtttacactcccaccaaaagtgtaaaagtgttcctatttcttcac

SEQ ID NO: 938265 - DNA, 606 bp, Homo sapiens
gtagcacacactggtagtcctagctactcgagagacagaggcaggaggattgcttgagcccagagtttgaggttgcagtgagctatgatcatactactgcactctagcctgggcaacagagcaagatcctgtctcaaaaataaataagtaaatgaaatgaaatgtaagatcatgtccttcttcaattcaacactttccagtagcttcttatttcatccagaataaaatccaaagtccttgccgtggcttacaagactacctgatctggcaccccctcaacccctctgtcctcatttcttactctcatctcttgctcctacatctcaccctttctttattccactctaaccagtatggcctcattgctagtcctcaayacccccaaaatgttgctcctatcacagcccatttcagtccttgtttccttatagagatttatatcactccctgcaacactctttcttttggtctctgctccaatgcgctctgtttgggtgcctctccctatatcaaggaggcatttcttaccagcctagcttaaaacagatgctgtcctcaccctatcattctctaacactcttattctggtctatttttctgcatatt

SEQ ID NO: 938266 - DNA, 606 bp, Homo sapiens
gtagcacacactggtagtcctagctactcgagagacagaggcaggaggattgcttgagcccagagtttgaggttgcagtgagctatgatcatactactgcactctagcctgggcaacagagcaagatcctgtctcaaaaataaataagtaaatgaaatgaaatgtaagatcatgtccttcttcaattcaacactttccagtagcttcttatttcatccagaataaaatccaaagtccttgccgtggcttacaagactacctgatctggcaccccctcaacccctctgtcctcatttcttactctcatctcttgctcctacatctcaccctttctttattccactctaaccagtatggcctcattgctagtcctcaatacccccaaaatgttgstcctatcacagcccatttcagtccttgtttccttatagagatttatatcactccctgcaacactctttcttttggtctctgctccaatgcgctctgtttgggtgcctctccctatatcaaggaggcatttcttaccagcctagcttaaaacagatgctgtcctcaccctatcattctctaacactcttattctggtctatttttctgcatatt

SEQ ID NO: 938267 - DNA, 611 bp, Homo sapiens
acagtgcttttctatacaatgtctgtatctatggataacataaccgattaggtcaggggtcgatctttgactaccaggcccagggtgtggcaccaggctgtctgcttgtggatttcatttctgccttttagtttttacttcttctttctttggaggcagaaactgggcataagacagtatgaggggtggtctcctcccttatttccccactttgagattctcactcaatagtgggagttctcmcttttatttttactaccgatgttttcttgcaagacagatcgatagtgatttatatagtacacttgtgctgaagcattttggtgaactaaggtaacgatgaagtttttatcatttgaagaagtacaggtagcaaacaagggagcagtaagcaggttcctattactattataactcttattataagagttttacatctttctagtgctgggaaccattttctaaacatggccccaggatcaaatccatgccacacttgcacaggcatatgtgccagttttgtcatatctctaactatgtctttaactacttgcccttgattatctatgtgtaggcagcaattagtaaggttaaatttcctacagacctct

SEQ ID NO: 938268 - DNA, 639 bp, Homo sapiens
gaacaaaacaggatagggattttcacagtgcttttctatacaatgtctgtatctatggataacataaccgattaggtcaggggtcgatctttgactaccaggcccagggtgtggcaccaggctgtctgcttgtggatttcatttctgccttttagtttttacttcttctttctttggaggcagaaactgggcataagacagtatgaggggtggtctcctcccttatttccccactttgagattctcactcaatagtgggagttctcacttttatttttactaccsatgttttcttgcaagacagatcgatagtgatttatatagtacacttgtgctgaagcattttggtgaactaaggtaacgatgaagtttttatcatttgaagaagtacaggtagcaaacaagggagcagtaagcaggttcctattactattataactcttattataagagttttacatctttctagtgctgggaaccattttctaaacatggccccaggatcaaatccatgccacacttgcacaggcatatgtgccagttttgtcatatctctaactatgtctttaactacttgcccttgattatctatgtgtaggcagcaattagtaaggttaaatttcctacagacctctcttt

SEQ ID NO: 938269 - DNA, 610 bp, Homo sapiens
gtagcacacactggtagtcctagctactcgagagacagaggcaggaggattgcttgagcccagagtttgaggttgcagtgagctatgatcatactactgcactctagcctgggcaacagagcaagatcctgtctcaaaaataaataagtaaatgaaatgaaatgtaagatcatgtccttcttcaattcaacactttccagtagcttcttatttcatccagaataaaatccaaagtccttgccgtggcttacaagactacctgatctggcaccccctcaacccctctgtcctcatttcttactctcatctcttgctcctacatctcaccctttctttattccactctaaccagtatggcctcattgctagtcctcaayacccccaaaatgttgctcctatcacagcccatttcagtccttgtttccttatagagatttatatcactccctgcaacactctttcttttggtctctgctccaatgcgctctgtttgggtgcctctccctatatcaaggaggcatttcttaccagcctagcttaaaacagatgctgtcctcaccctatcattctctaacactcttattctggtctatttttctgcatattgtgt

SEQ ID NO: 938270 - DNA, 610 bp, Homo sapiens
gtagcacacactggtagtcctagctactcgagagacagaggcaggaggattgcttgagcccagagtttgaggttgcagtgagctatgatcatactactgcactctagcctgggcaacagagcaagatcctgtctcaaaaataaataagtaaatgaaatgaaatgtaagatcatgtccttcttcaattcaacactttccagtagcttcttatttcatccagaataaaatccaaagtccttgccgtggcttacaagactacctgatctggcaccccctcaacccctctgtcctcatttcttactctcatctcttgctcctacatctcaccctttctttattccactctaaccagtatggcctcattgctagtcctcaatacccccaaaatgttgstcctatcacagcccatttcagtccttgtttccttatagagatttatatcactccctgcaacactctttcttttggtctctgctccaatgcgctctgtttgggtgcctctccctatatcaaggaggcatttcttaccagcctagcttaaaacagatgctgtcctcaccctatcattctctaacactcttattctggtctatttttctgcatattgtgt

SEQ ID NO: 938271 - DNA, 607 bp, Homo sapiens
tgcttttctatacaatgtctgtatctatggataacataaccgattaggtcaggggtcgatctttgactaccaggcccagggtgtggcaccaggctgtctgcttgtggatttcatttctgccttttagtttttacttcttctttctttggaggcagaaactgggcataagacagtatgaggggtggtctcctcccttatttccccactttgagattctcactcaatagtgggagttctcmcttttatttttactaccgatgttttcttgcaagacagatcgatagtgatttatatagtacacttgtgctgaagcattttggtgaactaaggtaacgatgaagtttttatcatttgaagaagtacaggtagcaaacaagggagcagtaagcaggttcctattactattataactcttattataagagttttacatctttctagtgctgggaaccattttctaaacatggccccaggatcaaatccatgccacacttgcacaggcatatgtgccagttttgtcatatctctaactatgtctttaactacttgcccttgattatctatgtgtaggcagcaattagtaaggttaaatttcctacagacctct

SEQ ID NO: 938272 - DNA, 635 bp, Homo sapiens
aaaacaggatagggattttcacagtgcttttctatacaatgtctgtatctatggataacataaccgattaggtcaggggtcgatctttgactaccaggcccagggtgtggcaccaggctgtctgcttgtggatttcatttctgccttttagtttttacttcttctttctttggaggcagaaactgggcataagacagtatgaggggtggtctcctcccttatttccccactttgagattctcactcaatagtgggagttctcacttttatttttactaccsatgttttcttgcaagacagatcgatagtgatttatatagtacacttgtgctgaagcattttggtgaactaaggtaacgatgaagtttttatcatttgaagaagtacaggtagcaaacaagggagcagtaagcaggttcctattactattataactcttattataagagttttacatctttctagtgctgggaaccattttctaaacatggccccaggatcaaatccatgccacacttgcacaggcatatgtgccagttttgtcatatctctaactatgtctttaactacttgcccttgattatctatgtgtaggcagcaattagtaaggttaaatttcctacagacctctcttt

SEQ ID NO: 938273 - DNA, 588 bp, Homo sapiens
cagctatttatatttttttagtagagacagggtttcaccatgttgcccaggcgggtctcgaactcctgacctcaagtgatccttccacctcagcctcccaaagtgctgaggtaacaggtgtgaacaaccatgcccacccctcagtttttaaaatctatttcaatcaaagttgacaaattattttgatgtcatctagcctcagcttggtaatttacagagtgtgattcctttatgcttctamattaaaatctgcgaagactggaggagtgccctgaaagctaaatctttgcttcttggggactgtgtaatgctaaagcaatttctaaagatggaaggcaatgcctccaagtgcctacgtggtccgggtcaacggttccccaagcgttgactaagatcgggaaaacctcactgttgccatgggcctctccgtcaccaccatgagacagacttagcaagaagcagagtcatcagagtcctggcagggagaggggaggaagacacctcatcttctcatgagaagcaatggaggcaaagtggggtttgtgtgcagccaaagcagccatgtgcaaacccagcacgcagctcaga

SEQ ID NO: 938274 - DNA, 606 bp, Homo sapiens
actggctgaacactcccagtaacagtggctccacattcctcagaggtgaagccctcaggggcaaatgaaagcccctctgccagtgcctctgcagtggaactgcctttgctaccctgagactaatgaaggagcaaagaccctaagtaccttatccacacctccaacaagcagcagtctacccaaggagaggaggccagtccatctcccatgggtcccacctactcctcaccttcccctaccccacacacttatcacccagcagggaaccctcaggttgggcccacagcccccattcagggctgattgcactaagtgattgctgacctgtatctctctggggtagggcccccaggagataagtgaaagactttcagccacagccactgctaaagttcattcctctgatgcctccaagttarggaggaaacataaaccctaagaacaccccagagctgcagtgggaagcctgggagtgtcaagccacaatctacaggcagcactcaagtgggagaggagggcacactttcagagcattgagagggaacatggctgcaactgtgaggaaatataggggagccacaggactgagtaagagcctaccaactg

SEQ ID NO: 938275 - DNA, 674 bp, Homo sapiens
caacagtgcccccctccctataccggtggtagcagtggaggctgaatcgggtgtctacatttctacccctacccagcaaaaatgaggcacctttcctcatgtcagcagaggctcagggagaagcatggacttccacctccacccagtggtaacaagatggtgtccaggccccgcatggtggctcattcctgtaatcccagcactttggaaggctgaggtgggtggatcacctgaggtcaggatttcaagaccagtctggccaacatggtgaaacccatctctactaaaacttcaaaaattagccaggtgtggtggtgggcatctgtaatcccagctactygcaaggctgaggcaggagaatctcttgaaccagggaggcggaggtttcagtgaagcaagatcgtgccactgcaccccagcctgtgcaactctgcctcaaaaaaaaaaaaaaaaaaaaaccaagatggtgtccccttccttcctccactagcaaggtgtcagtggaggcctgctaaaatataaaatttcagtaagatccagaaaatcataaaataataccagtatgtccaagatacaataaaaaaaatcacttgtcataccaagaacccagaaaaacctccatttgaatgaggcaatgatggcagcggctgctccagatggtctgccactaccat

SEQ ID NO: 938276 - DNA, 601 bp, Homo sapiens
agaattccacttgtattgtacaaaactggtcttattgcttgtaataagagagaccgtataacatgcggaaccatgatgctatgttcttaaaaagatgctagtagggattggttataaacatttagctttgggtagatggttttggcagggtcaggcatgatggttcaagaaagaagtgctttgctgtggattgggtcatacctagatgtataataggatatgtgttaggctgaataatttcccctccccaaagatatctaggtattattcccttgttcctgtggatgttactgtatttttctaaaacraggtctttgcagatgtgattaaggatcttgagatggagagattatcctgaattatccaggtgaggccttaatgtgatcatgagtatcatgggggtggaggcagatttaacgcagacataaaacgagaaggccggccatgtgcggtggctgatgcctgtaatccccccactttaggaggctgaggcaggcggattacttgaggtcagaagtttgaaaccagcctggccaacatggtgaaaccccgtctctaataaaaataccaaaaaattatccgggcatggtggctcacgact

SEQ ID NO: 938277 - DNA, 626 bp, Homo sapiens
ggagttgggtctatgccgttgtctgcctccaaccccaggcccaccacatccacccctgcagcctggctttcagagagtccttctaggatacaaccgtagagtaggaagttagcctttgggatctcagcctcatcagccccctcagcctccggacgtcccacctscacattctctccctaacccttcccaagacctgccctgcggtggggcaggcagcataggatgtgaaaaccctgggagctatggagtatgcagacctcagcttacatcccaaccctgccacttaaggccaccagactttcctggtctcctcattggtaaaaatgaggttaaaaaacaacaacaacaacaaagaacaaaaaacactcctaagggcatatcccccactggcttagaggtctcttggagccttcattcacatggtatgcccatgactaaagagctaggtgttacccctcccaggcccatgtggatagagatgggctgggataggggagtaaagcccaggggcagggacagccgccagtgatggggtgagcgagaggtgttgggagccatgggattccccaatgtccttggattcactgtacctccctggttgcttctctgcctggggatttcctaat

SEQ ID NO: 938278 - DNA, 583 bp, Homo sapiens
acatatcgtgcagaaccatctgtgaaccaggccctagtcttctctttctccatcaactgatcatagggaagtccctatgaggccttcagtgcaggctcgggaagagaagacacggtggcaggagtggagcctatggacatttgagacattttctcgtgtaacttacttgtgtcttcaggacctgctcaagaccaaacacatatataccacttccagttcatgatggaatgtttgtgtgaagaacccactttatgrctagatgggtcagaaaacacccagttcaatataggcagttcagtttgcatactgacttgaatacacatagtcaaacattcagtttctaccaaagcccagtaacaggccaaaagctgtctctcaaaaaaaaagagtagttatctgcagaagacagcagggccttgctccaaaaccttagaggcttctgctgtgattcacctatgggagcctgcgtgaggctccaaacagcattcctatctgtgactgacacctcaagcaccattggatctgcttggtcatatggcccaagtaggagatcagcttgcacagcagcctggacctgttgcag

SEQ ID NO: 938279 - DNA, 634 bp, Homo sapiens
accttagaggcttctgctgtgattcacctatgggagcctgcgtgaggctccaaacagcattcctatctgtgactgacacctcaagcaccattggatctgcttggtcatatggcccaagtaggagatcagcttgcacagcagcctggacctgttgcagagtactcttctgttctgagtccccacttaaaagtgtcagcccttcaggccactcaataaatggaccagagtaacacacccaaatgagtaatgtgtttcyttcaaaatccaaatatgcccactagcattgtgcctctttctggttctaggacaaatgcagcaatttatcctttaccttagaagaaatacctccacagtccccatttaactgtacccctacaaattttacctagttagaaggtccctgaattttagtcagatttatttccaatcctctgtcatgtaaatgtgtcaccaataaatttaatgtgttacttcttgctcattggattcaatcaacataatgtcatcaatgtaatggaccagtgtgatatcttgtggaagtgaaaagcaatcaaattctctctgaataagagtatgacacaaagctagagagttgatataaccctgtggtatgacagtaaaggtatattgctgg

SEQ ID NO: 938280 - DNA, 597 bp, Homo sapiens
aaatccacatataacttttgactcccccaaaacgtaattactaatagcttactgttaaccagaagccttaccagtaacataaacagtctattaacaaatatttttatggtatgtgtaatatatatcggaagagagagagagagagagtattcttaaagccagctacagaaaagaaaatattattaagaaaaccataagaaagagaaaatgtatttactgttcattaggtggaagtggatcaacataaaggtcttcatcctcatcatcttcacattgagatggctaaggaagaggaggaggaaaggttggtcttgctgtctcgggggtggcagaggctgacgaaacccttgtgtaagtggacccatggagttcasactcacgttgttcaaaacatgtcgttcaagggtcaactgtactcaccttcccaggctcccttgcgcagctctctaatcctcgaaacaattgtttgagctccccaatacctcttgaatgcaactcttttctgtgtaaataagccagaattgattttcatcacttccactttagaaccctatcttattcacttctggaacttggaagctgacatcagtctgctct

SEQ ID NO: 938281 - DNA, 725 bp, Homo sapiens
acctcgttgtattttttttttttttttgagacagagtttcgctcttgtcgctcaggctggagtgcaatggtgcaatctcagctcactgcaacctctgcctcccaggttcaagtgattctcctgcctcagccttccgagtagctgggattacaggcctgcaccaccacgtccgtctaattttgtatttttagtagagatggggtttctgtatgttggtcaggctrgtctcgaactcccgacctcaggtgatctgcctgcttccgcctcccaaagtgctgggattacaggtgcgagccactgtgcctggccagccttgttgtatttttaatttggatttccctgatgattagtgatgttaagctttgcttattcctgatctgtatacctgttggacatttttgtgtcttcttttgataaatatctattcaggtcctttgcccactttttaattcagttatttgttttcttctattgagttgagttccttatgtattttggatactaactccttattatatgtatcagatatatatcagcaaatattttctcccagtctgtaacttgcctcttcattctgttgtttccttgctgtgcagaagctttttagtttgatccagtttatttgtctactatggcttttgttgcctgtgcttttggggttatatttttaaaaatcattatctagaccaatgccatggagctatttatattcttgattgcctagc

SEQ ID NO: 938282 - DNA, 725 bp, Homo sapiens
acctcgttgtattttttttttttttttgagacagagtttcgctcttgtcgctcaggctggagtgcaatggtgcaatctcagctcactgcaacctctgcctcccaggttcaagtgattctcctgcctcagccttccgagtagctgggattacaggcctgcaccaccacgtccgtctaattttgtatttttagtagagatggggtttctgtatgttggtcaggctggtctcgaactcccgacctcaggtgatctgcctgcttccgcctcccaaagtgctgggattacaggtgcgagccacygtgcctggccagccttgttgtatttttaatttggatttccctgatgattagtgatgttaagctttgcttattcctgatctgtatacctgttggacatttttgtgtcttcttttgataaatatctattcaggtcctttgcccactttttaattcagttatttgttttcttctattgagttgagttccttatgtattttggatactaactccttattatatgtatcagatatatatcagcaaatattttctcccagtctgtaacttgcctcttcattctgttgtttccttgctgtgcagaagctttttagtttgatccagtttatttgtctactatggcttttgttgcctgtgcttttggggttatatttttaaaaatcattatctagaccaatgccatggagctatttatattcttgattgcctagc

SEQ ID NO: 938283 - DNA, 870 bp, Homo sapiens
ctgttgagagacaggaaatcattctgttaaagtcaaatctggttcgtccatccatcatcccagcccatggagtgcctaagagcttccttttggaattacacagactcaaggtcaaatcttggtcctgctcttaagcagcttggtaaccttgggcagcagtgacagcattattgttactaatttattcttattcgttgccagtgacagcgctaatagcaggtgatgtctattgaaggcttactgtgttgtaggcattgcgtttggtgcatttcattttttttttttttttttttgagacagagtctcactctgtcgccaggctggagtgcagtggcgcaatctcagcccactgcagtctccgcctcctgggttcaagctattctcctgcctcagcctcccgagtagctggtattacaggtgcatgccaccacacccaactttttgtatttttagtagagacagggtttcaccgtgttggccaggatggtctcgatctctggacctcatgatccgcccgcctcggcctcccaaagtgctgggattacaggtatgagccaccgcagcccagcagttgcatttcttatttactcttcatagcaaccctgtgagatctgtcagtcctttttcattgttgccttgttaaactggcgaaggcccttacccaagatcacacttagagcaagtgaggaagctggaatgcagatgcggrttgccccacccaaacccatgctcttgaagctgtcagcctcatttggagactgggaagtcatgacccctgcctcatgggccgtatgaggaccaagtgacaggggaagcttacatatacccccaggtgacatggacaccagctccaagatggattcctttccc

SEQ ID NO: 938284 - DNA, 615 bp, Homo sapiens
tcctttattctgtttcacatttccttatgttgatatctgcaaatctgctctaatagtcacttcttcccattcgttgagtgtggtttcataggggaggatttttcctgaaaatgtatctatggtgctgattggatagggccctttggctttgattctgggtgcatgcagtagtgtcgtctccatatttcctctttagttgtaaacaacatcggtrgtgtctgtgatttcctttgtggcttagggtgtggttattagtggaggctgtggtgaggctttgctggggactggaatcccaggtggggccagtcttcaggccccagtggtggcagtgggggactgaccatgcctgtccttgggacccaagggggcgtatcctggcactggtggtagcaggtcctggtgggcaatttggggcttccaggtagcttatttggatgccagtagtggtggtggtggaccaggtaagtgggtggttcttgggcccctggtcagccagcatggcatgggtgatgacagtggcaggacggccctctgggtcccaagcagtgcatgctggtgctggtggtggctgcaatgggctgggcaggccagtgtctaggcccgcaggtggtacag

SEQ ID NO: 938285 - DNA, 615 bp, Homo sapiens
tcctttattctgtttcacatttccttatgttgatatctgcaaatctgctctaatagtcacttcttcccattcgttgagtgtggtttcataggggaggatttttcctgaaaatgtatctatggtgctgattggatagggccctttggctttgattctgggtgcatgcagtagtgtcgtctccatatttcctctttagttgtaaacaacatcggtggtgtctgtgatttcctttgtggcttagggtgtggttattagtggaggctgtggtgaggctttgctggggactggaatcccaggtggggccagtcttcaggccccagtggtggcagtgggggactgaccatgcctgtccttgggacccaagggggcrtatcctggcactggtggtagcaggtcctggtgggcaatttggggcttccaggtagcttatttggatgccagtagtggtggtggtggaccaggtaagtgggtggttcttgggcccctggtcagccagcatggcatgggtgatgacagtggcaggacggccctctgggtcccaagcagtgcatgctggtgctggtggtggctgcaatgggctgggcaggccagtgtctaggcccgcaggtggtacag

SEQ ID NO: 938286 - DNA, 659 bp, Homo sapiens
ttttttttttttttttttttttttgagacagagtctcgctctgtcgcccaggctggagtgcagtggcgcgatctcggctcactgcaagctccgcctcccgggttcaagcgattctcctgcctcagcctcccaattagctgggattataggcgtgccctaccacgcctggctaattttttatatttttggtaaagacagggtttcaccatgttggccaggctgrtctcaaactcctgacttcaagtgattcacctgccttggtctcccaaagtgctgggattacaggcgtgagccaccgtgcctggtgagagttgggttttagttttattttgtttttcacagattccgggggttgaatggcaaagaggcgggagcaggcggaggtccatatggaagttcagactcaccccgcaggagttctggctgggaggctgccaggacaggcaggatgtgggagccgccctgggaggcccctcactctccccacactgacctcacatccccgttacgttcctcatcccaggctgggccagccactgggcgctggacagagcttaggaagtaggatggctccgggtgggttagaaaccaggtgcacggcagaagccggcctggagccgcccacagccccagccatccttggagggccccagccgaag

SEQ ID NO: 938287 - DNA, 499 bp, Homo sapiens
ggtcctggtctttttatggttggtaggctatttattactgcctcaatttcagaacttgttattggtctattcagggattcaacttcttcctggtttagtcttgggagggcgtatgtgtctaggaatttatccatttcttctagattttctagtttatttgcatagccatttcttctagattttctagtttatttgcatagagccatttatagtattctcagatggttgtttgtatttctgtggggtcagcagtgatatcccctttatcattttttattgtgtctatttgattcctctctcttttcttctttattagtctagctagcagtgtatttattaatttcttttcaaaaaarcacctcctggattcactgattttttgaaagttttttcgtgtctctgtctccttcagttccactctgatcttagttatttcttgtcttctgctagcttttgaggttgtttgctttgggatttctagtgcttttagttgttatgt

SEQ ID NO: 938288 - DNA, 742 bp, Homo sapiens
tctggaggctcgattcctactctaaggggcctcatgccaggtgagaggcctggatcgcctgcagaggagatgggagaatccctgaggtttgggcatctttgaagcagttcacgctgtgatccagaggccactttattagaaaccagactgctatctatctgcaggagcggaagggtggagacaggcatggggccttggggaggagagtgggtagggatctcagacagacccaggtgagagggaccgagagcttacaaggagacacaaagtgaactggatctagcagcagggcttctgcccagaggcccgagttgttcagaagtggcccaggtagaagtgggycaagatggtgcagatcttagagccagtctgtcagcggggaaggctcgctattccctaaggcacgtgcatagacagatcctgaggagcaaacgtgacttatccttgctaagcccgggaaatgaaaaatgagattataatgggatttatccaaagcacaaatgaaaacaacatcaccgaggcgcataattctaaattttaataataaaataggtatcggaaaactctgtcttgctccaacaagaagatgctgctttttcttgatttcttacaccttatcttggcagctgcctgtttctacctctctcctatttgcctcatctgtatttccttaagggccatgtgagaactcccaagtcacccttccctccaggttcccgctggtaactgccgtagtcttgac

SEQ ID NO: 938289 - DNA, 486 bp, Homo sapiens
ctgcagagggttagctctgcacagaaacaccttgcaatagaatgcactctccttcgatcagacaccatgaaaaaggcgcatttcagtgaaaaagacaaaaagacaacaagaaaatagaataaaagacccagtgattagctgagatttgaatgaagagagacttaacaaaagctactatgatgtagaaataaaaaaggtcactttttttttttttgagacagaatcttgttctgtcacccaggckggagtgcagaggcatgatctcagctcactgcaagctccgcctcctgggttcatgccattctcctgcctcagcctcccgagtagctgggactacaggtgcccaccaccacgcccagctaattttttgtatttttagtagagatggggtttcaccatgttagccaggatggtctcgatctcctgacctcgtgatccacccgcctcggcctcccaaagtgctgggattacaggtgtgagccactg

SEQ ID NO: 938290 - DNA, 486 bp, Homo sapiens
ctgcagagggttagctctgcacagaaacaccttgcaatagaatgcactctccttcgatcagacaccatgaaaaaggcgcatttcagtgaaaaagacaaaaagacaacaagaaaatagaataaaagacccagtgattagctgagatttgaatgaagagagacttaacaaaagctactatgatgtagaaataaaaaaggtcactttttttttttttgagacagaatcttgttctgtcacccaggcgggagtgcagwggcatgatctcagctcactgcaagctccgcctcctgggttcatgccattctcctgcctcagcctcccgagtagctgggactacaggtgcccaccaccacgcccagctaattttttgtatttttagtagagatggggtttcaccatgttagccaggatggtctcgatctcctgacctcgtgatccacccgcctcggcctcccaaagtgctgggattacaggtgtgagccactg

SEQ ID NO: 938291 - DNA, 486 bp, Homo sapiens
ctgcagagggttagctctgcacagaaacaccttgcaatagaatgcactctccttcgatcagacaccatgaaaaaggcgcatttcagtgaaaaagacaaaaagacaacaagaaaatagaataaaagacccagtgattagctgagatttgaatgaagagagacttaacaaaagctactatgatgtagaaataaaaaaggtcactttttttttttttgagacagaatcttgttctgtcacccaggcgggagtgcagaggcrtgatctcagctcactgcaagctccgcctcctgggttcatgccattctcctgcctcagcctcccgagtagctgggactacaggtgcccaccaccacgcccagctaattttttgtatttttagtagagatggggtttcaccatgttagccaggatggtctcgatctcctgacctcgtgatccacccgcctcggcctcccaaagtgctgggattacaggtgtgagccactg

SEQ ID NO: 938292 - DNA, 598 bp, Homo sapiens
ttcctttactatgttgttaatatgtataaaatctgatctcttcctttattcctgatatttgtaattttttccctagtctgactacagttttataaattgtattgatcttctcaagtaccttttggtttcattgattttttycctaattttttctgtttcattaatttctgcactggcatttattttttcccttcttctgcttactttggatttcattttgcttttttccccctagtttcttaaggttaaagctgaggttattgatttgagttttttttctaatatagacacttttacattaaaaatatctctgtaagtactgtcttacctacatcccacaaattttgctatgttctgtgttcattttcattcagtttaaactcatgggccaggtgcagtggcttacatctgtaatcctagcactttgggaggccaaggcaggaggattgcttgaggctaggagttcaagaacgacctggccaacataacaagactctgtctctattttaagaaaagaaaaaagaaagaaagataaaaaaaagaccccatggattatttagaagtgaattacttagtttttaaatatttggggactttt

SEQ ID NO: 938293 - DNA, 598 bp, Homo sapiens
ttcctttactatgttgttaatatgtataaaatctgatctcttcctttattcctgatatttgtaattttttccctagtctgactacagttttataaattgtattgatcttctcaagtaccttttggtttcattgattttttccctaattttttctgtttcattaatttctgcactggcatttattttttcccttcttctgcttactttggatttcattttgctttttyccccctagtttcttaaggttaaagctgaggttattgatttgagttttttttctaatatagacacttttacattaaaaatatctctgtaagtactgtcttacctacatcccacaaattttgctatgttctgtgttcattttcattcagtttaaactcatgggccaggtgcagtggcttacatctgtaatcctagcactttgggaggccaaggcaggaggattgcttgaggctaggagttcaagaacgacctggccaacataacaagactctgtctctattttaagaaaagaaaaaagaaagaaagataaaaaaaagaccccatggattatttagaagtgaattacttagtttttaaatatttggggactttt

SEQ ID NO: 938294 - DNA, 641 bp, Homo sapiens
gctcacgcctgtaatcccagcactttgagaggctgaggtggatggattgcttgagcccaggaattctagaccagcctgggaaacatggcaaaaccctgtctctacgaaaaatacaaaattagtcaagtgtggtggcacacaactgtagtcccagctactccagaggctgaggtgggagaatcacctgagcctgggaagttgaggctgcaatgagctgtgactatgctactgcattccagcctgggtgatggagtgaggccctgtctcaaagaaaaataaaatacaaatcagagacagtattgctaatctgtcatggggcttcaatagcttcagctccctagatcttgctatcttccttcttggaaagcctgtttcaaatgtctctactccccaaattgtagagggtgaaaggtctaaaaaatgtctatgtgaagtcttgatccaygcggcttgctgcgtcacttggccacttgccttcaaccccgttttcccagcttagagccaccactcttctgtgcagaaacaggctacgatgggttctctctgagataggttcttttgctgttgccctagtaacagaattattaaaccaagttccagcctcgagagtatttgtgcctggtgaggtaatgtctgtcgca

SEQ ID NO: 938295 - DNA, 617 bp, Homo sapiens
taaacccttttcattttcgagtaagatgctgtacatgacctgaagttttgctgagtcctagcccttgtcaataacccagggcactataaagtccccttaaggacagggttagattctttattcttgctgattttggttaggaggggctttaggctgggcgcggtggctcaccacctgtaatctcagcactttaggaggccaaggcaggcagatcacttgagcccaggcgtttgagaccagcctgggcaacatgacgaaaccccatctctaccaaaaagtaccaaaaaatttgcaaggagtgatggctcatacctgtactcgcagctacccaagaggctgaggtgggagaamcacatgagcccaggaagtcgaggctgtggtaagctgtgatcacaccactgcacttcagcctgggtgacagagtgagaccctgtctagaaagaaagaaaaaggaaagaaaagaaggaaagaaagagaaagaaagaaagaaagaaagaaagaaggaaagaaagagaaagaaagagggagggaggaaggaaggaagggagggaaagaaagaaagcgagcctttaaagggacgtcacagaaatgagatgggtaaaggaaggcaggcaagt

SEQ ID NO: 938296 - DNA, 789 bp, Homo sapiens
caaaacaatggggctacaggccccatgcaagtccgaaatccagtggggcagtcaaatcttaaagctccaaaattatctcctttgactccatgtcttacgtccaggtcatgctgatgcatgaggtgggctcccatggccttggacagctctgcccctctggctttccagggtatagcccccatcctggctgctttcagaggctggcattaagtgtctgtagcttttccaggcacatggtgtaagctgttggtagatctaccattccggggtctggaggatggtggccctcctctcacagctccactaagtgatgccccaatagggactctgtatgggggctccaaccctacatttcccttctgyactgccctagcagaagttctcctatgagggccctgtccctgcagcaaacttctgcctgggcatccaggtttttccctacatcctgtgaaatctaggtggaggttcccaaatctaaatttttgatgtctgtgcacctgcaggctcaacaccacacggaagctgccaaggcttggggcaggcaccctttgaagccacagcctgagctctatgttggctcctttcagccatggctggagtggctgggatgcagagcacaaagtccctaggctaaacacagaatgaggactctgggcctggcctatgaaaccatattttcctcctaggactcccagcctgtgatgggaggggcttccatgaagtcctgtgacatgccctggagacattttccccattgtcatggtgaggctcctggttacttatgcaaat

SEQ ID NO: 938297 - DNA, 578 bp, Homo sapiens
agaagatgttcaattactttatcagtgtctgtaattgtgactaaacatttctgaagttttacacaaacatgcacacacacacgcacacacacttttttggggggggacagggtcctgctctgttgcccaagcttaagttcagtgtcatgatcctcccaccttagtctctcaattagctggggtcacaggcacatgccatcatgctcggctaatttttaaaaaaaattttggtagagacaaggtctccctgtgttgcccaggccagtatccgactcctaggctcaagcrattctccctcctcgggctctgaaagtgttgggattacaggcatgagccattgtgcctagcctatatatttttttaaactttcaaatttattggcataaaattaaccaaagtattattttaaattttaaaaatcttgctggatatgaagttattttcctttttcattgctaaaattatttatttgtgccatatctcattttcttttttaatattgctagtggtttttctattttattttatttttcaacttttattttcgattcaggggatacacatgcagatttgttacc

SEQ ID NO: 938298 - DNA, 539 bp, Homo sapiens
ggagggtgaggactgccacttgtttacagggaagcagattttttgtgaaacgtgacacaaattcatttggacaaataacactccatccacagtggcttctcctccccgggtctgcagcaagctctccccgtgtggccccggggtgtcaggaagatttaattcctccctttctagaatggatgcttggagggggatgttgackcaaactaaaaatagcccccgcggcccccagcctcggcctccagccagcctgggctctgctgaacgttatgatgtttctcacggaaaggaaagactaatggatttcttccttcaggcaattaaaaagtgatttgtcacacaccaagatgtatggctttgtattggcagatatgaggctgccaggggcctggcgggcggggtgaccggtgatgggaggggcctcaggagtcccatgagcccccaggagagccaggctgggcaagggcagggttcagggtcaggagaaggctccaggtacagtagatgaggcttgaccatgcggcatccagagggccctg

SEQ ID NO: 938299 - DNA, 716 bp, Homo sapiens
cctgctccagggaacaccatctttacctgaaagagtgactgacagacaaattgtgatttttcagatttgagtgtttggcagctattttctcaaaagtggacaaagtgggcctgtcacttccaggggaaaaaaacctgacaatatttgttgccaatgataaaatctgagctttccagtgaaaatcagacttttggaaaacttatatctgccactgcaamcttgacggcatcctaatacttaacagcttttctgatgagaccagtaatgatactaatgactgtgatttttaaaaaacatcatataggctgggtatggtggctcatgcctgtaatcctagcactttgggaggctgaggtgggtggatcatgaggtcaggagttcaagaccagcctggacaacatagtgaaaccccatctctactaaaaatacaaaaattaaccgggcatggtggcgtgtgcctataatcccagctacttgggaggctgaggcgggagaatcacttgaacccgggaggcagaagttgcagtgagccaacatttcaccactgcacaccagcttgggcgacagagctagactccgtctaaaaaaaaaaaaatcatataatgaaatgtgtcaacactctgaagacctgcattcctcagtgagccagtattttccacataactgatgtgtgaggttacaaagtctcacatcagggaatgagtcattcaaagtgc

SEQ ID NO: 938300 - DNA, 619 bp, Homo sapiens
cagctactccaggggctgaggtgggagattactcgagccagggaggccaaggctgcagcagttgaggcaaggtcaaactactgtactccaacgtggacaacagagcaaagatcctgttaaaaaaaagacatggaatctttgctggagcaatatggtaatacacagggttttttggtttttgttttgtcaacagtgtaggaagaactggaagtcacaggasctaacagctcttcgttcttcctctaacataagtaaaccgtctgctacatggcttgatacgtgtcaagcctgcctgtgcctcagcttacccctctgtaaaataaagttaatcataccagaccagtctatagccaggtgaaagtatctacatccaaattggagttattaccatgatactaagaaatactctacttccacagctaattttatgtttctcacccagttgttttaaatacagactactttttaggaaaagagaacaaattcatcactattatcaaaaataagaaagacggagaaaaattacctatcaaaatactggtcctatcctattaatggtgggagatatgtaatgggaaagaaactgttaaaggcctacttcaagctgaagtcatttatt

SEQ ID NO: 938301 - DNA, 588 bp, Homo sapiens
tgtcaaaaatggcaggatttccttcttttctaaggtcaagtaatattcctttgtgtgtgtgtgtgtgtgtgtgtataccacatttatatacatatatatatatatatatatatatatatatatatatatatatacacaccacattttcttcattmatttatctgtcagtggacactttggttgtttccatattttggctattgtgaataatgctgcaatgaaattgagagtgccatgcagatatagtatctctttgaaatagtgactttatttcctttggatatatacccagaagtggaattgctggatcttatggtggttctgtttttttttttttttttttttttttttaatagtctctctgtgttcacccaggctggagtgcagttggcgccatctcggctcactgcaacctctgtcaagcgattctcatgcctcagcctcccagttagctgggattacaggcaggcgccaccatgcctggctaattgttttgtatttttagtagagatgtggtttcaccatgttggccaggctggtctcgagcttctgacctcaggtgatctgcaagtgctgggattacaggca

SEQ ID NO: 938302 - DNA, 588 bp, Homo sapiens
tgtcaaaaatggcaggatttccttcttttctaaggtcaagtaatattcctttgtgtgtgtgtgtgtgtgtgtgtataccacatttatatacatatatatatatatatatatatatatatatatatatatatatacacaccacattttcttcattaatttatctgtcagtggacactttggttgtttccatattttggctattgtgaataatgctgcaatgaaattgagagtgccatgcagatatagtatctctttgaaatagtgactttatttcctttggatatatacccagaagtggaattgctggatcttatggtggttctgtttttttttttttttttttttttttttaatagtctctctgtgttcacccaggctggagtgcagttggcrccatctcggctcactgcaacctctgtcaagcgattctcatgcctcagcctcccagttagctgggattacaggcaggcgccaccatgcctggctaattgttttgtatttttagtagagatgtggtttcaccatgttggccaggctggtctcgagcttctgacctcaggtgatctgcaagtgctgggattacaggca

SEQ ID NO: 938303 - DNA, 757 bp, Homo sapiens
tgtctataccttgtaacaatttacccaaagtttggtggcataaaatagcacacatttattatctcagtttctgtggttcaaaatcctggcataaactagcagggttctctgcttcatggtctctcacaaggctataatcaaggtgtaggccagccgtatggtctcttaagaaggctcaactgggaaaagatctgatttgaagctcacttatgtggttgttgattggattcatagagtgtttgagtgagagcctygattccttgttagtagaggccactttcagttccttgcctgtgggccttgcacacatggcagcttgctgcatccatgcttgcaagctgagaaggcgagagtgagagaataatagcaagaggaggtcacagtcttttcaaattgaaccacagaaatgacaccccatcatttttttccccgagatggggtcttgttatgtttcccaggctgaagtgtagtggctattcagtggtgttatcatagtgcactatagccttgaactacctgactcaagaaatcctcccacctcagcctcctcagtagctgggactacagatgcatgcaaccatatccagtttcccatcacttttgctctattgtatttgttagaagcaagtgactagatccagcccccattgaaacaggagaattgcataaggacgtgaatattaagggagagggatccatgtcaggagatacctaacacagcagccatggacagtataacaatgagtgggcaaaaatg

SEQ ID NO: 938304 - DNA, 666 bp, Homo sapiens
taggcattgacacaggggaggactgggggttctgtaggcagatgctatgaaaggagaaaaagccaattaagcctagcatatttgcgataggatgattgtaatgatgggctcaggaatctaagctggtgtgggagaagggaaggcaaaagggcatgatggcaaaaatgtggaaaggatcatagatcaaaaagcctgacccaggcacagtggctcatgcctgtaatcctatcactttgggaggctgaggcaggaagatcatttgagctcaggagtttaaaaccagcttgagaattatagcaatacctccatctctaccccccmaaaaaaaaaaaaaaaaaaattagctaggcatgatggcatgcacctgttgcttgtgaggctgagtggggaggatagctggagcccaggagttcgagattgcagattgcagtgagccatgatgacattactgcactctaccctgggcaacaaagtgagaccctctctcaaaaaaagaaaaaaaaatctaatgaagctaagcaggaaagctggaaggaagagataatggatgactgatatggtttggctgtgtccacacccaaatttcatcttgaattgtagctcccataattcccacatgttgtgggagggaccctgtgggagatcattgaatcatgggggtggttt

SEQ ID NO: 938305 - DNA, 440 bp, Homo sapiens
ccaccagcaatgagtgagtttcgattgctccacatcctgccagcatttattgttgtcagtgaattgaattttgactattcagataggtgtgtagtggtatctctttgtggttttactttgtatttccctattagataagctcttgagcgtcttttcatrtacttatttgccatctgtatatctttggtgagattgttcaggtcttttgcctatttttaaaaacaggttgttttcttattattcaattttaagagttccttgtatgtttttggtaacagtccttattgcatatgtcttctgagcttatttttcccagtctatggcttgtcttattattttgatggtttttttaatagagtagaagcttttaattttaatgaagtccagttatcagttatttctttcatggattatagtttgatgatgtgtctaagatgtca

SEQ ID NO: 938306 - DNA, 561 bp, Homo sapiens
actgtgtttttactgacttcctgctgaatctttccatttatgatggaagggtgtgaaatcctcaaccataagagtgaatttctctttgcaattttatcggtttttgcctcaggtattttgatgctttgatggtagggtcatacacataagaaatgttatgtattttttgcagactggaacgtctgtatcattatgcagggctctctttttgtctctgataacttacctgctctagagtctactctgtctgaaattaatatacctactcatactcttttttgattagtgttagcagtatacctttcttcattcctttacttttaatctattaatatatgtgtttatatgtgggtttcttgtagacarcataccattgggtcttgtttttccatccactccgagaatatctgtgttttaattggtgtatttagaccattgatgtttaaagtaattgttgatgtagttgaattaatatctacaacattcgttactgttttctcttcattgccattgttctttgttcctgtttttgttctcacttgttttgtgccttttttggtt

SEQ ID NO: 938307 - DNA, 561 bp, Homo sapiens
actgtgtttttactgacttcctgctgaatctttccatttatgatggaagggtgtgaaatcctcaaccataagagtgaatttctctttgcaattttatcggtttttgcctcaggtattttgatgctttgatggtagggtcatacacataagaaatgttatgtattttttgcagactggaacgtctgtatcattatgcagggctctctttttgtctctgataacttacctgctctagagtctactctgtctgaaattaatatacctactcatactcttttttgattagtgttagcagtatacctttcttcattcctttacttttaatctattaatatatgtgtttatatgtgggtttcttgtagacaacataccattgggtcttgtttttccatccactccgagaatatctrtgttttaattggtgtatttagaccattgatgtttaaagtaattgttgatgtagttgaattaatatctacaacattcgttactgttttctcttcattgccattgttctttgttcctgtttttgttctcacttgttttgtgccttttttggtt

SEQ ID NO: 938308 - DNA, 561 bp, Homo sapiens
actgtgtttttactgacttcctgctgaatctttccatttatgatggaagggtgtgaaatcctcaaccataagagtgaatttctctttgcaattttatcggtttttgcctcaggtattttgatgctttgatggtagggtcatacacataagaaatgttatgtattttttgcagactggaacgtctgtatcattatgcagggctctctttttgtctctgataacttacctgctctagagtctactctgtctgaaattaatatacctactcatactcttttttgattagtgttagcagtatacctttcttcattcctttacttttaatctattaatatatgtgtttatatgtgggtttcttgtagacaacataccattgggtcttgtttttccatccactccgagaatatctgygttttaattggtgtatttagaccattgatgtttaaagtaattgttgatgtagttgaattaatatctacaacattcgttactgttttctcttcattgccattgttctttgttcctgtttttgttctcacttgttttgtgccttttttggtt

SEQ ID NO: 938309 - DNA, 597 bp, Homo sapiens
tccatgtatatttgatcgttcaaagttgtccctaagctcaccgatgctttagtgatttattttctctatgtttcattttgtataacttgtattgctgtgttttcaagttcactaatctcttttattttgcatgtctaatattccattaactccatccagtgtacatgttttttaacctggacattatagtttccatgtatagaaattttgagtcatttttatatttcccatakctgtcctttcctttaccttcttgaacatacagaaaataattacagtaacttattttgggatctgtttctactaatttatttttatcttcattatgagtcatattttttggcttctttgcatgctgctaattttttaattatatgtcaaatatcatgaatttgaccttgctgtgtactggatatttctgtattcctttaaatattcttaaatttaatcctgggatagacttaagtaacttaaatacagtttgatccatttgaggcttacttttaagcttaattaatctagagctcattttgcttgttagtaatgagaaaatggtcttctgagtactttgcttgatgctcatgtattatgaaattt

SEQ ID NO: 938310 - DNA, 451 bp, Homo sapiens
aatgcatgtctgaatgctagtgattctcattagaggatgggaaggtggaggtaacaaaaaaatggatatttaacttgtaaaaaccaaaaatatgaataatatcagtataatatttctctttgtgataattttactataccataactgagatttgctaatttaaaaaataaactattttatcatattgggttatttgtttttgacattacatttctgataggaaattgtaggttttgatcactatcttgaagttttaaagtttaaaaagggcttcaagaacatttttattttgacgatgataggamactcccatctgaataatgtacatgaggttcacacagagcctggggtctgccgttccagggcacgggcatgttctgtgagtgtgtgaatgttgtctttcacaatcttgctgatggatgttaaactaaaaggagttttacagggttca

SEQ ID NO: 938311 - DNA, 785 bp, Homo sapiens
tacttttttgaacaagaaaccaaaaagctttctgcaattttttaaaaagatgtatctctacaaagcaagaagaaaaagaaaacatgtttccagacgctttcatatctcaggaagcagagacaggctcctaattagatctgagcacgctcagtaggtatgtttggactgtgtcagcaccacacaacatgtattttcaatagcacccgggagcggcattttatgttgcagaaaaagaaatgaggtggctgtaggtggggccacatggctgctgagcctcctgggggctcctggatactcacatgtgtgagtgctcccatttcaacacttacaacttcctcctctccaccttgtctttctccaaagagggtgtgagaaatgaatatttgcrcataaaatggaagacgctgtacatgtgacacacgcaaacattaaaaatatgggtcctggtgccaggcaggcttgctggcaatcctggctctccactgtatgacattaagcaacttactttgcctctctaagacttcctcatctgctaggtgggatgatactcacctcatggtttttgggtgggatttatgagattttgtatgcaatgagaaatggccggaacactgtaaaccctcaataaactctggttattaattgctgtgtgcatatgtgtgtgtgtgtgtgtgtgtgtgtgtgtgtgtgtgtatttttttttctacaaaggaaaaaaagtgcttaatttatgcattcataggaagtcatgtggcagggttttttaaagtcaagggtgaggacaa

SEQ ID NO: 938312 - DNA, 763 bp, Homo sapiens
atttttactaaacagaaatcatggtaagacttatttgctttattatacttggcctgattattcatataaagtgaagcaagaataattatttttcacataggcttttaaaattggctttgatgaaactttgttccataaaaggaatctcagataagacttttttaaggccaagctcagccaacagtttgtaccctcaaatacctatgagttgggtaaattcctctccccttgatgtcccaagataacttggggcccctaggcctgttagaaagtgacattctttacttaccacaggtcagaaaccctgcacrgggacggtgtaaataaggtataaggctagtttttccaaggggcttttattggctctataagtcaagtttgattccttaaaggaaagcataccattccagtcaaagccttggtaaaatcactagtttctccaattgtgtcctgttacaaaataaaacagattcttattgcacttatgcaaataactaaattgccataagttaagaatactcacaactagttttcaaattctggagaaatcaggtagagagagacgaatgtgctccaaattttgtttacaggagtataccttactcaattgtgaaaagctacaagtagcttaaaaaaaagtttttcttgattctgaaaaacaaaacaggatcagcaacattttaagcaaagtcaaaaaggttacttcagccttctattagttcagtccacacagttaacttctgtcctgcttgatattcacaaa

SEQ ID NO: 938313 - DNA, 588 bp, Homo sapiens
cattaccactgatcccacagaaatacaaaagatcctcagagactaactactaaaacatctccatgtactcaaactagaaaatctagaagacagcctgtgcaacacagtgagaacccatcttaacaaaatattaaaaagttagcctggcatggtggcatgcacctataatcccagctactgaggaggccaaggcaggagaatcacttgaacctaggaggcggaggttgcggtgacccaagatcgcgccgctgcactctagtctgagtgacagartgaggttctgtttcaaaataaataaataaataactgaaggaaaaggaaggagggtaggggggaagggaaggaaagaaggagagagagaaagaaagagagaaagagagagagagagagaaagaaagagaaatagagaaaggaaaggaagaaaggaaaagaaaacaaaatctggaagcaatggaaaaatttctggaaacacacaacttcccaagattgaacgaataaactgaaaccctgagaagaccaataatgagtgctaaaattgaattagtaataaaaatcctaccaaccaaaaaaagtcctggaccagatgga

SEQ ID NO: 938314 - DNA, 588 bp, Homo sapiens
cattaccactgatcccacagaaatacaaaagatcctcagagactaactactaaaacatctccatgtactcaaactagaaaatctagaagacagcctgtgcaacacagtgagaacccatcttaacaaaatattaaaaagttagcctggcatggtggcatgcacctataatcccagctactgaggaggccaaggcaggagaatcacttgaacctaggaggcggaggttgcggtgacccaagatcgcgccgctgcactctagtctgagtgacagaatgaggttctgtttcaaaataaataaataaataactgaaggaaaaggaaggagggtaggggggaagggarggaaagaaggagagagagaaagaaagagagaaagagagagagagagagaaagaaagagaaatagagaaaggaaaggaagaaaggaaaagaaaacaaaatctggaagcaatggaaaaatttctggaaacacacaacttcccaagattgaacgaataaactgaaaccctgagaagaccaataatgagtgctaaaattgaattagtaataaaaatcctaccaaccaaaaaaagtcctggaccagatgga

SEQ ID NO: 938315 - DNA, 689 bp, Homo sapiens
ccatatatgctgttgtgttctcttgaaacacagaactaaggccacagtggtacacgcctggcacagcctctggcctgtgactacattcaatgaaggtgacgaacaagatggagacttcgaaggattccacatgtcaaatgagaaaaaaaraagtctgacctccttatatatgcaaaaaaaattatttcagagtctatcaataaacgggaagaaattgatattaaagaagtttgtaccttcaataatgaggctccagttgtttattcattggtggattgtgaaatagccaaaatgattttgaatcaaggtgatcgtgatattagtgatgatgaagatgatgttaatactgcaaaaaagtgcctctagacaacatgatgaaaatgtgtgatgggcttagtgaaggagtagagcagcatgcatttataacagaacaggaaataatgtaagtttataaaatccaagagagacatctaagacaaaaactgttgttaatgaggcagatgactctggaggaaatcgtttaaaaggccttccagcagtatgtctcctcatccctagagggcccatgcttctgatgtttcttcccacctaaaaaaaataaaatacagtctattgtagccttttaatcgaaacacaaacacagcatcatagctagaggctgaaagcctgccgttgtttgcttgttgttg

SEQ ID NO: 938316 - DNA, 753 bp, Homo sapiens
ccagtatgctagcagcagtgaatggaggctatgcgtgtggaaggttttcaacgtggttttgtcatgacaggtaccatatatgctgttgtgttctcttgaaacacagaactaaggccacagtggtacacgcctggcacagcctctggcctgtgactacattcaatgaaggtgacgaacaagatggagacttcgaaggattccacatgtcaaatgagaaaaaaaaaagtctgacctccttatatatgcaaaaaaaattatttcagagtctatcaataaacgggaagaaawtgatattaaagaagtttgtaccttcaataatgaggctccagttgtttattcattggtggattgtgaaatagccaaaatgattttgaatcaaggtgatcgtgatattagtgatgatgaagatgatgttaatactgcaaaaaagtgcctctagacaacatgatgaaaatgtgtgatgggcttagtgaaggagtagagcagcatgcatttataacagaacaggaaataatgtaagtttataaaatccaagagagacatctaagacaaaaactgttgttaatgaggcagatgactctggaggaaatcgtttaaaaggccttccagcagtatgtctcctcatccctagagggcccatgcttctgatgtttcttcccacctaaaaaaaataaaatacagtctattgtagccttttaatcgaaacacaaacacagcatcatagctagaggctgaaagcctgccgttgtttgc

SEQ ID NO: 938317 - DNA, 753 bp, Homo sapiens
ccagtatgctagcagcagtgaatggaggctatgcgtgtggaaggttttcaacgtggttttgtcatgacaggtaccatatatgctgttgtgttctcttgaaacacagaactaaggccacagtggtacacgcctggcacagcctctggcctgtgactacattcaatgaaggtgacgaacaagatggagacttcgaaggattccacatgtcaaatgagaaaaaaaaaagtctgacctccttatatatgcaaaaaaaattatttcagagtctatcaataaacgggaagaaattgatattaaagaagtttgtaccttcaataatgaggctccagttgtttattcattggtggattgtgaaatagccaaaatgattttgaatcaaggtgatcgtgatattagtgatgatgaagatgatgttaatactgcaaaaaagtgcctctagacaacatgatgaaaatgtgtgatgggcttagtgaaggagtagagcagcatgcatttataacagaacaggaaataatgtaagtttataaaatccaagagagacatctaagacaaaaactgttgttaatgaggcagatgactctggaggaaatcgtttaaaaggccttccagcagkatgtctcctcatccctagagggcccatgcttctgatgtttcttcccacctaaaaaaaataaaatacagtctattgtagccttttaatcgaaacacaaacacagcatcatagctagaggctgaaagcctgccgttgtttgc

SEQ ID NO: 938318 - DNA, 564 bp, Homo sapiens
attaaagtaaagacaggcataggaaattacaagtgtattgattggggaagtgattagtgtccatgaaatcttcacaatttatgttcagagactgcagtaaagacaggcataagaaattataaaagtattagtttggggaactaataaatgttcatgaaatcttcataatttatgttcttctgccatggcttcagccagtccctccatttggggtccctgacttcccrcaacacatgggagatgcctatggtggccacaatgactcaggtaagtgtggagagaagaaagaaaggaatgtatttttttctctccctcatataccttggaatttatcaggaagagagaaaggaactaagggatgccttttccccctctctttccagatgggtaacaactcatcttcagcctgcactccactgaagtgcatcctgaatcactggaactcttttgaacctcagacactggaaaaaaaatgccttgtgttcccttgcacatagacttggctagattataaactgctggacagagaagtttggcctctggagggaagtattaatgttaaaa

SEQ ID NO: 938319 - DNA, 565 bp, Homo sapiens
agagtgcctcttcaggcctaaccctgacccatccttcctcattgggctgggcttccctgcaggatcttcaataactctagccagaggctcaggaacagaatttagatctccctgggcctgaacccctaaggggagggrtggccacagtctctgtaaccagcagacctagcctttcctcctggtagttctgaggaatcaggagagcccagaagagaggggtcccccagcaaagcacaccccctccaccaagggacaaagtactttgttaaacatgtcctccccatgccaccaaactgggtgagaacctccaacaggatttgtcagacaccctaaacaggagtgctcctacgggcatgaggttggtgccccttgggcttggaggtcccataagaaggagcaggcacccatctttgctgttctccaggctccttgagtgacatctcaaggcacaagagtgaatcagatgaatagggcctgaagtgaacccccaggaaactgcagcagccctacagaagagggacctgactattgaaagaaaatcaaacaagcagaaagcaacagcagc

SEQ ID NO: 938320 - DNA, 565 bp, Homo sapiens
agagtgcctcttcaggcctaaccctgacccatccttcctcattgggctgggcttccctgcaggatcttcaataactctagccagaggctcaggaacagaatttagatctccctgggcctgaacccctaaggggagggatggccacagtctctgtaaccagcagacytagcctttcctcctggtagttctgaggaatcaggagagcccagaagagaggggtcccccagcaaagcacaccccctccaccaagggacaaagtactttgttaaacatgtcctccccatgccaccaaactgggtgagaacctccaacaggatttgtcagacaccctaaacaggagtgctcctacgggcatgaggttggtgccccttgggcttggaggtcccataagaaggagcaggcacccatctttgctgttctccaggctccttgagtgacatctcaaggcacaagagtgaatcagatgaatagggcctgaagtgaacccccaggaaactgcagcagccctacagaagagggacctgactattgaaagaaaatcaaacaagcagaaagcaacagcagc

SEQ ID NO: 938321 - DNA, 765 bp, Homo sapiens
tggatttgcagcttatgaccgaatgatgaacattacatcactctaaagactgtgatgtcaatggggagccaaagtgctgtcttaagaaaagtagagttatggtcagaactaatgttttggaaagattcctgtaggcagttgtgtagagaatggmttggagaggggtagacaggggcagtgaaaagactgctgcagtatcccaggttctggatggggaaatggcagtgccattggccaagagagagaacacaggaagaggagcagccttccaagcaatgatgatgggctcagtgtgaacttgttgaatatgaagtgtctgtgttcatcccactggagaagctcattctgcttctacccataagctagataagaaaaacatgtaagattacttgaatttcataagcagtggagtactctgcaattcttttaaaattcaaattcttcaatatgtagactgttattttgttttctacacattttcacaagagagcatctattatgtagagttaaaaacatccactcttaagtcaggtttcactatctgctcaccacctagtgaatattggattgcttccctttcttgttctggttactacatcattgcacaacttaatttgtctctctcaacatcagatacttcatttttaaatcttagctgtagggtgaggggctattggattaggggacctggggtatctggggttctttgatactgagctcagtgccaggacagagctacagagatggaacccgtgcctagctgaa

SEQ ID NO: 938322 - DNA, 650 bp, Homo sapiens
gtgtcactggtgaaagtgtcaggaaaactactatgaaccactctctataaaaggtgctgggagagtaatttactttggcctgtagggctcaggttagcagagggaggaacaacaaaccctgagaaccatataggagtgaatgacagacagggataccagcatctattatcaaaggacccagaggaaacccgaagaatagggaaaagctgagtaagtcaatattcagtaggttttaaaagaaggtaaatatcaaaggagaggaagattgatctcagaaacatcccttcacctggagagtaaagatgccatcagaaggagcccaggcaaatggaaaccctggtccctccaggattgtcttatttcatcgcaaagtgaaatttkgttgactcaaatcaacccaataatttcctggcctggtgtacattgtgaaagatagtatttcacactgttctatgggtgtatttgtgcttttttctttgaaaatacaaaaaaaagttaattttcacatgaataattcattatcattataaaatcttagccaatatagaaaacttcgtggttaaataaaaactttatacatttcaatgttaaacatccctcatagagcttttatccctgtttacccagcattttgttcatgtccctgtact

SEQ ID NO: 938323 - DNA, 780 bp, Homo sapiens
taccaaagaggctggcagcatttggcccctgccttagagatctgtggaactttgaacttgagagagatgatttaaggtatctggcagaagaaatctctacatggcaaagcgttcaagaggaagcagagcataaaagtttggaaaattttcagtttgacaatgtaacagaaaagaaaaacccattttctggggagaaatccaagcttgctacagaaatttgcataaacaaaaagcccaatgttaatcattaagacaatggggaaatgtctccagggcatgtcagagactttcaaggcagcctctcctatcacaggcccagaggcctaggagggaaaaatggttttggggccaggcccagggccccctgctgtgtgcagcctagggacttggtggcttgtgtcctagccactctagctgtggctgaaaggaaccaaggtacagcttgggccatggcttcagagggtgcaagccccaagccttggcagcttacatatggtgttgagcctgcgggtatgcagaagtcaataattgaagtttgggaacctctgcttagattttagaggatgtayggaaacacctggatgttcaggctggtttgctgcgggggcacagccctcactgctagggcagtgtggaagggaaatgtggggttgggccccacacaagagtccccactggggtagtgccaagtggagctgaagaggggcactgtcctccagatccagaatgagagatccaccaacagcttgcagcttgcacctagaaaagccgcagacactc

SEQ ID NO: 938324 - DNA, 591 bp, Homo sapiens
tccttaacgttggcaaaataaactttctaaattaactgagacctgtcccaaattttgggggttcacaagccttaatccttgacatatagtttagttttcttcagcatctaaaagttataatgccgcggcttgtagatcagaaaggactagaaatcaattaacagagtaaccccagaaaaggccacagctctggaaccctcaggccaagattcaaatccccgcatcgtgcctcactatggtgtttagcatccctgaagtcacagttgttcagaatttgtgtctccatcagtaatcagggcataaaaccaaccttgcagacttcagtaagtattcaaggtgttacatgcaacgcacttagcactagtaactataaaggatagtattagcatccatatttgttcaaattggaacgaaatttaaactcagtgaaaaggctgacttaagggagcagrcaattttttaaagacttctttataacagaagtatacgggaaattgattttttttatttttttattttttatttttttgacagggtctcactctgtcgcccaggctagagtgcagtagtgcagtctcagcttactgcaac

SEQ ID NO: 938325 - DNA, 759 bp, Homo sapiens
tgggtaaagaccaaggtacagcttgggcctttgttttagagggtggaagtcccaagccttgacagcttctgcatgatatttgtcctctgggtacacggaagtcaagaattgaggtttgggaacctccaccttgctttcagaggatgtatggaaatgcctggatatccaggtagaagtctgctgcaggggtggagccctcagagaacctctgctagggcagtgcggaagggaaatatggggttggagtccccacacagagtccccattggggcactgtctagtggagctatgagaagagggccaccatactccagaccccagaatggtagatccacctacagcttgcactgtgcacctgaaaaagcaacagacactcagtgccagcccatgaaagcagggagtggaaggggtgaagggagctgtaccctgcaaagctacaggggtggagcagcccaaggccatggaagcctatctcttgcataagcatgacctgcatgtgagacatggagtcaaaggagatcgttttgtaactttaaagtttaatgattaccctgttggactttggactttcatggggtctgtarcccctttgttttggccaacttcttccattggaactggtgtacttacccaatgcctgtatccccatggtatctaggaagtaattaacttgcttttggttttacaggctcataggaggaagggacttgccttgtcttggataagactgtggacttggactttgggttaatgctggaa

SEQ ID NO: 938326 - DNA, 682 bp, Homo sapiens
acaatacttctaaaactatactgtaagggccatttacctgattgcctccttctctcagtgagcgcaagaagaaactatgtattcccagcagagtttatttgaagatattttattccagaaatgtttaacttggtaatttttaccaaccctcctggagaaaacaattggaataaagaaaaataccccctagtaataaaagactaatttcaccagtaaattacaacttttaagcatttatgtacctaccattatagcttaaaaatatatactgcaaaaatcaacagaactacaaggacaaatggatatacctataatacttgtagtaaagccaacacaactgttgctaaaaaaaaaaatacaataatgatacagcagttttgaataatgcaatttgcatatttgacataacaggcatagatggaaaactagacccacaaagaatgcrcattcttttaaaccttgcacaagacatttaaaaaaactgatcatatgatgatgataaagcagtttaacaaatttttaaaaattggaattatacagcatttgttttctgactatagttccatcaaaatttacaattcataataaaaaaatttcaaaagtgagctatattaaagatctttccaattatcaaagaataccattaagaaagtaaaaaagcagccagatgtggtggctcatt

SEQ ID NO: 938327 - DNA, 682 bp, Homo sapiens
acaatacttctaaaactatactgtaagggccatttacctgattgcctccttctctcagtgagcgcaagaagaaactatgtattcccagcagagtttatttgaagatattttattccagaaatgtttaacttggtaatttttaccaaccctcctggagaaaacaattggaataaagaaaaataccccctagtaataaaagactaatttcaccagtaaattacaacttttaagcatttatgtacctaccattatagcttaaaaatatatactgcaaaaatcaacagaactacaaggacaaatggatatacctataatacttgtagtaaagccaacacaactgttgctaaaaaaaaaaatacaataatgatacagcagttttgaataatgcaatttgcatatttgacataacaggcatagatggaaaactagacccacaaagaatgcgcattcttttaaaccttgcacaagacatttaaaaaaaytgatcatatgatgatgataaagcagtttaacaaatttttaaaaattggaattatacagcatttgttttctgactatagttccatcaaaatttacaattcataataaaaaaatttcaaaagtgagctatattaaagatctttccaattatcaaagaataccattaagaaagtaaaaaagcagccagatgtggtggctcatt

SEQ ID NO: 938328 - DNA, 590 bp, Homo sapiens
acttttgtgtgtatttcctgcaagaaatgagacattctttacataactacagtacaaacttcaaaatcagaaaattaatattgaaatattaatgccatctgttcctcagtccagtaatgttctttatagcaaaagratcctgttcagaatcaagtgttgcatttaattatcatctctttaatctcattcaatctggaatggggtctcagtcttaaatttcatgaccttgacaatttagaaaatacagactaacagagtactcatcaatttgggttttctagtgtctcctcatgactagatccagtttatgcaccttcagtagaaatatcacagaagtgatgatttgttcttattaaatggtgcatgattgcaatttgttctattattagttatgctcactttgattgcttgattaagatgatttcttccagtcttctcaactttgaagttattcttttcccctgggtaattaatgatattttgtagagatatattttgaaacttttaacttattcattcacttatcttttgtcagtatggactcactgtttattttattctataagctctaatccattactatcattatt

SEQ ID NO: 938329 - DNA, 588 bp, Homo sapiens
ccagatatgtaaagaagagctagtaccatttctactgaaactattccaaaaaattgttgaggagggactcctacctaactcactctatgagactagtgtcattctgataccaaaacctgccagaaacacaacacaaaaagcaaacttcagacaaatatccttgataaacatagatgcaaaaatactcaaaaaaatactattaaaccaaattcagcagcatatcaaaaaactaatctaccaccaagtaggctttatccctgggatgcaaggttggttcaatatacacaaaccaataaatgtgattcatcacataaacaaaactaaaaacaagaaccacatgatcatctcaatagatgcaggaaaggctttcaataagatttaatatttcttcatgttaaaaatccctcaagaaactaggtgttaaaggaacaaacctgaacataataagaascatctatgaaaaacccacagccaatgtcataataaattggcaaaagccagaagcattacttttgaggaccagaacaagacaaagattccctctctcaccactgccattcaacatagtgctggaagtgctagccagag

SEQ ID NO: 938330 - DNA, 851 bp, Homo sapiens
acctttactgtcctacctcaggggtatgctttttgtcataattttatcagagagaacttgatcacttttagcttctgcaggatatcacactggttcattacattgatgacattatgctgattggatccagtgagcaagcagtagtgaacacactggacttattggtgagayatttgaatgccaggggatgggaaataaatctgactaaaattcagggaacctctacctcagcaaaatttctaggggcccagtggtgtggggcctgtcgagatatttcttctaaggtaaagaataagctgctgcatttggcccctcctacaaccaagaaagaggtacaacacctagtgggcctatttggattttggaggcaacacattcctcatttgggtatgctactccagcccatttatcaagtgacctgaaaggctgccagttttgagtggggtccataacaggagaaggctttgcaacaggtccagactgctgtggaagctgttctggcaattgggccatatgacccagcagatccaatggtgcttaaggtgtcagtggcaggtaggaatggaatgctgtttggagcctctggcaggcctccataggtgaatcacagtggagtcctctatgattttggagcgaggccctgccatcttctgcagataactattctccttttgagagacagctcttggtctgttactgggctttggtggaaactgagcgtttgactatgggtcatcaagttgccatgtgacctgaattgcctatcatgaacggggtgctttctgacccacctagccataaagtgggtcacacacagcagcattccatcatcaaataaaggtggtatatat

SEQ ID NO: 938331 - DNA, 567 bp, Homo sapiens
aggagatgattttagagtacatggtggaagaaattcctaagcagcaaaacattcaagaggtgacttgggtgctgttaaaggcattcagttctataagggaagcagagcatgaaagtttggaaaatttgcagcctgacaatgcaattgaaaagaaaaatcctgtcgccaggcgcagtggctcacacctgtaatcccagcattttgggaggctgaggcgggcagatcacgaggtcaggagatcgagaccatcctggcgaacagggtgaaaccctgtctctactgaaaatacaaaaaaaaaaaaacttagccaggcatggtggcgggtgcctgtagtcccagctacttgggaggctgaggcaggagaatggtgtgaatctggaaggcrgagcttgctgtgagccgagatcgcaccactgcactccagcctgggtgacagagtgagactctgtattattcctgggtgtgtctgtgagggtgttgccaaagaagattagcatttgagtcagtggactgggaagggcagacccaccctcaatctgggtgggcatcatctaatcagctgctagt

SEQ ID NO: 938332 - DNA, 551 bp, Homo sapiens
  misc_feature 1, 2, 3, 4, 5, 6, 7, 8, 9, 10: n = A,T,C or G
nnnnnnnnnntctttcttcttagccgtctgctatgcggcaagggctcacagctccattctgggccctgtagtgaaccctgcaccatgggaacatcacagggtatgaggaagaagctgaccccacagctcagcgatggcagcaactctttctcttaactgtagctgctgatatcaattgcttgggcatgcatgctcttgagaacacstgcttactcttcgtgggaagaaagtgttacccaagtgtgagcacttggctgacaagaatgttgtttgcccagattacaataaaaagctcccccaaccccaggcacccctcccctttcttgaaccacacacccaaagcaaattgcctttcagccttagatttgagctttccaatgggtggggcatgacacatgacacatggaagggccagtagacactgatcaccctcaaccctcgggatgtgctcgtgaacagccccatctcagccttttttttttttttatccccctgaggtggagcctcgccctgttgcccaggcaggagtacagtggtgtgatctcagctca

SEQ ID NO: 938333 - DNA, 720 bp, Homo sapiens
ccttttttgctggagcagcatgtcaccaggagcttttttgtgtcaatttgggaggtttctatatcatatgataggatgatgtcttacagaaggacaagggggatgggaatggttgcttatgcctgaaatcccacactttggaggctcaggtaggaggattgcttcagtccaggagtttgagaccagcctgggcaatatagtgagatgctcccgccccaccatctatacttaaaaaagaaaaattagctggtgtggtgacatgaggctgaggtaggaggatcacttgagcctgggaggtcaaggctgcagtgaactgtgattgcgccgctgcactccagcctttagagaccccgtcaaaaaaaaaaaaaaagggatggggagaaattttgtttttattattaattaattaatctttttttttttttttttttgagacagcgtatggctctgtcgcccaggctggagtgcagtggcgcgatctyggctcactgcaagctctgcctcctgggttcaagcaattctcatgcctcagcctcccgatgtagctggggatcacaggcatgcaccaccacgcctgactaatttctgtaattttaatagagacggggttttgtcatgttggccaggccagtcttgaattcccgatctcaagtgatttgctttcctcagcctcccaaagtgctgggattacaggcgtgagccaccgtgcccggccaagac

SEQ ID NO: 938334 - DNA, 610 bp, Homo sapiens
cccactatcacaagggccctttattccaggcccaaaccctaaattcaccttcttagagcttatcaccctaatcaaggtaagatgaaggcaaggaagaacatacaaaggaaagaaataaggaaaaaaatgaagtagcatacagacgctaagtatacagacattggagtcaggcagaatgctatggattgtgtttaccacctccttgaattcatatgttaatgcctaatcgccaatgtgataatgataagaggtaaagccttttgagaggtgatttaagccataagatcagaaccctcttttatgagattagtcccattataaaagaggtctgagggagcttgttttccccttccaccacatgaggacacagctagaaggtgccaccattgaggaagaaggccttcaccaggacctgcatctgccagcacctttatatcggacctcccaggctccctccagaactaggaggwatcaatttctgttctttagaagccacctggcttatatttttgtgatagcagcccaaactaagatacacagctaggtttgaatcactaccccaccacttattatatttgtaaattagtcctttgttatttttggtgtctgc

SEQ ID NO: 938335 - DNA, 676 bp, Homo sapiens
tgccacagagctggggttgggggatggtagctgctgctgtgccaaaagctgaggttgactgtaattaaccacaatgtgcagaccaagctttcccctggaagttgcaagcttctggtcacctcctatttaaaatagtctcctccaataggctcctttcgagtcccaaaatagttakgcaggacagattctgccagtgcagttattgtctaggtggaggcagcttccttgtgctccctatactgacatcttcctggaagcctccttcattgtctttttttttttttttttttttgagacagtctcgctctgttgcccaggctagagtgcagcaacctccacctcctgggttcaagtgattctcgtgcctcagcctcctgagtaactggaactacaggtgcatgccaccatggttggctaatttttgtgtttttttgtagagatggggtttcactttgttgcccaggctggtcttgactcctgacctcaaatgatcgaccctccttggcctcccaaagtgcagggattacaggtgtgagccaccgtgcctagcctcatcttctcttcttataagggcagcagttatattggattggggcctactgcaatgacctcatttgactttaattacctctttacagaccctatctccaaataaagccatatcctgcagtattgt

SEQ ID NO: 938336 - DNA, 722 bp, Homo sapiens
gccacagagctggggttgggggatggtagctgctgctgtgccaaaagctgaggttgactgtaattaaccacaatgtgcagaccaagctttcccctggaagttgcaagcttctggtcacctcctatttaaaatagtctcctccaataggctcctttcgagtcccaaaatagttatgcaggacagattctgccagtgcagttattgtctaggtggaggcagcttccttgtgctccctatactgacatcttcctggaagcctccttcattgtctttttttttttttttttttttgagacagtctcgctctgttgcccaggctagagtgcagcaacctccacctcctgggttcaagtgattctcgtgcctcagcctcctgagtaactggaactacaggtgcatgccaccatggytggctaatttttgtgtttttttgtagagatggggtttcactttgttgcccaggctggtcttgactcctgacctcaaatgatcgaccctccttggcctcccaaagtgcagggattacaggtgtgagccaccgtgcctagcctcatcttctcttcttataagggcagcagttatattggattggggcctactgcaatgacctcatttgactttaattacctctttacagaccctatctccaaataaagccatatcctgcagtattgttgggtaaggcttcaacatatgaattttgggcagatagagcactctgg

SEQ ID NO: 938337 - DNA, 676 bp, Homo sapiens
tgccacagagctggggttgggggatggtagctgctgctgtgccaaaagctgaggttgactgtaattaaccacaatgtgcagaccaagctttcccctggaagttgcaagcttctggtcacctcctatttaaaatagtctcctccaataggctcctttcgagtcccaaaatagttatgcaggacagattctgccagtgcagttattgtctaggtggaggcagcttccttgtgctccctatactgacatcttcctggaagcctccttcattgtctttttttttttttttttttttgagacagtctcgctctgttgcccaggctagagtgcagcaacctccacctcctgggttcaagtgattctcgtgcctcagcctcctgagtaactggaactacaggtgcatgccaccatggttggctaatttttgtgtttttttgtagagatggggtttcactttgttgcccaggctggtcttgactcctgacctcaaatgatcgaccctccttggcctcccaaagtgcagggattacaggygtgagccaccgtgcctagcctcatcttctcttcttataagggcagcagttatattggattggggcctactgcaatgacctcatttgactttaattacctctttacagaccctatctccaaataaagccatatcctgcagtattgt

SEQ ID NO: 938338 - DNA, 750 bp, Homo sapiens
acctgatcagctgaattcaggagactctccacctgaagcttcagaatggggaaacaagaaaaggggtactaatgtcaaacttgaggcccgccttcaagaagctcagcatttcacacctcggccagagccaaagctttgggctttgagcaaattaggaaaagacacttcttccacaaggtatctttttccatctgtcagtgaagtgtcataatatactgatttcgttagaagatactttactcaaggtcggccagaaaatgatcacagagttactatgtctatgaagtaaaggtgcccccttagatgggaagcrgttgtgcagtacacaacctgcagaactgtacacaacctgcagaaccacacatagcattctttgcttggcagtctggtcccatcctttccacagccctcatatccccgcttcccctccctctgcctagagccctcagacctgttggagaacagtctcaatctacaggttaccattttacatgtaactccttcctgtcagctttttacttccctccccctgcagacagcagggattgacgacgggtgagagaaggctgatggccccatttagggaagcacaggaggaggtggggaggccggatgtagtgaattccaaatgaatgagtatccacgggccaggggatgatcaaggaggtgtgagggttaacagtgcgggccttgaagaaatgccacctaccagctagctgtgagctgctgggcatgcttttagcctcccaa

SEQ ID NO: 938339 - DNA, 616 bp, Homo sapiens
tctatgtctataaaattcttgctggggtttagaaaggaaactgtatataaatctgaggagaattgacatctttattttgttgagttttccaatccatttacatagtatatctctccatttatttagacatccttagatttctttcatcagtattttgtagttttcagtatggaagttctgtttatgttttgttaaatttacactgaagtattttactttctgagcaattttaaatggtactgtattttaaattttygggtctacatgtttattgttagtatatagaaatacacttgattcctgtatgtttatctcatgtccagtaacactgctggactcacttattagttctaggaattttctgtagattcgtttggaatctacacctgcacatagagacagttctagatccttttccctctgtatgccttttgtttccgttttgttgcactggctagaacttctttcactatgttgaataaaagttgtgagagtgaatacctttgctttgttcccagtcttagtgagaaagcatccagtctctcaccattaagtataatgttagctgtaggtttttgtaggtgtttttatcaagcaggagaagttcccactattc

SEQ ID NO: 938340 - DNA, 732 bp, Homo sapiens
acttttgggtggcgcctgcatgtcgtacagaaccatctgtgaaccaggccctagtcttctgtttctctgtcaactgatcatagggaactctccattaggccatgaatgcaggctgggggagagaaggcagggtggcaggagtggagtccatgggtttttgagtcacttcctcatgtaacttacttgtgccttcaggacctgtttgagcctgatcaagtatatacgacttccattggatgatgggatgctgctgtgcacgacccactttatgtctagatgggtcagaaagcacccagttcatgataggcagttcaggtcgcatggtgacttgacccatagtcaaacgttcggtttccaccaaagcccagtaacaggccaagagctgtctctcaaaaggaragtagttatctgcagaagatggcagggccttgctcccaaatcctagaagcctccactgtgattcacctatgggggccagcatcattatctgccactgacacctcaagcaccattggatctgctgggtcatatagcccaagtggcagagcagcttgcacagcagactgggcctgttgcagcgccttgtcctgttctggttctcgctcaaaactggcagcctttcgggtcactcgataaatgggccagagtaacacacccgaatgagaatgtcttgcttccaaaatccaaatagtcccactaggcattgttcctctttcttggttgtaggaggag

SEQ ID NO: 938341 - DNA, 739 bp, Homo sapiens
tcaggtcgcatggtgacttgacccatagtcaaacgttcggtttccaccaaagcccagtaacaggccaagagctgtctctcaaaaggaaagtagttatctgcagaagatggcagggccttgctcccaaatcctagaagcctccactgtgattcacctatgggggccagcatcattatctgccactgacacctcaagcaccattggatctgctgggtcatatagcccaagtggcagagcagcttgcacagcagactgggcctgttgcagcgccttktcctgttctggttctcgctcaaaactggcagcctttcgggtcactcgataaatgggccagagtaacacacccgaatgagaatgtcttgcttccaaaatccaaatagtcccactaggcattgttcctctttcttggttgtaggaggagccaaatacagcaacttatctttccccttagaaggaatatctcgacaggctccacaccacttgacctctagaaattttactgaggtagaaggtccctgaattttagtcagatttatttcccattctctggcacgcaaatgtctcaccaataagtccagtgtgtttgctacttcttgctcactggagccaatcagcataatgtcattaatgtaatggaccagtgtgatatcttgcagaagcaaaaagtaatcaagttctctccaaataagattatgacacaaagccaaagagttgatatacccctgaggtaggacagtaa

SEQ ID NO: 938342 - DNA, 739 bp, Homo sapiens
tcaggtcgcatggtgacttgacccatagtcaaacgttcggtttccaccaaagcccagtaacaggccaagagctgtctctcaaaaggaaagtagttatctgcagaagatggcagggccttgctcccaaatcctagaagcctccactgtgattcacctatgggggccagcatcattatctgccactgacacctcaagcaccattggatctgctgggtcatatagcccaagtggcagagcagcttgcacagcagactgggcctgttgcagcgccttgtcctgttctggttctcgctcaaaactggcagcctttcgggtcactcgataaatgggccagagtaacacacccgaatgagaatgtcttgcttccaaaatccaaatagtcccactaggcattgttcctctttcttggttgtaggaggagccaaatacagcaacttatctttccccttagaaggaatatctcgacaggctccacaccacttgacctctagaaattttactgaggtagaaggtccctgaattttagtmagatttatttcccattctctggcacgcaaatgtctcaccaataagtccagtgtgtttgctacttcttgctcactggagccaatcagcataatgtcattaatgtaatggaccagtgtgatatcttgcagaagcaaaaagtaatcaagttctctccaaataagattatgacacaaagccaaagagttgatatacccctgaggtaggacagtaa

SEQ ID NO: 938343 - DNA, 545 bp, Homo sapiens
attaatgttgtcacgaaaaaaatttttaatcacactttttcctccataataaatttgttaattatgcaggggctggggaagagaacagaaaaatgacataaaagtctgaagaactgccactggggtaaaatgagagaggggtacatgggacctctgtactagttttagaacttcctatgatgccatatttcaaaataaaaaggttttttttaggtcaaaggaattggtgtgagaatacattaaggggctatagtgaaactamatttggccacttttgccaacttcagagcacaaccatcaatggcaataataatttgaatggctaacattaaaagtactgtaaccatctgaacctctgacaaaagcaaaagaagtatcctgaagtatttatagaacacttgttcttcaaactagtcattcatccatttgattagcttacagtacagggaaaaacaggcattgaaatgattatgatgtaattttgaaaatggctataataaagatatgtataatacacaaaaaaaagggaggaggctgtaagtgtg

SEQ ID NO: 938344 - DNA, 588 bp, Homo sapiens
tagtcatataaattgtgcaagcatcatttgtgttgtttaattgttcttgttgttgttgttgatttgtttctggtttttttgtttttgttttttcagtctttttcccattgggtttgaccaactctacctgacttgatcaaatgcaaaggaacattccaaattaggaggartaaggcctctgaattggttagattcccacagctggggaaaaaaaagaaaaagaaaaaaaaaaacagccagcaaaagaaaaaagattgactacacagggactttatttatgtaacaaggccaccttttgctagccaagcgaaaccgaaagagcttcggccatcgccccacagtgtggttcattcttttgcccttttttcaccatgacagctgggattggtccttaaatcaagtcctttctggctttatattttcatatttatgttactttttaaatataagcaatttgtcccagctaaaatatggtaatgagatataaaaggatgttttaaacagtttgatggttgaaagtcaccttaaaagctgctatcaagatgtgtgtgtgtgtatttaaaaggcctttatgctttctttctctcc

SEQ ID NO: 938345 - DNA, 579 bp, Homo sapiens
ggctgattttgagagagaaaattagttcaaagtttctctataaattaaacattagtaccaaaggtacactaatgcaagaccagcatctgggccccatgtcagattaacaaggttttcttggagcattaacccactttttaacmaaaaaaaaaaattataaaagactataaaaaggtttatggaaattccatcttatggtcgagatgattaaaatttaataggtttataagatttgagagacaggtttaattggccttatgctgtctttattttggcgtattgtttgaggaattaagtctcccctctcaaagaataaagatttttgccttttaaacaaaatcttatcactttggctaaatgaatgacttattttacaatgacctgtgatcctattttgcaatatcaagtattttaaactctttatatttgacaaactttccaaaatcaaattctaaattcggtcttcattaatttttttggtattaagcacccttaagtccaagagacacatttggcttgtttggtataataaattcatacaggaagtattgtcaaatatgaaattttgtttagccttct

SEQ ID NO: 938346 - DNA, 749 bp, Homo sapiens
agatggtgacaagtgatatggaaagaagtaagacagggaagacagcctagggaatgccatcctgagatgaaagttgaaattttaaatagaatggtcagggaggcaagacatcagtgagcaggtgactcaagcagagacctgaaggaggtgtgggtggtgtgttctgggaaaagcaagcccggtgtggagggagcacagtggggagggaagtagctgatgaggcagggagatggtgcggtggaggtgcacagtggcgtgtgtgggaggaggcagggcctgcagagtccataggcaagtttcaggaatcagagttccaaggtgagtggccatcagagggtttggagaggagcagatatgatgggcatttgaagtaatcctcctgcctcctggctgctgtgttgaggagggagggagggaggtagggagagagagagagggtgagagagagaagagaagagagagagagagagagagagagagwgtgtgtgtgtgtgtgtgtgtgtgtggagagagagagagggtgagagagagaagagtgtgtgtgtgtgtgtgtgtgtgtgtgtgtgtgtgaaggagggtacttaggaggctgtataatccagtaagtgatgatggtggattggtccaagttatcacctgtggggatggtaaaaagtggttaagattttgaatacattttgaaagtagagccaacaggatgtgcggatggattagatgtgaggaaaaaaaagacgactgaggaggttctg

SEQ ID NO: 938347 - DNA, 572 bp, Homo sapiens
taggaacactttaaactctcatttataaaaggctggaggctcagtgtgaactagcctgaaagttaaaaacgttcatggggtccaaccttagggccccccacaactttgagagttttatcttcctccaaacgccctaccaggttcttactgtgaaaatctgagaaaactcctcacctgcttccagcaagagaaggggaaatgcaaccattctgaaatatgcccagagtttcctgttatccttaaccaaggctgaaccttagggaaaactgctctatcagcacctaactaactggggttttacccaaatctaaccaacctagggaaagggaaataccaactcagcctcactaaaaaaagcgataatgcctctctgccctgcacmctttactaccacatcaatagagctcctgtatgataacaggggattttagcttagaaaacctgcaagcctcagagtcgatttaaaaagtatctaggaaaactcaaagacaacagtggagatgaaaacaagcacattacagaaaatttcagcctctgatattgcaactaaaggaaacaggaaaaacagtccc

SEQ ID NO: 938348 - DNA, 614 bp, Homo sapiens
tttgtatgtttagtagagaaaggatttcgccatgttgtccaggcgggtctcagactcctgggctcaagcaatctaccgcctcggcctcccagagtgctgagattacaggattgagccaccatgcctgacccaacccatcttcaaaactgttttcttcttgcaaaactaaaatgtgatacccattactccccattttcccctacccccagcccctgacaaccaccattctacttcctatctctatgaatttgacaactccggtacgtcayacaagtgaatcatacagcttttgtgtttttgtgactggcttatttcactcagcataatgtccttggggttcttcgtgagtagcatgtgtcagaatttccttccttttttaagctgaataatattccattgtgtgtctatgtcacattttgtttatccattcatctgtagatggacatttaagttccaccttttggctattgtaagtaatgctgccatgaacacggtatgcaactatctctttgagtccctgctttcgattctgttgggtatgtttggaagtggaattgctgagtcatagggactcctgctttttgaacacacattttcattttgaactgggctgt

SEQ ID NO: 938349 - DNA, 570 bp, Homo sapiens
ctcaggcagcctgcaagagccactttactcccacgtgatggaagaagcaacaagtgaaggaaggtcagcaggagcataggaatgttacttacccagtgcactgttgtgtctggagttggttccctccagtgggttcgtagtctcactgacttcaacaatgaagctgcagaccttcacggtgagtgtcacagctcttaaatgtggtgcagacccaaagagtgagcagcagcaagatttatggagaagagcaaaagaacaaagcttccacacacagaaaggaacggcagcaggttgcccctgctggctggggtggccagcttttattccctgatttgtccctgcccatgtcctgctgattggtccattttacagagtgctgattggtccattttacagagtgccsattggtccattttacagagctctgattggtccattttacaaacctctagctagctacagagtgctgattggtgcattttacaaacctctagctagccacagagtgctgattggtacgtttttacagacgctgattggtgtatcttacagtcctgttgtaagacagaa

SEQ ID NO: 938350 - DNA, 598 bp, Homo sapiens
ttggaatgggtgtatctacctaatgcctataccctgattgtgtctaggaagtaactaaattgctttgattttacaagctcataggtagaagggacatgccttgtcttagttgagactttggacttggacttttgggtgaatgctggaattagctaagactttgggggactgttgggaaggcatgattgtgctttgaaatgtgaggacatgagatttgggaggggcaaggggcagaatgatatggtttggctatgtccccacccaaatctcatcttgtagttccyataattcccatgtgtagtgggagggagctggtgagaggtaattgaatcatgagggctgttaccctcatgctgttcttgtgaaagtgagttctcatgagctctgatggtttttataagaggctttcccccaacctttgctctgcatttctccatcctgctagaagggcatgtttgcttccccttctgccatgattgtaagtttcctgaggccttcccagcaatgtggaactgtgagtcaataaaaccctttcctttataaatcacccagtctcaggtatgtctttattagcagtgtgagaatggactaatacatg

SEQ ID NO: 938351 - DNA, 729 bp, Homo sapiens
agcctgggaaacagagtaggcacgagaaggttctagaaatatgtggctggctttgctgatatccaaggatatgtgatcattgcaaagcgattcactcctgttgtcttacccatcagaatgcagtagactagaaaccacaagaaatgaacagatgtaaacagaaacactggcccctcatccaggtggcctaagaaacacccacagactctaaagccaggtctggggactgctcctccctccctctttgggctgtcccatcacacacaggcactttccctcgggagggccttccctagaggtgcctctgaccccagggcggggctccctctttccagagctagccattcatccgcacctccatccatccagggcggggctccttctttccagagccagccattcatccgcacctccatccagtcagtggaaatgcacctcttggctggaagcackgggagcatgtctccaccgccaccttgttctcccacggcaggtgccactgagctgggacagaccctgtggtctgtgtccagtgggcctagggactcgcggtcactggagggcgtgagagccacatgtcccgctctccgtgtggtccctgggtggcagtgccctcagaaaacactgattctgctggaccagggcaggggcacagcatggtgggcaccgcctcagtgaccatctcttctcctcagccatcgactacagtgacagcgccatgctccaagc

SEQ ID NO: 938352 - DNA, 605 bp, Homo sapiens
agaagtcagggcaatctagaaaactagtgcagcagaataacttggtagctatggagatagcaaaaaaaaaaaaaaaaaaggttaaattctgggtacgtttttgaggaaaagctgatagaaactgctgccagattaatgaagaatacataagataaagagagtcaagaatgaatccaagggttttagcttgagcaactggataaattgaattgttatttattggagaatgagaaaattggagacacaaagacagtttaaggcgataaaatcaagagctgggtttaagatgcattatgtttgagatgtcagacattctagaggaaattttgactraactatagatctctgtgtctggagtttgggaaaagatctctgctggagaaaaaaataatgtggaaggcactggcatacagatgaaaattcaagccacaagcctgaatgagattatgcagggagatgagtttggctagatcagtgaagcaatctaaacagagcatcccaaggcagcacagtatttttgaggtagagaaggagcatccagaaataatgtgtaacatgcaagccaagaaaagaaattgtttctaaaaaggagagagtggccgacc

SEQ ID NO: 938353 - DNA, 658 bp, Homo sapiens
attaatgtttaacccatgaaaacactaaagaaaaaggttaactgacttgctgaattaagtcttgtgatagtgttaggtcttgggaccccaattgactatgccaaaaggaaaaaaaattcttgggaccccaattgactatgccaaaaggaaaaaaaattaagttgaaagctgaatcatgcaagaaactacctttccttctgttcctaagcagttagctacagataaaagcttaactatctccacagatagctactctaggttcaccttatcttatgtaaagcsccgatttactgagcgtgagaagaatacatatttgactattcccctatctgctccttttctctggcaacatgtggattcagtcatgtgaccatacattcccatttttccctccagcctacttttcccctttaaatactaaagacctcaaaatcacctttggagaaaggcacagactgcagattgtttctgtgattctgtgttcctttcttccaggcatgtccttaatcttggcaaaataaatctctaaactgattcagacatggctcagatactttttggtttctaggtcatccatctaataaataacagagcaaagatataaacccaggaatttcagattccagagcccacactccatgtgctgtcctgctgtaga

SEQ ID NO: 938354 - DNA, 608 bp, Homo sapiens
ggcttctttgtagacgaagctgattctaaaattcatatggaattacaagaggctccaaatagtcacaacaatcttgaaaacaaagaccaaagttagagaactcacacttctccatttcaaaacctactaaaaagcagtagtactcaagacagggtactggcataagtgcagacatatagatcaatgaacaactgagcatccagaaataaagccatacatctatggtcaactgattttcaagaaggatgttaagatcactcaacggggaaagaatagtctcctcaacaaatggtgctgacygggcacggtggctcacaactgtaatcccagtactttgggaggctgaggcaggcagatcacttgaggccagaagttcaagaccagcctggccaacatggcaaaaccctgtctctagtaaaaatacaaaaaattagccgggcatggtggcacatgcctgtagtcccagctacttaggaggctgagggaggagaatcgcttgaacccaggaggcagaggttgttgcagtgagccaaggtcgtgccactgtactccatcctgggtgacagagtgagactctgtctcaaaaaaaaaacaaaaaaatggtgctg

SEQ ID NO: 938355 - DNA, 614 bp, Homo sapiens
tcaaatctgactcccagccaacatggagtaatagggactacgtataccttcccacctgaaacaacttaaaaatagagcaacatatatctgaagcattttccaaacattaaacaaagagcagtccaggccagtgatccctgaaaggggatgcaaatcaaatgcccggagagacctgtgattgacctgcttactccctcaagggagttgcagtgaggggaacacaggcagagtccagcagtctccataagttgaaaagatacagctggaaatctgasgacaccaaagagactagtgttcctagggcagagtacagagaggtgagagctagcccagaggaacccttccagagatgtgaagtcttccactgagtactggatagcacatgtatgtaagtaaactattaatacttgagactgggaaaagaactaacctaaaggacaaaggggaaaacaaagcaaaacaaaacaaaaaaaacaggtctctggagcttaaaaaagaccaggaagagtttgtgttccaccagtcagagtggaaaaccttacaattcacagggcatctggtagagtactcagaagagcattagctcagtagaggaaaataattagccctaggct

SEQ ID NO: 938356 - DNA, 361 bp, Homo sapiens
caaattcttaaagcatttaaaagacagtaagaaaatcttaagaggtgacagcctgctggcagccctcgcagccctcgctcgctcttggcacctcctcagcctcagcgcccactctggccgtgcttgaggagtccttcagcccacgctgtgctgtgggagytccttcctgggatggccgaggccggagccggctcggacctgggatggccgaggccggagccgctcaggtttaggggaggtgtggagagagaggtacgggcgggaaccagggctgcgtgtggcacttgcaggccagctagagttctgggtgggcgtgggcttggcgggccccgtactgggagcgggcagtgagggacttagc

SEQ ID NO: 938357 - DNA, 594 bp, Homo sapiens
ccaaacatccaaagaaaactaacaccaattttcctgaaacaatcccaaaaaaatgaggaagaggaaattctttctaactcattctatcaggccagtatcaccctgataccaaaaccatacaaggaaataacaacaacgaaaaagaaaactatacactaatatccctgatgaatatagatgttagtattttgcttaacaaaatactagcaaaaggccgggcacagtggctcacgcctgtaakcccagcactttgggaggctgaggcaggcagatcactaggtcaggagtttgagaccagcctggccagcatggtgaaaccctgtctctactaaaaatacaaaaaaattagctgggcatggtggcacacgcctataatcccagctattcgggaggctgaggcaggagaattgcttgaacccgggaggtggaggttgcagtgagccaagatcatgccactgcatgcactctagcctgggcaacagagcgagactccgtctcaaaaaaaaaaaaaaaaatactagcaagtcgaatccaacagcacatcagaaagatagtacaccatgacatcatcaggtggaatttatccctgtgatg

SEQ ID NO: 938358 - DNA, 594 bp, Homo sapiens
ccaaacatccaaagaaaactaacaccaattttcctgaaacaatcccaaaaaaatgaggaagaggaaattctttctaactcattctatcaggccagtatcaccctgataccaaaaccatacaaggaaataacaacaacgaaaaagaaaactatacactaatatccctgatgaatatagatgttagtattttgcttaacaaaatactagcaaaaggccgggcacagtggctcacgcctgtaagcccagcastttgggaggctgaggcaggcagatcactaggtcaggagtttgagaccagcctggccagcatggtgaaaccctgtctctactaaaaatacaaaaaaattagctgggcatggtggcacacgcctataatcccagctattcgggaggctgaggcaggagaattgcttgaacccgggaggtggaggttgcagtgagccaagatcatgccactgcatgcactctagcctgggcaacagagcgagactccgtctcaaaaaaaaaaaaaaaaatactagcaagtcgaatccaacagcacatcagaaagatagtacaccatgacatcatcaggtggaatttatccctgtgatg

SEQ ID NO: 938359 - DNA, 594 bp, Homo sapiens
ccaaacatccaaagaaaactaacaccaattttcctgaaacaatcccaaaaaaatgaggaagaggaaattctttctaactcattctatcaggccagtatcaccctgataccaaaaccatacaaggaaataacaacaacgaaaaagaaaactatacactaatatccctgatgaatatagatgttagtattttgcttaacaaaatactagcaaaaggccgggcacagtggctcacgcctgtaagcccagcactttgggaggctgaggcaggcagatcactaggtcaggagtttgagaccagcctggccagcatggtgaaaccctgtctctactaaaaatacaaaaaaattagctgggcatggtggcacacgcctataatcccagctattcgggaggctgaggcaggagaattgcttgaacccgggaggyggaggttgcagtgagccaagatcatgccactgcatgcactctagcctgggcaacagagcgagactccgtctcaaaaaaaaaaaaaaaaatactagcaagtcgaatccaacagcacatcagaaagatagtacaccatgacatcatcaggtggaatttatccctgtgatg

SEQ ID NO: 938360 - DNA, 739 bp, Homo sapiens
agcggccaacttacttggtaaatataaggcctccctgtttgctgagacaccacaatattgaaatcaggcctattaataaccctacaatttcctctaagtgttcaaatgcaaggaaatgtcacacatctctcactttaaatcataagctagaaatgattaagtttagtgaggaaggtatgtggaaagccaagactgatgaaaagctgggcctcttgcaccagttaggcaagatgtgaatgcaaagaaaaagttcttaaaggaaattagaagtgctacttctgtgaacacacaaatgataagaaagtgaaacagctttatttctgttatggagaatgttttagaggtgtggataaattaaaccagctacaatattcccttaaacccaaactaggacaaggtcctaattctcttcaattctatgaaggctgagagaggtgaggaagctgtggaaggaaagtttaagcagagattgattcataagttttaagaaaaggagccatctctgtatcataaaagtgcaaggagaagcagcaagtgctgatrtattaatagaagctgcagcaagttatcaaaaacatctagttaacataattaatgaaggtgactatgtccaacaaccgattttcaatgtagatgaaacagccttgtattggaagaagatgccatctaggtctttcattgctagagaggagaagcctggcttcaaaaattcaaaggacaggctgtctctctcattagg

SEQ ID NO: 938361 - DNA, 704 bp, Homo sapiens
gactatgtgaaaagaccaaatctatgtctgattggtgtacttgaaagtgatggggaggggggaggagccaagatggctgaataggaacagctcccgtctacagctcccagcgtgagcgacgcagaagacgggtgatttctgcatttccatctgaggtaccgggtttatctcactagggagtgccagacagtgggcgcaggccagtgggkgcgcgcaccgtgcgcgagccaaagcagggcaaggcattgcctcacttgggaagcgcgaggggtcagggagttccctttcagggagtcaaagaaaggggtgacggacgcacctggaaagtcgggtcactcccacccgaatattgcgcttttcagaccggcttaaaagcggcgaaccatgagattatatcccacacatggctcggagggtcctacgcccacggaatctcactgactgctagcacagcagtctgagatcaaactggaaggcggcagcgaggctgggggaggggcgcccgccattgcccaggcttgcttaggtaaacaaagcagccaggaagcttgaactgggtggagcccaccacagctcaaggaggcctgcctgcctctgtaggctccacctctgggggcagggcacagacaaacaaaaagacagcagtaacctctgcagacttaagtgtccctgtctgacagctttgaagagagcagtggttctcc

SEQ ID NO: 938362 - DNA, 704 bp, Homo sapiens
gactatgtgaaaagaccaaatctatgtctgattggtgtacttgaaagtgatggggaggggggaggagccaagatggctgaataggaacagctcccgtctacagctcccagcgtgagcgacgcagaagacgggtgatttctgcatttccatctgaggtaccgggtttatctcactagggagtgccagacagtgggcgcaggccagtgggggcgcgcaccgtgcgygagccaaagcagggcaaggcattgcctcacttgggaagcgcgaggggtcagggagttccctttcagggagtcaaagaaaggggtgacggacgcacctggaaagtcgggtcactcccacccgaatattgcgcttttcagaccggcttaaaagcggcgaaccatgagattatatcccacacatggctcggagggtcctacgcccacggaatctcactgactgctagcacagcagtctgagatcaaactggaaggcggcagcgaggctgggggaggggcgcccgccattgcccaggcttgcttaggtaaacaaagcagccaggaagcttgaactgggtggagcccaccacagctcaaggaggcctgcctgcctctgtaggctccacctctgggggcagggcacagacaaacaaaaagacagcagtaacctctgcagacttaagtgtccctgtctgacagctttgaagagagcagtggttctcc

SEQ ID NO: 938363 - DNA, 584 bp, Homo sapiens
caacagaccacacaggggacctcaggggaagtaccagggtccgtgaggagatggcatgtaaagaaaaatgcggacaaaagcttttattgtggtttctgtagaagaacaggggaagcagggaagcaggcttaggactggctggtttgaataatttcagtgggcactggggtatagggactgtcctagttgtctggtacctggtgccgaggtattaaggttgtataatagtggcctggaccataagagtcctgtaagagcccagtaaaggaggtggttaggggtatgggttttggattggttggtttgcatacaaaaggtgtacttgcatttgagtcccttattgtctctaggaattagctagccccgggagggggcagtctctmctgggtcagcaaggccccagatatcaaagcaagagaataaaaagatgcctgggcacagtggctcacacctggaatcccaggactttgggaggctgagggggagggatcacttggacccaggagttcgagaccagcttggactacaaagtgcgatcctgtctctacaaaaagtttaaaaattagtcaggtgtggtggaatgc

SEQ ID NO: 938364 - DNA, 628 bp, Homo sapiens
gctccaaaagcgagccctgggccctgaacaaaatctggaggcgttattaagcccggcaaccttggtgttctataataggaaccaagaggaacaggccaaaaaggaaaagcgagatcagagaaaggcttaaggctgcatccttagtcatggccctcagacaaacaaaccttggtagttcagagacgacaaaaaatggagcaggccaataacccggtggggctggttatcagtgtggtttgcaaggacacctttaaaaagattgtccaatgrgaaacaagccaccccctcgcccatgtccactatgctgaggcaatcactggaaggtgcactgccccagaagacaaagattctctgggccagaagcccccaaccagatgatccaacaatatgactgagggtgcccggggcaagcgccaggtcatgtcatcacccttactgagtcctgggtacgtttaatcattgagggccaggaaattgacttcctcctggacactggtgtggccttctcagtgttaatcttctgtcccagatggctgtccccaaggtccgttaccatccgaggaatcctgggacagcctgtaaccaagtatttctcccacctcctcagttgtaattgggagactttgct

SEQ ID NO: 938365 - DNA, 654 bp, Homo sapiens
ctgagtcctgggtacgtttaatcattgagggccaggaaattgacttcctcctggacactggtgtggccttctcagtgttaatcttctgtcccagatggctgtccccaaggtccgttaccatccgaggaatcctgggacagcctgtaaccaagtatttctcccacctcctcagttgtaattgggagactttgctctttttacatggctttcttgttatgcctaaaagtcccacaccctgaatagggagggacatatttgccaaagctagagctattatctacatgaatatggggaacaagttgcccatttgttgtcccctacttgaggagggaatcaaccctgaagtctgggcattggacaatttggaagggcaaaaatgcccacccagtccaaatcaggctaaaagaccccaccgcttttccttatcaaaggcaatatccyttaaggcctgaggcgcatcaaggattacaggatattgttagacattcaaaagctcaaggcttagtaagaaaatgcagcagtccctgcaacaccccaattctagaagtacaaaaactgaatggtcagtggagactagtgcaagatcttagactcatcaaagaagcaataattcctctatatccagctgtacccaacccctataccctgctctct

SEQ ID NO: 938366 - DNA, 805 bp, Homo sapiens
  misc_feature 153, 154, 155, 156, 157, 158, 159, 160, 161, 162, 163, 164,165, 166, 167, 168, 169, 170, 171, 172, 173, 174, 175, 176,177, 178, 179, 180, 181, 182, 183, 184, 185, 186, 187, 188,189, 190, 191, 192, 193, 194, 195, 196, 197, 198, 199: n = A,T,C or G
  misc_feature 200, 201, 202, 203, 204, 205, 206, 207, 208, 209, 210, 211,212, 213, 214, 215, 216, 217, 218, 219, 220, 221, 222, 223,224, 225, 226, 227, 228, 229, 230, 231, 232, 233, 234, 235,236, 237, 238, 239, 240, 241, 242, 243, 244, 245, 246: n = A,T,C or G
  misc_feature 247, 248, 249, 250, 251, 252: n = A,T,C or G
caatgttaaacggaagtgaggagagcaggcacactggctgtgcccccatctcagaggaaaagcacggcaatgtttcaccattaagtatactatctgtggacttttccataggtgacttttatcagattaggatagttcccatttacagtttgnnnnnnnnnnnnnnnnnnnnnnnnnnnnnnnnnnnnnnnnnnnnnnnnnnnnnnnnnnnnnnnnnnnnnnnnnnnnnnnnnnnnnnnnnnnnnnnnnnnntgttaatgtgtcaaattacattgactgatttccagaccctaaacaaaccttgcattcctgggataaacccacttgttcattgcttgatttgatttcctttgctaatattttgtaaaatatttttttcatttctgtacataaaaatattgacatatcttttttctcaatatcttkgttaggttttggtaccaggtttatgacataatctttcaaatctgttttattcaaatgtaactacgtgtaacttaaatgtagatacagacagaaaggagaaagggcagtcatgtctcagtgttattagaatgaaaatatgtttttgccattgggaaaactgttctggtctgatggaaggaagagaaggataaagctgaacgaggaggaaaggtgggaatgaggagctcagagctgacgaggcacggccagtggtttagggctcctcacttctccatttatgatgcctgaccttgaacttcactgtcttctcaaaatgtttcttattagattttggttttcaagttacaatcaaagtcattgggaaatagattaataattg

SEQ ID NO: 938367 - DNA, 622 bp, Homo sapiens
tgctaaagatgccagtgccctgatgtagagaccaacacgaggaaagtggcctgatcagaccacgccaagctgttcacacccccttgagagtcctgggctgatcattcaggcttgacagcagcatgaggagcacaaaagactgaaatgagcagctcctagaggacgcctcccccagtgctggacggcacgggggttctctctcggaaccaaggcctggccaggccgtgcccagcacacccactacctggcttttcacttctgttgtgactcagttgttttctgcaccatttggkcacaaattctgttttcattttttttcttctttgagacagagtctcactcagtcacccgagctggagttcagtagcgtgatctgggctcactgcaacctctgcctcccaggttcaaactattctcctgcctcagccttctgagtagctaagactacaggcacatgtcatcatgcctggctaatgttttgtatttttagtactaatggggtttcaacatgttggccaggctggtctcaaactcctgacctcggatgatccacctgtctcagcctcccaaagtgctgcgattacgggcatgagccaccgtgtcaggcccccaaattcttttt

SEQ ID NO: 938368 - DNA, 618 bp, Homo sapiens
tggtggtttgagtttgtgcacatggcatgcctattgccccagcacggccacagctttccaaagtgccgcccagggctggggtctgcccacttcctcggaggtctgtccatgctctgggcaggctacagcctgcaggatgcagatgcccagattggagcagcaccctgtgccctcaagaggagcacagctcacacatccacgtaactcttgtccttagcagtagtgaggggcttctgcaggcagaggagtcggctccacggtcctccatgtaaactaccgggatcaggagcctagggttcaattctgctgtcacgtgtctgcactgtagcctgttctgccttctcaaccagccccttctagctcctggggcagtttctctttagctgaaacttcccttcatcttccaccaataccatgttgcgttacagtttccctcttctcacagaacgagccttgggagagragtgtgttctgtcacacagcctggccatggctcaggtccacaaggtcagctccagactctcagtgcaatgagggaccatgagtagcttctgcttgctgagtgctttccaagtggcggggcctctgccaagtgctttgtgatcctcatatccaagt

SEQ ID NO: 938369 - DNA, 612 bp, Homo sapiens
cccggccgtgtgaggtgtcagtctggccctgctggggggtgcctcccagttaggctgcttgagggtcaggggtcagggacccacttgaggaggcagtctgcccgttctcagatctgtagctgcgtgctgggagaaccactgctctcttcaaagctgtcagacagggacatttaagtctgcagaggttactgctgtctttttgttggtctgtgccctgcccccagaggtggagcctacagaggcaggcaggcctccttgagctgtggtgggctccacccagttcgagcttcccggctgcgttgttaacctaagcaagcctgggcaatggcgggtgcccctccccaagcctcgctgccaccttgcagtttgatctcagactgctgtgctagcaatcagcgagactccgtgggcataggaccctccragccaggtgcgggatataatctcctggtgcgccgttttttaagcccgtcggaaaagggcagtattcaggtgggagtgacccgattttccaggtgccgtctgtcaccaatttctttgactaggaaagggaactccctgaccccttgcgcttccggagtgaggcaatgcctcgccctgctttggctcgcg

SEQ ID NO: 938370 - DNA, 757 bp, Homo sapiens
tgcagagtttttttttgtgtgtgtgtcctatcccctttgtttcttcttcgtgcgtagttaggtggggaacaatcattggctaaagtgatcaagaggaatctgagagccaaagctaacatttaacataaagataagattcttaatatctaaagaaatgagtactctaccttctggctatgcctacctatacatktataattattaggctcctaaaacaataaatgcttacaaaactgacagttactaaaaatattaaattacaataaaatgttccaaatgaacaacactacactttaaaaagtacacttacaaatgatagcttccaaactagtctcatccagggatacctattgatatgcaagagcttctaaagagtgcaatatgtgtattgcatcatttaaaaggctttctaaaagaaaaataaaaggcttaattgaataattaataaaaatgttccatatgctgattctcttggaaaaggcagagcaaaatggcagaagagaaggcaaaattagttgaaccctcatagtatccagttttaactacgtattactaaagaggcactaaagagatagaaaaaaaaccaaaaacaatcttgactctccaatcaccccttccccacttctcaacagtagcagcattgtgcagagaacatttctgtgtgcttgtggagggagaacacagcaaatctgaggcattgaactcagtactgtcctgttagagaagaaagaaaaactggattaaaactcagctgatg

SEQ ID NO: 938371 - DNA, 757 bp, Homo sapiens
tgcagagtttttttttgtgtgtgtgtcctatcccctttgtttcttcttcgtgcgtagttaggtggggaacaatcattggctaaagtgatcaagaggaatctgagagccaaagctaacatttaacataaagataagattcttaatatctaaagaaatgagtactctaccttctggctatgcctacctatacatgtataattattaggctcctaaaacaataaatgcttacaaaactgacagttactaaaaatattaaattacaataaaatgttccaaatgaacaacactacactttaaaaagtacacttacaaatgatagcttccaaactagtctcatccagggatacctattgatatgcaagagcttctaaagagtgcaatatgtgtattgcatcatttaaaaggctttctaaaagaaaaataaaaggcttaatkgaataattaataaaaatgttccatatgctgattctcttggaaaaggcagagcaaaatggcagaagagaaggcaaaattagttgaaccctcatagtatccagttttaactacgtattactaaagaggcactaaagagatagaaaaaaaaccaaaaacaatcttgactctccaatcaccccttccccacttctcaacagtagcagcattgtgcagagaacatttctgtgtgcttgtggagggagaacacagcaaatctgaggcattgaactcagtactgtcctgttagagaagaaagaaaaactggattaaaactcagctgatg

SEQ ID NO: 938372 - DNA, 629 bp, Homo sapiens
ccagaggtgtagtctacagaggcaggcaggcctccttgagctgcagtgggctccacccagtttgagcttcctggcctctttgtttacctactcaagcctcagcaatggtttgcacccctcccccaggcttgctgctgccttgcagttcaatctcagactgctgtgctagcaatgagcaaggctccatwagtgtgggaccctctgagccaggcgcgggatattatctcctggtgtgctgtttgctaagaccattggaaaagtgcagtattagggtgggaatgacccaattttccaggtgctgtctgtcacagcttcccttggctaggaaagggaattccctgacccgttgtgcttcccaggtgaggtgatgcctcacccttgtttggctcttgctcggtgggctgcacccactgtcctgcacccactgtctgacaagccccagtgagatgaacctggtacctcagttggaaatccagaaatcacccgtcttccgtgtcactcacactgggagctgtagactggagctgttgctattcagccatgttggaacccacctactgtgtgtgttttaactgttaggccactcttctgtgggactgctgcaatttcctaggtagtggtccactcca

SEQ ID NO: 938373 - DNA, 570 bp, Homo sapiens
acccgttgtgcttcccaggtgaggtgatgcctcacccttgtttggctcttgctcggtgggctgcacccactgtcctgcacccactgtctgacaagccccagtgagatgaacctggtacctcagttggaaatccagaaatcacccgtcttcygtgtcactcacactgggagctgtagactggagctgttgctattcagccatgttggaacccacctactgtgtgtgttttaactgttaggccactcttctgtgggactgctgcaatttcctaggtagtggtccactccagaccctagtcaccttggaccctcctgcacctggaggtatcactggtaaagcctgtgaaacagcaaagatgacagcctgttccttcctctgggagctctgtccctggggcaccaacctgttgctggccagaatgctcctgtaggaggtttctggagatcccttttgggaggtctcacacagacatgagaaacagacttggggatccacttaaagaaacagtctgactgccccttggcagagcaagtgtgctgtgctgacctccagtctctccagagccagcag

SEQ ID NO: 938374 - DNA, 652 bp, Homo sapiens
agggtgggaatgacccaattttccaggtgctgtctgtcacagcttcccttggctaggaaagggaattccctgacccgttgtgcttcccaggtgaggtgatgcctcacccttgtttggctcttgctcggtgggctgcacccactgtcctgcacccactgtctgacaagccccagtgagatgaacctggtacctcagttggaaatccagaaatcacccgtcttccgtgtcactcacactgggagctgtagactggagctgttgctattcagccatsttggaacccacctactgtgtgtgttttaactgttaggccactcttctgtgggactgctgcaatttcctaggtagtggtccactccagaccctagtcaccttggaccctcctgcacctggaggtatcactggtaaagcctgtgaaacagcaaagatgacagcctgttccttcctctgggagctctgtccctggggcaccaacctgttgctggccagaatgctcctgtaggaggtttctggagatcccttttgggaggtctcacacagacatgagaaacagacttggggatccacttaaagaaacagtctgactgccccttggcagagcaagtgtgctgtgctgacctccagtctctccagagccagcagtctggaaaga

SEQ ID NO: 938375 - DNA, 571 bp, Homo sapiens
ggaacctggacaactcgcagtcaagaccttccattcagtaacagtagtttcttaaaggctagttgcaatgttgaatcaggatccacatcagtgagcttcttgtatcgttcctgtagagtccatctttcacttagaatggacctttaacccatgcatrattttttatgcattacttgggaaatattttttaattgagttctgcaagtctttcaaatgttgaaacttttcattaatattaaaacattgataaccagccaggtgcggtggctcacgcccgtaatcccagcactttgggaggccgaggcaggtggatcatgaggtcaggagatagagaccatgctggctaacaaggtgaaaccccatctctactaaaaatacaaaaaaaaaaaaatagctgggtgtggtggcacgcacctgtaatcccagctacttgggaggctgaggcaggagaatcgcttgaacctgggaggcagaggttgcagtgagccgagatcacgccactgcattccaacctgggcaacagagcaagactctgtctcaaaaaaataaaacattgatcaccaataatctc

SEQ ID NO: 938376 - DNA, 571 bp, Homo sapiens
ggaacctggacaactcgcagtcaagaccttccattcagtaacagtagtttcttaaaggctagttgcaatgttgaatcaggatccacatcagtgagcttcttgtatcgttcctgtagagtccatctttcacttagaatggacctttaacccatgcataattttttatgcattacttgggaaatattttttaattgagttctgcaagtctttcaaatgttgaaacttttcattaatattaaaacattgataaccagccaggtgcggtggctcacgcccgtaatcccagcactttgggaggccgaggcaggtggatcatgaggtcaggagatagagaccatsctggctaacaaggtgaaaccccatctctactaaaaatacaaaaaaaaaaaaatagctgggtgtggtggcacgcacctgtaatcccagctacttgggaggctgaggcaggagaatcgcttgaacctgggaggcagaggttgcagtgagccgagatcacgccactgcattccaacctgggcaacagagcaagactctgtctcaaaaaaataaaacattgatcaccaataatctc

SEQ ID NO: 938377 - DNA, 637 bp, Homo sapiens
gaaacgatgatgaaatatagttcagtaggaaaaacatcttttctgcccacttctcacaagacgaatgacagagaagatgaagttggaattctttccatttgcttttgcctcatggatcggatcctggagggagaacgaaatgcgtgggctgccagtgtgtgtgtgtggaagagctacagctcatttctgtaacaggaaacaacatctgtttctactcagggaccaaataatatttttcaaagtctgagctgagcaactaggtttccttttactggaaaacccagtgtggcgcctcatacactggaagctcagccctttttcctaacttgccctttctcctgacctgccaggaaacaggaaggcttctacccttccatccackcatggtcactgcggtttcctcagccctggccgggattgcagtcagcgctgggagggaggaccgggtgctgtgcccagactgtcagtctttcgtgctgagcccgacagtgtgatccactctctgttctgacgctacgcttcccttcctcggtgcccaagctgaaagaggtctttgtccatccaacagggagagaaaagtgcgctaagttagtttttctaaacggagggccagcacacataccacacagtagaggaa

SEQ ID NO: 938378 - DNA, 596 bp, Homo sapiens
tgtattagtccattctcacactgctaataaagacatacctgagactgggtgatttataaaggaaagggttttattgactcacagttccacattgctgggaaggcctcaggaaacttacaatcatggcagaaggggaagcaaacatgcccttctagcaggatggagaaatgcagagcaaaggttgggggaaagcctcttataaaaaccatcagagctcatgagaactcactttcacaagaacagcatgagggtaacagccctcatgattcaattacctctcaccagctccctcccactacacatgggaattatrggaactacaagatgagatttgggtggggacatagccaaaccatatcattctgccccttgcccctcccaaatctcatgtcctcacatttcaaagcacaatcatgccttcccaacagtcccccaaagtcttagctaattccagcattcacccaaaagtccaagtccaaagtctcaactaagacaaggcatgtcccttctacctatgagcttgtaaaatcaaagcaatttagttacttcctagacacaatcagggtataggcattaggtagatacacccattccaa

SEQ ID NO: 938379 - DNA, 591 bp, Homo sapiens
tctgaattgaagtaggagttgatcatcaactttctcattgtgtagctgcatttgcaaaactatttagcatcccctaagactaggattggttaaacggtgctctactttccatttctctgtagtagaacctagaatcttcccttggtggktccctatattagtctattttcacactgctgataaagacatacccgagacccggaagaaaaagagattttttttttttttttgagacggaggctcgctctgtggcccaggctggagtgcagtggcgcatctctgctcactgcaagctccgcctcccgggttcacgccattctcctgcctcagcctcctgagtagctgggaatacaggcacccaccaccatgcccggcaaatttttttctattttttagtagagacggggtttcaccgtgttagccaggatggtctcgatctcctgacctcgtgatccacccgccttggcctcccaaagtgctgggattacaggtgtgagctaccaagcccggccaagaaaaagatatttaattggacttacagttccacatggctggggaggcctgagaatcatggcgtggggtgaaaagcat

SEQ ID NO: 938380 - DNA, 621 bp, Homo sapiens
gtccctcctcaaaacttctgtaatacatgaaacttaggcaaatggttgggtcattaccatatattactttatatttttatttatcagtatatgtgattacagttatgcttatgttaattgatatgtatatgttaacttttatacatatgtacattgtattattttgttrcatagcacagcattttgtactcaaaaagtgaccaataataataagctgcatactttgggaagcattgcaggctagtcatacagttttttgttttttttttccctgcagcctgacaacctttttagtcattcactaaacctctctcagcttcagtttcttcatctgcaacatatagcaaataataaaacttaactcagatggttctagtgtgaaataatacagagtaaatgtgccaccaaatacaaaccaatggcttgattgacataactcactgctaattttcttgaaatgattcaaagtattttccagacaagcacacactgagggaattcgtcaccactaaacgagtcctatgagaaatactcaaaggtgtcccaaacacaaaaatgaaaggtcaacattcatcatcatcaaaacacatgaaagtagcaaactcataggtcttgtaaaac

SEQ ID NO: 938381 - DNA, 621 bp, Homo sapiens
gtccctcctcaaaacttctgtaatacatgaaacttaggcaaatggttgggtcattaccatatattactttatatttttatttatcagtatatgtgattacagttatgcttatgttaattgatatgtatatgttaacttttatacatatgtacattgtattattttgttgcatagcacagcattttgtactcaaaaagtgaccaataataataagctgcatactttgggaagcattgcaggctagtcatacagttttttgttttttttttccctgcagcctgacaaccttttyagtcattcactaaacctctctcagcttcagtttcttcatctgcaacatatagcaaataataaaacttaactcagatggttctagtgtgaaataatacagagtaaatgtgccaccaaatacaaaccaatggcttgattgacataactcactgctaattttcttgaaatgattcaaagtattttccagacaagcacacactgagggaattcgtcaccactaaacgagtcctatgagaaatactcaaaggtgtcccaaacacaaaaatgaaaggtcaacattcatcatcatcaaaacacatgaaagtagcaaactcataggtcttgtaaaac

SEQ ID NO: 938382 - DNA, 729 bp, Homo sapiens
ggtacctatcaagcaattgattgttttcctgtaatgtcaggacccttctctgtttcctggaagaactttcagcatcactagcagcactttttataggtctgaaggtgttattcaaggtttatggtattgcactagacatcatgaataatacaggagaaacatgagagaacactttttactgtgttaatttactggagagacaagctactcacaagaagatgattagcattatgtggcattttaagtgaatactcacaacacttgagttcactgcaagaacaacaggtggaggctaggaaattatcccagtagtacagtatgtactacagttaattttgtgcagttatgatttacttttgtatatttttgttttacttttctctaaacttcaattggctgcatgtatgctctgtgtktgcctacgtcttgataaattttaactttttataatagatgcatatatatttcattgtattaaatgatcactagtatctacatataatttatgcattcatggacttatcattttcttagttttttaatattgcttgtgtagatgggtcacctgttatctttttcaatttttcataaatctccaaaaattttctaatatatttataggaaaaaatctacatatgagcggacccgcacagttcaaacctgtgttgttgaggagtcaactatatattataatttaagagaggattcaactctttcattctactggca

SEQ ID NO: 938383 - DNA, 613 bp, Homo sapiens
aaaccatgggctgatgctttcagaacctctgtgattgttgcctctgacactgcatccaatagactagcatgttgattagggaaagctaaattcaataaaatacgactgtaagtggggtcaccaccttgaggggttatgttagaaaagtagatgataaggtggtattgatagagtattgaagtctgggctcaaatggttgcccggggcctttcaagaccaatgactgacaagaataggtaatgttcaggacatagagtttaggattgggggacactgtgagttaagggccatgacagaagtcttcataagtaaactgttactggcacaagctgctacctgcccaggtgagcaatctgttggcccagaggagagttgcttactgacataaattgatttgcagaaatttcctgaagcaaacaataagttatttataggtttgcagccttactttcctggaaaaatamttttctggaatgaattgtgaaatcatgttgacacagatggcctcaggtttcagttcggataattaagctgtgtaaatatagaaagtctaaggtttctgtgtgctgttgattcacagtatgcaacaatgatcatattacttttatttact

SEQ ID NO: 938384 - DNA, 644 bp, Homo sapiens
gtgacttttttacctcctacaaagtttcaactgacagtcttattgtctctgactttcccaaattaatgacataattagtcaccagggctttggctgctcaatagggatttagtaagcaatgagtcatatgttggggaacacttcaacaaacaaaatgttggcagagaaagatgtatgaatcagctaggaagaaacactattctatcattgaggatctttctaatattagatatcacagaaaaattttcatatagattaccatataagtgagccaaaayctctaggaacaaaaaagctttgtataattataactccttgccatgatttaacttaaaatttctttacttatttagcaattctataaacaagaatcatttctgttaaggatactaaggagactgttcctattgaatcagaacatttaaaagaaataattgaggaactcacacatgtaaaacgtcattaaccaaactaaaataaaatgtgagggcataaacttaaccagaaatgtttaaaacctatataaaaaaaaaactagaaaacacttctgaatggcacaaatttggacttgagcacggggaaagaaattccatgctcttgaaaaagccttaaaatcataaatgtgccagttctttaaataaact

SEQ ID NO: 938385 - DNA, 595 bp, Homo sapiens
tataaagacatacctgagactgggaagaaaaggaggtttaattggaggtacagttccacatggctagggaggcctcagaatcatggcaggatatgaaaggcacttcttacatggcggcggcaagagaaaatgaggatgsaaaagcagaaacccctgataaaaccatcagatctcagaagacttattcactatcatgagaacactatgaagaaaaccatccccatgattcaaatgatctcccaccagctccctcccacaacacttgggaattatgggagtacaattcaagataagatttgggtgggaactcagagccaaaccatgtcatttggcatttgtaaatatttgcacagggagaattagaaaaatgatattttacctgttatggtctgaacatttgtacctttccaaaattcacatgttgaaactctaatccccaaaatgatggtataaggaggtggggcttttggaaaatgattaggtcatcggagtaaagccttcatgaatgaaatgagtgactttataaaataagtctgagagagacctccccctgagctgttccgccatttgaatttatagcaaaaaaacagatgtt

SEQ ID NO: 938386 - DNA, 465 bp, Homo sapiens
aaagaagaaaactagctgggcatggtggcgtgagcctgtaatcccagctactcgggagggtgaggcaggagaactgtttgtacccaggaggtagaggatgcagtgagccaagatcgcaacactgctctccagcctgggagacagagcaagactctgactcgtggggraaaaaagatattaaaatttagcctggcaaggcagcgcacgtctgtggtcccagctatttgggaggctgagaggggaggatcgcttaagcccaggaggtcgagatggcaacgagctatgattgcaccactgcactccagcctgggcaacacagtgagaccctgactctgaaaaacaaacaatgaaagaaatgttgcgaatggaaatgacaaatggtggcaggaattgggcactctatgagacaacagacacatccccgattggagagtcagggacaggctcttagaagaaatggccttt

SEQ ID NO: 938387 - DNA, 644 bp, Homo sapiens
ttaaggctctttgatttggctcagtacattccaatcttgcttctgtaaaccatcctcatttgcaatcgtgttatccaccacctgagtcccactgtggttacctagttctaatctctccacctgattctggggcatttcaaggtctaagtggcagcagtaggatgcctttctttcacttgaaagtttttagtttattaatccacacaatgtctgcagataacataattgcagcatctttactcctttggctttttgccagcaccaacattggcctttgccaaccccctgagctttttcattctattcttgcattygtctcactgctttcttgaggtctttttcttctcatggaggcaggccatgtcttgcaagtctatgtttgggttcatggttttttacataatccaaaaaaatcataaatcacaccaaagtcagctatcttgccaccaccaaaataagttctgaatccaaatacaaagatgacatccagtgtggtcttgtatattttgactaatttttccagaatttctgtctttggtactgttgccttcccagtgttaaggatatctatgaccatttgtttcctttgaagtagttggttggtcatgagttccctggtccagatagttactgtgtcattcatg

SEQ ID NO: 938388 - DNA, 710 bp, Homo sapiens
agcatttggataaatacacaaccatgctgaccagtctcatgttaaatgtgtaatctctaatttcaagtaagcttttaatgttcttgccaatcatattatgtttctctagtccattttatattttatgtaaaaatggattttcttagatgacaatttatttcttctctttcctcaaatcttcaactcttctcccattcctcacyctcagatgagatcttgattcctacctcacagagaaaactaaatcaatcagaagagactggctacaatctccagccaattctctcttattactatggttgatctgagcattctctttacaaaggccaatccatccaacagtgccaagattccattccctctcactgttcaaagatgttacttccactatttgccaaccctgtcatcaatttttctctttacgggatcattctcattaatttacaaatgtgctattacttccacatgaaaggaagcatgcttctttctgcccccttcagctctatccatgttccttggttcacctttatggcaaaacaagttgtttatactttttctccagattttctcttcctcttcttttgagctcacttacatttcctctgcccccaacattcctaagaaacctctcttctcggggttaccagtgaacatccatgtttacaaattcaaggtcactttatagtcctcctctcacttgacttaatgca

SEQ ID NO: 938389 - DNA, 757 bp, Homo sapiens
aaagtactggaagaaattatggaataattgttttataatcttggagggggaaaagcctaattgcaataaaaacccagaaaccataaaagaaaggaatgatgaacttgactaagaaaaaagtcagggggaggagccaagatggccgaataggaacagctccggtctacagctcccagcgtgagcgacgcagaagacgggtgatttctgcatttccatctgaggtaccaggttcatcttactagggagtgccagacagtgggcgcaggtcagtgggtgtgcgcaccgtgcacgagccgaagcagggtgaggcattgcctcatttgggaagcrcaaggggtcagggagttccctttctgagtcaaagaaaggggtgacggacggcacttggaaaatcgggtcactcccacctgaatactgcgcttttccaacgggcttaaaaaacggcgcaccatgagattatatcccgcacctggctcggagggtcctacgcccacggagtctcactgattgctagcacagcagtctgagatcaaacggcaaggcagcagcgaggctgggggaggagtgcctgccattgcccaggcttgattaggtaaacaaagcagccgggaagctcgaactgggcggagcccaccacagctcaaggaggcctgcctgcttctgtaggctccacctctgggggcagggcacagacaaacaaaaagacagcagtaacctctgcagacttaaacgtccctgtctgacagctttgaagaga

SEQ ID NO: 938390 - DNA, 757 bp, Homo sapiens
aaagtactggaagaaattatggaataattgttttataatcttggagggggaaaagcctaattgcaataaaaacccagaaaccataaaagaaaggaatgatgaacttgactaagaaaaaagtcagggggaggagccaagatggccgaataggaacagctccggtctacagctcccagcgtgagcgacgcagaagacgggtgatttctgcatttccatctgaggtaccaggttcatcttactagggagtgccagacagtgggcgcaggtcagtgggtgtgcgcaccgtgcacgagccgaagcagggtgaggcattgcctcatttgggaagcacaaggggtcagggagttccctttctgagtcaaagaaaggggtgacggacggcacttggaaaatcgggtcactcccacctgaatactgcgcttttccaacgggcttaaaaaacggcgcaccakgagattatatcccgcacctggctcggagggtcctacgcccacggagtctcactgattgctagcacagcagtctgagatcaaacggcaaggcagcagcgaggctgggggaggagtgcctgccattgcccaggcttgattaggtaaacaaagcagccgggaagctcgaactgggcggagcccaccacagctcaaggaggcctgcctgcttctgtaggctccacctctgggggcagggcacagacaaacaaaaagacagcagtaacctctgcagacttaaacgtccctgtctgacagctttgaagaga

SEQ ID NO: 938391 - DNA, 598 bp, Homo sapiens
tagacttaagcaccatctaccggatcacagtccaaaactttaacaccaaaaatattttgctaatatgcccccctgtgaaaccaaggacaagaattatgctacagataaagacactacacaaagtcttggctctctgaaaacttccagaaaagaaggctactgactgtactcgatttacaatgcagttaaaggaaaaccagcccacacagattagaaagaacaagcasaaaaactttggcaactcaaaaaaacagagtgtctttttttccccaaacagttgcactagttccccagcaagggttcttaactgggctgaaatggctgaaatgacagaaatagaattcataatatggataggaatgaagatcattgagattcagaaacatgttaaaacccaatctaaggaatctaagaatcataataaaacaatacaggagctgacagatgaaacagccattataaaaaagaatcaaactgagctgatagggctgaaaaaacacaagaatttcataatgcaattgcaaatattaacggaagaagagaccaagctgaggaaagaatttcagagcttgaagatgggtgccctgaaataaatcag

SEQ ID NO: 938392 - DNA, 619 bp, Homo sapiens
ttttttccccaaacagttgcactagttccccagcaagggttcttaactgggctgaaatggctgaaatgacagaaatagaattcataatatggataggaatgaagatcattgagattcagaaacatgttaaaacccaatctaaggaatctaagaatcataataaaacaatacaggagctgacagatgaaacagccattataaaaaagaatcaaactgagctgatagggctgaaaaaacacaagaatttcataatgcaattgcaaatattaacggaagaagagaccaagctgaggaaagaatttcagagcttgaagatgggtgcyctgaaataaatcagtcagacaaaaataaagcaaaaggaagagacaaacctccaagaaatatgggatcatataaagagatcaaatctatgactcactggtgtccctgaaagagacagggagaaaggaagcaacatgaaaaacaagcttcaggatatcgtccatgaaaacttccccaaattcgctagagaggccaatattcaaattaaggaaatgcagataattcctgcaagatattacacaagaatacatccccaagacacataatcataagattctcaaagttccaaatgagagaa

SEQ ID NO: 938393 - DNA, 598 bp, Homo sapiens
catcacaacattattacaatagccaagatatgaaaactgtctgcctgttgatagatgaatacagaaaatgtgcacccacacatacacacgcatatatacacatacatatatacacacacaagggtatattattcagccatttagccataaaaatcataaaattctgccatttatgacaacatgaatgaacctggamgatattattctgtgaaataagccagacacaaaagacaaatactgcataatcttatttctatgtggaatctaaaaatgtctaacttatagaaacagcatagaatggtggttaccagggtttgggggatagggtaaagagggagatgttagtcaaagagcataaactttcagttacaagatgagtaagttctggatatcaaatgcctaccttgctgaatatagttagtgataatgcatacttgaaatttgctgagagagttgatcttcagagttctcaccacaaaaaagagtatctgtgtaaggtgatggatatgtttattagcttgattttagtaatcattttataatatatgtatatcaaataatcacattttgtatcttaaataaatataatttttatttg

SEQ ID NO: 938394 - DNA, 598 bp, Homo sapiens
catcacaacattattacaatagccaagatatgaaaactgtctgcctgttgatagatgaatacagaaaatgtgcacccacacatacacacgcatatatacacatacatatatacacacacaagggtatattattcagccatttagccataaaaatcataaaattctgccatttatgacaacatgaatgaacctggaagatattattytgtgaaataagccagacacaaaagacaaatactgcataatcttatttctatgtggaatctaaaaatgtctaacttatagaaacagcatagaatggtggttaccagggtttgggggatagggtaaagagggagatgttagtcaaagagcataaactttcagttacaagatgagtaagttctggatatcaaatgcctaccttgctgaatatagttagtgataatgcatacttgaaatttgctgagagagttgatcttcagagttctcaccacaaaaaagagtatctgtgtaaggtgatggatatgtttattagcttgattttagtaatcattttataatatatgtatatcaaataatcacattttgtatcttaaataaatataatttttatttg

SEQ ID NO: 938395 - DNA, 603 bp, Homo sapiens
tgtcgtccctgtgctctgtataggaatatgaccctgcactaaagtctgcatctctgtgtcaacacatgctctggctagagtttgtaagttactccctaagtattattttacttggataaatgatcaaagtcatgttgtaaatcaggtgttgttttcatattcattttagcatacaatttataaaacatctgacctaagagggccacagttatttgtcaaagttacaattgttggccaatgaggaaagcaggagtcagagctgtgaacatcatcgcatgcttctcccatgaggagaacactttaggggtcagcactgtgctcttgcagtcagctcctttcactggagagtgggcttacactcacatggtggtttcctggctcagagtgcagagactacacacactgagagcctggggktatacaggagggtgggtggccccatccaggccctgtcctgcctctgagagaggtgaagggggcagcaactcaagagtcctacatggaggtaaaactgctcagcagggcacagggcctgggaggaggccagagaggattgtgggcatgcacaggatgcctgtgagttttcaacagtggtgacagcca

SEQ ID NO: 938396 - DNA, 658 bp, Homo sapiens
cctgcattctagggataatcagctctcacctgctctctagaatgcccagcccagaggcggtcagcagtacttaatcagtaagggccacacactgggtgatgtgcattggctctgtgtccccactgaaatctcatctcgaattataatccacatgtgttgggggaggggcctggtaggaggtgatttaatcatgggggctgacttcccccttgctgttcttgtgataatgagtgagttctcacsagacctggttgtttgaaagtgtgtggcactttccccttcactgtctctcctgctctgacgtggtaagatgtgcttgtttcccctatgcctcccgccatgattgtaagtttcctgagatctcctagtcatgcttcctattaagccttcagaactgtgagtcaattaaacctcttttcttcataaattacccagtctcaggtagttctgtagagcaatgtgaaaacagactaatacactggggcaacaaatataagttcatctgttatcattatcaccatcaaaaattcacattttacaagtcgatagggcagtttctcaaaaaattaaaattaaattaccacatgacccagccatcccacttctggatatttacccaaatgaattgaaagcagggtcacaaagagatattcgaaca

SEQ ID NO: 938397 - DNA, 614 bp, Homo sapiens
gcccagaggcggtcagcagtacttaatcagtaagggccacacactgggtgatgtgcattggctctgtgtccccactgaaatctcatctcgaattataatccacatgtgttgggggaggggcctggtaggaggtgatttaatcatgggggctgacttcccccttgctgttcttgtgataatgagtgagttctcacgagacctggttgtttgaaagtgtgtggcactttccccttcactgtctctcctgctctgacgtggtaagatgtgcttgtttcccctatgcctcccgccatgattgtaagtttcctgagayctcctagtcatgcttcctattaagccttcagaactgtgagtcaattaaacctcttttcttcataaattacccagtctcaggtagttctgtagagcaatgtgaaaacagactaatacactggggcaacaaatataagttcatctgttatcattatcaccatcaaaaattcacattttacaagtcgatagggcagtttctcaaaaaattaaaattaaattaccacatgacccagccatcccacttctggatatttacccaaatgaattgaaagcagggtcacaaagagatattcgaacaccca

SEQ ID NO: 938398 - DNA, 612 bp, Homo sapiens
acagtttgtgcatagttatattaatgtaaatatattgcttgatatcaaacgcaaacataatatgactgtattgtgagggcgtgaagaggaaagaaggcacatatatggtgggagcagtcattttctagagtgggaagtcagtagataataccaaaaactggaaaattgagaaatataagaaattgagaaatgaatgttttttagagacatggaagtagataccaacatgaccagtaaaagaaatgtaaatgattgtttcaggggaaggaaggagggatataaggctcatgaggaagtatctgatattttcaactatgagtttttaaaatttttggtgaaataaaatctaaatataaaaacaaagatggaatgggaatrtaatgaaatattcaactaaaaatatttcaatggcaactactgaaagaatgcaaagaaaatatataatttccaaaccagtatgaggagaaaaaagaaaaagagaaaaaaataaaacacttcagtaatcccttagaaaacaggaaagaagaatggaagaagcaaagcagaagcttggtaataaagaaaagaaaaaaaaagtaaaagaggctgagcacagtggctcatgcctgtaat

SEQ ID NO: 938399 - DNA, 718 bp, Homo sapiens
agaaagaaaggaaagaaaggaaggaaggcagacaaaattagccgggcgtggtagcgcatgcctgtaatcccagctactcaggagactgaggcaggagaatcacttgaacctgggaggtggaggttgcagtgagctgagatggtgccattgcactccagcctgggcaacaagagtgaaactttaaaaaaaaaaaaaaaaaaagtgagttgcctaccctagctcagaccacctccagccaacccacagatgtgttagaaatgagtgcttatttaagtatggcattgacatgttgtgattagttgttatgcaccattatagcaaaaaaattgcacactgataaaagtaactgttccctcgttggcttcaccagctttcccaagaattgtttaatcccattccstgtataaaatcactctctgctgagaatcctttttctgagaaaagaattctgagatttttttttctgcttgaggcagaccaacactcattccaagaacaactggaaaggctgaataaaacacagaaaacttttttaaaaagttttttgaaagcttcccagttaacaaacatttgaagggccataatctcaaaagaagaaaaacacaaggaggcaagctggccctctgtgaactacttttcctttcaggaaacgtgctgattttagctaagaggccgagcatttgggcagacggccatagctaagaggcagcaaagtcag

SEQ ID NO: 938400 - DNA, 718 bp, Homo sapiens
agaaagaaaggaaagaaaggaaggaaggcagacaaaattagccgggcgtggtagcgcatgcctgtaatcccagctactcaggagactgaggcaggagaatcacttgaacctgggaggtggaggttgcagtgagctgagatggtgccattgcactccagcctgggcaacaagagtgaaactttaaaaaaaaaaaaaaaaaaagtgagttgcctaccctagctcagaccacctccagccaacccacagatgtgttagaaatgagtgcttatttaagtatggcattgacatgttgtgattagttgttatgcaccattatagcaaaaaaattgcacactgataaaagtaactgttccctcgttggcttcaccagctttcccaagaattgtttaatcccattccgtgtataaaatcactctctgctgagaatcctttttctgagaaaagaattctgagawttttttttctgcttgaggcagaccaacactcattccaagaacaactggaaaggctgaataaaacacagaaaacttttttaaaaagttttttgaaagcttcccagttaacaaacatttgaagggccataatctcaaaagaagaaaaacacaaggaggcaagctggccctctgtgaactacttttcctttcaggaaacgtgctgattttagctaagaggccgagcatttgggcagacggccatagctaagaggcagcaaagtcag

SEQ ID NO: 938401 - DNA, 597 bp, Homo sapiens
ctctcgggtatgtcttcattagcaacatgggaacagattaatacagtaaattggtactgggtagtggagtgctgctgtaaagacatcagaaaatgtggaagctactttggaactgggtaacaggcagaggttggaacagcttcgaggactcagaagaagasagaaaagtatgggaaagtttggaacttgctagaggcttgttgatggctttgaccaaaatgctgaagtgatatggacaataaagtacaggctgaggtggtctcagatggagatgaggggtttgttaggaattgaagcaaaggtgactcttgttatgctttagcaaggagactggtggcattttgcccctgccctagagatttgtggaactttgaacttgagagagatgatttagggcatctggtggaagaaagttctaagcagcaaagcattcaagaggtgacctgggtgctgttaaaagcattcagttttatttattcacaaagatatggcttggaattgtaagttatgtttaaaaggaaagcagggcataaaagtttggaaaatttgcagcttgatgatgtgatagaaaagaaaaactcattttctgaggagaaa

SEQ ID NO: 938402 - DNA, 597 bp, Homo sapiens
ctctcgggtatgtcttcattagcaacatgggaacagattaatacagtaaattggtactgggtagtggagtgctgctgtaaagacatcagaaaatgtggaagctactttggaactgggtaacaggcagaggttggaacagcttcgaggactcagaagaagacagaaaagtatgggaaagtttggaacttgctagaggcttgttgatggctttgaccaaaatgctgaagtgatatggacaataaagtacaggctgaggtggtctcagatggagatgaggggtttgttaggaattgaagcaaaggtgactcttgttatgctttagcaaggagactggtggcattttgcccctgccctagagatttgtggaactttgaacttgagagagatgatttagggcatcyggtggaagaaagttctaagcagcaaagcattcaagaggtgacctgggtgctgttaaaagcattcagttttatttattcacaaagatatggcttggaattgtaagttatgtttaaaaggaaagcagggcataaaagtttggaaaatttgcagcttgatgatgtgatagaaaagaaaaactcattttctgaggagaaa

SEQ ID NO: 938403 - DNA, 742 bp, Homo sapiens
aaacatagaggagccacacaactgagcaagagtctaccagttgaccaataagcctaagtgccacctactggatcacaccccaaagcttcaacaccaagaatacctcactaacatactcacctctgaaactagagacaagaagtcagcttcaaaaaaagaccctgcacaaggcctcagcctagtgaaaacagccagaagtctattgactgtactcaatctatatggcagttaaaggaacacccacacatggagatgagaaagaactaacgcaagaactccaaaaattaaaatggccagagtgtcatatgtgctccaaatgrccatacaaattctctaacaagagtgcttatccaggctgagctggctgaaatgacagaaatagaatttaggatatgtataggaatgaagatcattgagattcaggaggacagcaaaacccaatccaaagaaaccacaaatcacaataaagtgatacaggagctgaaagacaaaatagccagtataataaagaacctaatgggtccgacatagctgaataacacagtacaagaatttcacaatgcaatcacaagtattaacagtagaataaaccaagctgaggaaagaatctcagaactcgaaagctggctttctgaaataagacagtcagacaaaaataaagaaaaaagaataaaaaggaatgaacaaaacctccaagaagtaggggattatgtaaagaagccaaatctacaaatcactggca

SEQ ID NO: 938404 - DNA, 742 bp, Homo sapiens
aaacatagaggagccacacaactgagcaagagtctaccagttgaccaataagcctaagtgccacctactggatcacaccccaaagcttcaacaccaagaatacctcactaacatactcacctctgaaactagagacaagaagtcagcttcaaaaaaagaccctgcacaaggcctcagcctagtgaaaacagccagaagtctattgactgtactcaatctatatggcagttaaaggaacacccacacatggagatgagaaagaactaacgcaagaactccaaaaattaaaatggccagagtgtcatatgtgctccaaatgaccatacaaattctctaacaagagtgcttatccaggctgagctggctgaaatgacagaaayagaatttaggatatgtataggaatgaagatcattgagattcaggaggacagcaaaacccaatccaaagaaaccacaaatcacaataaagtgatacaggagctgaaagacaaaatagccagtataataaagaacctaatgggtccgacatagctgaataacacagtacaagaatttcacaatgcaatcacaagtattaacagtagaataaaccaagctgaggaaagaatctcagaactcgaaagctggctttctgaaataagacagtcagacaaaaataaagaaaaaagaataaaaaggaatgaacaaaacctccaagaagtaggggattatgtaaagaagccaaatctacaaatcactggca

SEQ ID NO: 938405 - DNA, 742 bp, Homo sapiens
aaacatagaggagccacacaactgagcaagagtctaccagttgaccaataagcctaagtgccacctactggatcacaccccaaagcttcaacaccaagaatacctcactaacatactcacctctgaaactagagacaagaagtcagcttcaaaaaaagaccctgcacaaggcctcagcctagtgaaaacagccagaagtctattgactgtactcaatctatatggcagttaaaggaacacccacacatggagatgagaaagaactaacgcaagaactccaaaaattaaaatggccagagtgtcatatgtgctccaaatgaccatacaaattctctaacaagagtgcttatccaggctgagctggctgaaatgacagaaatagaatttaggatatgtataggaatgaagatcattgagattcaggaggacagcaaaacccaatccaaagaaacyacaaatcacaataaagtgatacaggagctgaaagacaaaatagccagtataataaagaacctaatgggtccgacatagctgaataacacagtacaagaatttcacaatgcaatcacaagtattaacagtagaataaaccaagctgaggaaagaatctcagaactcgaaagctggctttctgaaataagacagtcagacaaaaataaagaaaaaagaataaaaaggaatgaacaaaacctccaagaagtaggggattatgtaaagaagccaaatctacaaatcactggca

SEQ ID NO: 938406 - DNA, 666 bp, Homo sapiens
ctaacaagagtgcttatccaggctgagctggctgaaatgacagaaatagaatttaggatatgtataggaatgaagatcattgagattcaggaggacagcaaaacccaatccaaagaaaccacaaatcacaataaagtgatacaggagctgaaagacaaaatagccagtataataaagaacctaatgggtccgacatagctgaataacacagtacaagaatttcacaatgcaatcacaagtattaacagtagaataaaccaagctgaggaaagaatctcagaactcgaaagctggctttctgaaataagacagtcagmcaaaaataaagaaaaaagaataaaaaggaatgaacaaaacctccaagaagtaggggattatgtaaagaagccaaatctacaaatcactggcatccctgaaaggaagggggagaaagcaaacagtttggaaaacatatttcaatatattgtccatgaaaacttccacaaccttgctagagaggacaacagtcaaatacaggaaatacagacaactcctgcaagattctacacaggaagatcatccccaagacacataattgtcagattttccaaggtgaaaatgaaagaaagaatgttaaaggcagccagaaagaaaaggcaggttacctgcaaaggaaatcccatcagg

SEQ ID NO: 938407 - DNA, 666 bp, Homo sapiens
ctaacaagagtgcttatccaggctgagctggctgaaatgacagaaatagaatttaggatatgtataggaatgaagatcattgagattcaggaggacagcaaaacccaatccaaagaaaccacaaatcacaataaagtgatacaggagctgaaagacaaaatagccagtataataaagaacctaatgggtccgacatagctgaataacacagtacaagaatttcacaatgcaatcacaagtattaacagtagaataaaccaagctgaggaaagaatctcagaactcgaaagctggctttctgaaataagacagtcagacaaaaataaagaaaaaagaataaaaaggaatgaacaaaacctccaagaagtaggggattatgtaaagaagccaaatctacaaatcactggcatccctgaaaggaagggggagaaagcaaacagtttggaaaacrtatttcaatatattgtccatgaaaacttccacaaccttgctagagaggacaacagtcaaatacaggaaatacagacaactcctgcaagattctacacaggaagatcatccccaagacacataattgtcagattttccaaggtgaaaatgaaagaaagaatgttaaaggcagccagaaagaaaaggcaggttacctgcaaaggaaatcccatcagg

SEQ ID NO: 938408 - DNA, 442 bp, Homo sapiens
gttttaacttgacttgaattgctggatactttggttttggttttgacttgtcttggattttttggtactcggattttgaatttcgtgattttggtttggtataaacggtaaaagtgtatgtgtgccctttttacctgttctttgtcttgtggtgagtgtgtgtgatgtgagcatggtattttgtatcaaaaaaaaaaaagcagcatgggtcaggcaaataagcccaccccactaggaactatgttaaaaagagaatttcaagagagaatttaagggagattacggtgttactgtgrcaccaggaaaacttaaaactttgtgtgaaatagactggacagcattagaggtgggttggcctggacaggtccgttgtttcaaaggtatgacagaaggccacctgtaagccaaggcacccagaccagtttctgtacatagacagtta

SEQ ID NO: 938409 - DNA, 646 bp, Homo sapiens
aacaacatagtcctggtggcttaaacaacaatttatttctcatagttctggaaaactgtgaaggaggctgggaagtctaagctcaaggtgctggcagattctttgtctggtgcgggttctcttccttgtttgcagatggctgtcttcttattgtatccttacataatcaagagaaaaataatctgtctcatgtttcttctcaaaagggcactaattccattcatgagggctctaccttcatgacctcatcacctcccaaaggccccacctcctaacaccatcacattgcaggtgaggatttcaacatatgaactttagagggaggctgggyggggtggctcacatctgtaatcccagcactttgggaggctgaggtgggtggatcacctaaggtcaggagttcaagaccagcctgggcaacatggtgaaaccccatctctgctaaaaatacaaaacttagctgggcatggtggcaggctcctgtaatcccagctactcaggaggctgaggcaggagaatcacttgaacccgggaggtggaggttgcagtgagccaagattgtgccgttgcattccagcctaggtgacaaaagcaaaactccatctcagaaaaaaacaaaacaaaacaaaactgtagagggtcacag

SEQ ID NO: 938410 - DNA, 743 bp, Homo sapiens
acaggtgctcacaactatgcctggctaatttttgtttgtgtgtagagatggggtcttgctgtgttgtccaggttggtctcaaattcctggcctcaagtgatcctccatctcagccttctagagcactgggattacaggcatgagctactggcatattcatatttgtatttattacaatgccttacacatagtaggtgttcagaaaacactgagatgtggatgacaatctattcagtctccacaaagaataaacggactttaaaacatagcagggggccaggcgcagtggctcacgcctgtagtcccagaactttgggaggctgaggcgggtggatcacgaggtcaggagttcgagatcagactgaccaacatggtgaaaccccgtctctactaaaaatacaaaaattagttgggcgtggtggtgggtgcctgtaatctcagctactcaggaggtcccagmtactcaggaggctgaggcaggagaattgcttgaacccaggaggcagaggttgcagtgagccgagatcgcgccattgtactccagcctgggtgacagagtgagactctgtcccaaacaaacaaacaaacaaaaccacatagcagggggagcccagctagatataaaaagcaaatgcttaccctagcagtaacggggcaggagcccatgtttctggggtggggtgggagtaggcaagggacatgggaacaaattctgcatctgtgttgtacctacttgcggtggc

SEQ ID NO: 938411 - DNA, 626 bp, Homo sapiens
tattgtgtttaaaaaaacagttgaggagatgtgattcctctgctgtgccttaaaatgcaagttgatacttacgtaactacactgtattggaagattgtctacagaatgtttggctgttgtgataagtagagtgaataaatgcccacagataaaaaagtggatctccaaataggcaaagaaaaataaatttgtgtggttatggtactcatatctgcttcagttgattgactcttttttttttttttttgagacagagtctcgctctgttgcccagtctagagtgcggtggcgcgatctcggctcactgccagctccacctcccgggttcacgccattctcctgcctcagcctcccragtagctgggactacaggcgtcctccaccacacctggctaattttttgtatttttagtagagacggggtttcactgtgttagccaggatggtctcgatcttctgaccttgtgatccgcccgcctcagcctcccaaagtgctgggattacaggcatgagccaccgtgcccggcctatttgattgactcttaagagcttgtaggtactaacaatatgatttacattgctgctagtgtatctcttagaactaaccaaaaatgggcccaaaatag

SEQ ID NO: 938412 - DNA, 631 bp, Homo sapiens
aaaatgggtttttcttttctaccaaatggtaagcctgcaaattttccaaacttttatgttctgcttcccttttaaagttctagattcaagttatttctttgcttatgcaaatgagaataggcttttagaagcagccagggcacttcttgaatgctttgctgcttagagatttcttccrccaataccctaaatcatctctctggagttaaaagttccacagatctctagagcaggggcacaatgctgccagtctctttgctaaagcatagcaagagtggcctttactctagttctcagtaagttcctcatctccatctgaggctactgcagtggcgacttcactgtccataccactatcagcattttggtcacaaccactcagcaagtctctaggaagttccaaactttccctcatcttcctgtcttcttctgagtcctccaaactgttccaactctgcccattaccaaagttgcttccacattttcaggcatctttataacaataccccacttctctggtaccaattttcagtattagtttattctcatattgctagaaagaactacatggcattggttaatttatgaagaaaagaggtttaattgactcacagttccacaggctgtacag

SEQ ID NO: 938413 - DNA, 631 bp, Homo sapiens
aaaatgggtttttcttttctaccaaatggtaagcctgcaaattttccaaacttttatgttctgcttcccttttaaagttctagattcaagttatttctttgcttatgcaaatgagaataggcttttagaagcagccagggcacttcttgaatgctttgctgcttagagatttcttccgccaataccctaaatcatctctctggagttaaaagttccacagatctctagagcaggggcacaatgctgccagtctctttgctaaagcatagcaagagtggcctttactctagttcycagtaagttcctcatctccatctgaggctactgcagtggcgacttcactgtccataccactatcagcattttggtcacaaccactcagcaagtctctaggaagttccaaactttccctcatcttcctgtcttcttctgagtcctccaaactgttccaactctgcccattaccaaagttgcttccacattttcaggcatctttataacaataccccacttctctggtaccaattttcagtattagtttattctcatattgctagaaagaactacatggcattggttaatttatgaagaaaagaggtttaattgactcacagttccacaggctgtacag

SEQ ID NO: 938414 - DNA, 548 bp, Homo sapiens
aacttacaggatgcaacaaaagcaattctaagaacaaaatttatagcaataaatgcctacatcaaaaaagaagatctcaaattaacaacctaatattgtatctcaaataaccagaaaaaaagaaactaatcccaaagttaacagaaggaagaaaataaagaccagagmagaaataaatgaattagaaacttgaaaaacaatacaatgaaacaacaacaacaaaaaaactacagttttttttttgtaaagataacaaaactggcaaacctttagctagactaagaaaagactcagtaaataagatcagaaataaaacaggaaacattacaactgatgccacaggaatgcaaagaaccataagagcctactatgaacaactatttgccaacaaattgaataacttagaagaaatggatacattcctagacaaatgcaacctaccaaaactgaatcataaagaaatagaatatctgagcagaacaataatgaataagaagattgaatctgtgataaaatgtctctcattgaagaaaagctcagaacctaat

SEQ ID NO: 938415 - DNA, 561 bp, Homo sapiens
tgttcttgccatagaggtattttgcattaattagggtgtttgctgtttactagatggaaggaaaagaatttgtaaaatatccagatttgcctacaaagaccccaaatctgttgatggccaaaaaccaaactgatgagtcagttgaagatcttacctgctggcstctcctaccctcacccctgtttttccttcatctgtgcatggctgtgatcattttcatttgtgtacaaatgttggagtttactgcaagggtacttaacctagagacagccctgggaaaaaggcttagaattcaagggcagatattactcaggcaggtagtgaagcagcctaggactggaaggggggccccaccttctctctgagctggcatcccaaagtcccagctcccaaatcttggcagaattcagactctagttatgactgtcccagactgcccactcactccccagcccccacccaacttcttctacagttcatatattcatggtctcatcatctcaagactctcctcctgtcatttcctaacctctctctcaaccgaatgccatgaagtccagg

SEQ ID NO: 938416 - DNA, 556 bp, Homo sapiens
caccgggcccagacctcccaaactccttagcactgtcagggaaaaaccacctactaaagcctcagtaatggtggacacccctgccccaaccaagctcaatcgacccaggtcgacttcagactgctgtgctggcagcgagaatttcaagctagtggttcttagcttgctgggctctgtgggagtgggacccgctgagcaagaccacttggctccctggcttcagtccgctttgcaggggagtgaaaggttctctctcgctggggttccaggttaccctgcggtacgaaaaaatactmctgcagctagctcagtgtctgcccaaacagccacccagttttgtgcttgaaacacagagccctggtggtataggcacacgagggaatctcctgatctgcagattgcaaaaacggtgggaaaagcatagtaacccggctgggtagcacagtccctcacagcttaccttggctgggggagggaggtccctgctccttgcacttcctgggtgatgtgacaccccaccctgcttctgctcaccctctgtgggttggacccactg

SEQ ID NO: 938417 - DNA, 577 bp, Homo sapiens
attttgtttgctgtggcacacggtcaagactaaaacccaccttcaaatcaaatcattctcacacctctcctgagaagtctttcaaagagcatccaaacattgatgtaactaatgggtgagttttagcattaggctatgtgcccttctaaatacaaaacaccaatgcctctgctgttgcttcccttccctcacctgctatgtggaggtgatgataacttgtcttgccagttcccccaatmtgtatgaaaaggaagtctcactgtagttacctggcaggctctaaccttgccacagcagccagtatggttgttcctgcccagaaaagcccttggtctcacatttccctaactctgtcctgtacatcttgaagtataactcagcacagagctcacccagtcaccctaatcagtgcattctatacatctgctcgccgtctttctccattcccagctacttagagaagcagatcataaggcagtagttttgcattctggctctgcaatttgctacctgtgagaccttggcaaagttacttagcctctttttgcctgggtttccatatttgtaaagtggcgat

SEQ ID NO: 938418 - DNA, 624 bp, Homo sapiens
atacggcttaggctgaaaacttctatcgtcttagaaatgggaataaacctcacactcaccgtccctgttggaagcaagctgaaactccaaaaaaaaagttgcctgttgtccatcatcatggtgaagcggcgtcgttgtctggggtaagtacctggggttcattgtctcgtaccaagattaaggacagagttccctccattgttcattgatttgtaaaccaaaatgtatctgtgacaggtattaatcaattgagaagagttttttatttttatttatttatttattttttgccaaggttcaggacagatccaggtgtctttctccaaagatgattatgatggygttaatatttaaaggggaaagtggcctagaggggaacaagggagggtatgatcatattactgtatccacatgttgcaggagaaatggagcaggtacaggaatagtcaattatgtgttcttctcatgctcagtaaatcagaactttacataagttcaggtgaacatagagtagctacctggggagatatttcacctttttatctgtagtgctctgcttaagaacaaaggaaaaaacagcttcttgcatgattcagcttttagcttaatttttttcctttaggc

SEQ ID NO: 938419 - DNA, 657 bp, Homo sapiens
catcatcaagctactgcctcaaaatctgagctccccgagtacacaatttctgtcccttttaagggctcacaacgctaaagatttcacatgaaagggtcgtgattgatttgagcaagcagggggtacgtgacaggggctcyatgtactggtggtcagagaaacagaacagggcagggagttgcacaatgttcttttatacaatgttgggaatctatgagtaacatcggtttctaagttatgagttgatttttaactactgggtttaggccaggcaggcccaggcctggttttgggcctggcatcaggctgcctgtctttgatttcatgtccttgttttttttctttaaacaggtactgagtataaaacaatatgagagggtctctctcttccctcatttccccctttgagactctcactttttattagtgggagttctcactcttatttttgctacttatgtctttttgtgcaataaattgatagttattcatatagtacacttgtgctgaagcattttggtgaactaaggtagtgatgaagctttttatcatttgaagaagtacaggtagtaaacaagggagcagtaagcaggttcttattactattataacttttattataagagttttaaattctcctagtgctgggaactaatt

SEQ ID NO: 938420 - DNA, 657 bp, Homo sapiens
catcatcaagctactgcctcaaaatctgagctccccgagtacacaatttctgtcccttttaagggctcacaacgctaaagatttcacatgaaagggtcgtgattgatttgagcaagcagggggtacgtgacaggggctccatgtactggtggtcagagaaacagaacagggcagggagttgcacaatgttcttttatacaatgttgggaatctatgagtaacatcggtttctaagttatgagttgatttttaactactgggtttaggccaggcaggcccaggcctggttttgggcctggcatcaggctgcctgtctttgatttcatgtccttgttttttttctttaaacaggtactgagtataaaacaatatgagagggtctctctcttccctcatttccccctttgagactctcactttttattagtgggagttctcactcttatttttgctacttatgtctttttgtgcaataaattgatagttaytcatatagtacacttgtgctgaagcattttggtgaactaaggtagtgatgaagctttttatcatttgaagaagtacaggtagtaaacaagggagcagtaagcaggttcttattactattataacttttattataagagttttaaattctcctagtgctgggaactaatt

SEQ ID NO: 938421 - DNA, 462 bp, Homo sapiens
tataccttttggctattaggaataatactgctatgaacatagatgtataaatatcactttaagaccctgctttcaattcttttgagtatattaccagaagtgaaatcgctggatcatgaaataattctattttaatttttttaaagagccatcatactgttttccaccatggctacacaattatacgtcagtgcagaagggtcccactttctctacattcttgccaacattgctattttctttatctttttttttaagagcagccatcctagtgggtgtaaggtggtatctcatygtagttttgattgcatttcccaaatgattactgatgttgagcatctttttttttttttttggagacagagttttgctctgacgcccaggctggagtgcagtagcatgatctcagttcactgcaacctccatcttccgggctcaggtaatcctcccacctcagcctcc

SEQ ID NO: 938422 - DNA, 564 bp, Homo sapiens
ataaagcgaatattatgcaaatcactcaatgtaatctatcatatcaacaaaatgaaaaataaaattcacatgatcatttcagttgatgctgaaaaagtatttgataaaattcaaaatcccttcatcataaaagccttcagagaaccggtaatagaaggaatataactcagtgtaatgaaagccatgtatgacaaacagcacattatcatctgaataggaaaaaactaaaagcctttcctctaagatctggaaaataacaaagattttcactgtcaacactgttattcaatatcatactggaagtcctaggtagagtaagcagacaagagaaagatataaaaggcatccaaattggaaaggaataaatcaaattatccttgcttgaaggcgatawgttatcttacttggaaaaacctagactccacagaaaaactgttagaactgataaacatattgagtaatatggcaggataaaaaaatcagacagaaaattctgtagcatctctatatgccaacagtgaacaatttaaaaaaaggcataaaacagtaaactcatttacaata

SEQ ID NO: 938423 - DNA, 692 bp, Homo sapiens
agcagatagaaatgtcaactagtggtggcctccagtggaaacatcttgcagggagagactgtaccccagccagtccctggagttttggaagacaaaacactcactgaaggacagagtttgagttccccctccccactggggctctgccacttagaactgtgtgactgtgggcaagtggcttagatacattctgttttctcagtcatcaagcaggtatacttaayacctatcagtgcagttgtgtgtagtaatgcaggttaagtatataaaggggaggtgctcaagaaatgttagtttcccaacctttccctctcctatcctagtcccaatagtcacacccactgttggaagaaaacaattgcatctgacactctctccaactcctacctcacctccttggccattctccagactcgggtgattaagaagatagaaaagataaggaatgtctggagcacataagggtccatacattcagggtaactgcaagggcttctggagtataatgactttggtcaacaactagcatgggtggcatgagcatgttagcccataacagaacaagtactgggatgtcagggccgtggaaggaaagagccaagactcaaggtggtctgacttcaatgcatcaagcagaggcttgctggtccctgtcctcttctgttctgctttttaaagactaaaggtccctg

SEQ ID NO: 938424 - DNA, 777 bp, Homo sapiens
ccttaagtcacttctcttatataacgctattcttcttcagtcacaatctagctattagattacctttctctccctttatagaaaattttctctcacttggagtttctgacttctctgaaaatctttaaatagaaaattttattctggccttgaaccatgaggttcataaattttattgccctacttaaaaaaacaatgtgttccctactccactgtgagatccttgaagtcaaataccatatgtcactcatttaacatcttgaatgcctatgggatagacatgtgtctgggccagagagaatgttaaataaytgttgaataaattaatataacatgtgaattacttcatttttaaaaatatacatttagtattaaaaactatattaaggcacttttctctatacttccaatgcagtacagctaaaaatgctggacattatatctaaaacaaatgtagcaagattgaaaagtggagagaagaaggcacatgggctaggaaagttgggatctaagaaaaaacgtaacagaaaacctgagttttctttttgcttcacatatcttagacctggagctgaagaagccagcaaccaagaaatgccaatggaagcagaccaaaaaaaaaaaaaagcttgatttgtctagccaaaagacgggaaaaggggcagcctagcaaaacaaaaaagctttaaacaataatccctctactccagcctaacaccatgggaaaaaatgcaccccacttgacctttgccaacaaaggcctactggggagccaag

SEQ ID NO: 938425 - DNA, 374 bp, Homo sapiens
ctgtatgggagaaataaacgggactgcaagggcctaggagggagaggtcggcaagggctagggggagcctaaccagcatcctggtgggctggggcaggataagactcccatccccatgccccattcccatgccccattcccatgccccgtctccgtagggccttctgggcttccgtagcttccagcctcatctggggataggaggccatattttctgacctcygagtggctgcatgagtggctgcaagacctcaggaaagtgtctaccccactctgcccctcaccttccctatctgaaatgggggttagctggattccttcagacctcagacccctgaccctgtgttaggtgccacagttctgaaagatgtcct

SEQ ID NO: 938426 - DNA, 622 bp, Homo sapiens
aacttcccttctccctgcctctggaaaatagggagaagaataacttcacagagctgggaaaacttaagatgttccttcttgtaattaccagggcatccatgacatcactctacgtgatagggaaaaataacttaagtagccattgctaggggactgcttaagttaaggcacagcctgccgaagtgcacgaggaggctgttaaaatgaaggatgcgggccaggcgcggtggttcgctcacgcctgtaatctcaacactttgggaggtcgaggcaggtgcatcacctgaggtcaggagtttgagaccagccaggccaacatggagaaaccccgtctctactaaagatacaaaattagcctggcgtggtggcacatgcctgtamtcccagctactcgggaggctgaggcaggagaatcgcttgaacctgggaggcagaggttgcggtgagccgagatcacgccattgcactccagcctgggcaacaagagcgaaactccgtctcaaaaaaaaaaaaaaaaaaaaaaaaaagaaggatgcaggtcagtatgtcttggcaggaaaggatggccaggatatttataggatatttacgtgaagaaagcaagttaaagaactgccagcca

SEQ ID NO: 938427 - DNA, 592 bp, Homo sapiens
caattttaaccttttacaaatgacaaaacaggcccagagaggggtactaatctgccaagaccactacagcagaaagtggggccagaaagaagtcaggccttgactccagggccctccctctgagcccggaaaccccctccacctccgcctaccagactccatcccgcccttacctctgcctgacacctgttgagagctcctcgctccgtgctgtggctccgctgccagcctgctcctwgcttcgccagctcagggctctcctcccccctcccattcctgcagaaacttctgggtccacctggcactgggcaggaggaagccgggcacaaaagcggtgctgtgaaccaagtgccaggtctcagccccctctgtgaaagccaagggcgggagggagagtatgccgggtcacccagagcccccgggactactggctacataatttctgggatccagtgcaaaatgaaaatgcaagtcctcttgcaaaaaaaaaacaaaaaacaaaacaaacaaacaaaaaaccctaagaatttaaagttggcaacagcagagcattagcatagggccctgatccctggagctggcagctagaacc

SEQ ID NO: 938428 - DNA, 735 bp, Homo sapiens
tctagccaggccactgcatgaaccagcagggagccccaagtcaaatctcaccccccaccccttgccctcttccctcttctgctctctgctgttttcttgtttgtttttttgagacagggtctcgctctttcacccaggctggaattaagtggcgtgatctcagctcactgtaacctccgcctcccaggttcaagcgattctcctgcctcagcctcccgagtagctgagactacaggtgtgcaycaccacgcctggctaattttttgtatttttagtagagatggggtttcgtcatgttgcccaggctggtctcaaactcctgagcccaggcaatctgctcgctttggcctcccaaagtgctgggatcacaggtgtgagccaccacgcccagccttctttttttttttttaagcccatatccctttcggacgcagcatagcctcacctctttattctgtgagtgtttggggttctgtgtcctgctaggaaaaggctagtcccccggggcggggactgtcgtctatttgttcactggtgggacccaggtgctcaggcagtgcctggctcatagtagaaacaacttccaagccgggctcgaacctgctacacacctggtcatcaaagatggccagtgggacactgttaggggactattgtgacactattgggggactgacggcagaaaggaaggggagggagtgggtgagaagctccactctgggtggggccaacggc

SEQ ID NO: 938429 - DNA, 589 bp, Homo sapiens
actagactggcttagcctcccagcctacatctttctcctgtgttgaatgcttcctgtcctcaaacatcagaatccaagttcttcagctttgggactcagactggcctctttgcttgcagatggcctattgtggaaccttgtgatcatgtgagttaatactccttaataaactctcttttatatattcatcctattcgttytgtgcctctagagaaccctgactaatacagacactaacatggcaaggagggaactgggtgtcttgtaacagccaggtcagcatgtagattgattgcctgcatggtctccactgacactacgaaggtgtgacaggagttaccttgggacaggaatgaaggtcttggtttcttactccaccttctctgatattatcatgtgggggaatttgggtaccatgtttccatctaatgagggtggagtccaagctcccgtctagcctttgctgatggggttgggagggagactgcgttatgcatttccattaatgtttgactggagttgtgctgttattatctaaaagttttctgtcttgctaggcgcccttttcgtcctcttttggttagagaga

SEQ ID NO: 938430 - DNA, 521 bp, Homo sapiens
agaaactgcactcaacagttctattcaacattgtacttgatgatccagcaagggtagttggacatgaagaagaaataaatggtatccaggtttgaaaggaacatataacactatctctacttgcatgtgacatggtcttgtatgtagaagatcctaaggaatatacacacacaaaggaaaaagtactattagaactgataaaaagggttcagcaaggttgcaggatacaggatcaatatacaaaaatcaattgtattcttattcatttagcaatgaacaatctgaaaatagaactaaggaaatagttccatgtaccatagcatcaaaagagtaaaatacttaggagtatatttaacaaartaaatgcaagacttgtatactgaaaatgacaaaacatcattcaaagaactaaagaagatctaaataataaaaagacattccatgattacgaatcagaagacttcatattgttaacacggaaatattctcccagttgatctacagactcaatgcaattccta

SEQ ID NO: 938431 - DNA, 627 bp, Homo sapiens
cttggtttgcaaagtgagaaaaatcctgtgtcacttctaggtatgtactaaagaaaatgcatattcatgatcaccaaaagccacatactagaatcttcatagctcttcataataacctcacactagaaacagccaaaatatccatcagcaatagaatgataaatatatcacaatgtatttacagaatggaataatatatagcagtttttttcaaaaaatttgtattagaatcatctggagagttttttttttaaatacagattgttttgccccacaatgaatttctgattcagcattgtcaagttggcagcacaagaaccgctttgatatttgcatttctagtacgtttctacaatgctgataactgatggtgtgggagcaccttttgataatcactggacacagtaattagaacaatctatagctactgcaacaacatgtgggaatctcmcaaacctgatattgagcacagggagctagaagctgatttaaaggtgaaaaacaggcaaaacaatttcttagtgttaaaagtcaaaacaaggttacacttggaggagaaggagtaaaaggaaggaggccagacgagttcttcagtggtgctggctctgatatgtttcttgatctagg

SEQ ID NO: 938432 - DNA, 780 bp, Homo sapiens
ggcgtccatcatggcctcagtgaggaccccgtccttggaggcatatgccgtggcctagtgaagagagagggagctgagggaggccgctatgggaacccgccacccttaatgcacgccagggccccgaggtggggaggggccaaaccaggggcaccaggacaacctcagggtgaaacacaggcttcccacaccttggcagagcccagcacgcgtgtggacactgggagcggcccctgcagtgcccacagccctgcctgcgtcctcagcactgctgttgctcaatgactttctgataatagaaaacccaaggcggagcaccactgacggctgacccrgggcagcttccgagaggcaggtgggaactgcagaccctctgcgagtctcagccgtggccaggcagtgcccccgggtcatagtgcacctcagaccctcagaccctgaccctcacaggcctccagggcagaggcagccactgcccaccttgggacatcaaggccacctctgcctccatttccctgtcctcctgggcacagggcttggcattgagcacacggaggctggagctactggggctgtggcccttggtgtcgccttaggcacctcaggtgcagcagcccttctgccacggacaggtcgctctccatctcagtgccagcgaagggcgtggagtccccaaggggaggcacccatgggtcagggtgagggtgtggggacccccactaggtgccgtgctcaggagtgcaccaggacacctggaggaagcacagggcaggggaccct

SEQ ID NO: 938433 - DNA, 802 bp, Homo sapiens
gagaaccactgctctcttcaacgctgtcagacaggaacatttaagtctgcagaggttactgctgtctttttgtttgtctgtgccctgcccccagaggtggagcctacagaggcaggcaggcctccttgagctgtggtgggctccacccagttcgagcttcctggctgttttgtttacctaagggagcctgggccatggcrggtgcccctgccccagcctcgctgccgccttgaagtttgatctcagactgctgtgctagcaatcagcgagactccgtgggcgtaggaccctccgaaccaagtgcgggctataattctcctggtgcgccctttcctaagcctgtcggaaaagctcagtattcaggtgggagtgacccgattttccaggtgccgtctgtcacctctttccttgaccgggaaagggaactccctgaccccttgcgcttcctgagtgaggcaatgccttgccctgctttggctcgcgcacagcgcgctgcacccactgtcctgcacccactgtctggcactccctagtgagatgaacccggtacctcagatggaaatgcagaaatcacccgtcttctgcgtggctcacactgggagctgtagaccagagctgttcctattcggccaccttggctcctccccccatcatgtggtttttgtcattggttctgtttatgtgatagattatgtttattgatttgtgtatgttgaagcagccttgcatcctagagatgaagccgacttcatcgtggtggatgagctttttgatgtgctgctggattctttttgccagtatt

SEQ ID NO: 938434 - DNA, 802 bp, Homo sapiens
gagaaccactgctctcttcaacgctgtcagacaggaacatttaagtctgcagaggttactgctgtctttttgtttgtctgtgccctgcccccagaggtggagcctacagaggcaggcaggcctccttgagctgtggtgggctccacccagttcgagcttcctggctgttttgtttacctaagggagcctgggccatggcgggtgcccctsccccagcctcgctgccgccttgaagtttgatctcagactgctgtgctagcaatcagcgagactccgtgggcgtaggaccctccgaaccaagtgcgggctataattctcctggtgcgccctttcctaagcctgtcggaaaagctcagtattcaggtgggagtgacccgattttccaggtgccgtctgtcacctctttccttgaccgggaaagggaactccctgaccccttgcgcttcctgagtgaggcaatgccttgccctgctttggctcgcgcacagcgcgctgcacccactgtcctgcacccactgtctggcactccctagtgagatgaacccggtacctcagatggaaatgcagaaatcacccgtcttctgcgtggctcacactgggagctgtagaccagagctgttcctattcggccaccttggctcctccccccatcatgtggtttttgtcattggttctgtttatgtgatagattatgtttattgatttgtgtatgttgaagcagccttgcatcctagagatgaagccgacttcatcgtggtggatgagctttttgatgtgctgctggattctttttgccagtatt

SEQ ID NO: 938435 - DNA, 802 bp, Homo sapiens
gagaaccactgctctcttcaacgctgtcagacaggaacatttaagtctgcagaggttactgctgtctttttgtttgtctgtgccctgcccccagaggtggagcctacagaggcaggcaggcctccttgagctgtggtgggctccacccagttcgagcttcctggctgttttgtttacctaagggagcctgggccatggcgggtgcccctgccccagcctcgctgccgccttgaagtttgatctcagactgctgtgctagcaatcagcgagactccgtgggcgtaggaccctccgarccaagtgcgggctataattctcctggtgcgccctttcctaagcctgtcggaaaagctcagtattcaggtgggagtgacccgattttccaggtgccgtctgtcacctctttccttgaccgggaaagggaactccctgaccccttgcgcttcctgagtgaggcaatgccttgccctgctttggctcgcgcacagcgcgctgcacccactgtcctgcacccactgtctggcactccctagtgagatgaacccggtacctcagatggaaatgcagaaatcacccgtcttctgcgtggctcacactgggagctgtagaccagagctgttcctattcggccaccttggctcctccccccatcatgtggtttttgtcattggttctgtttatgtgatagattatgtttattgatttgtgtatgttgaagcagccttgcatcctagagatgaagccgacttcatcgtggtggatgagctttttgatgtgctgctggattctttttgccagtatt

SEQ ID NO: 938436 - DNA, 634 bp, Homo sapiens
cacccagctaatttttgtatttttaatggagatggggtttcaccatgttggtcaggctggtcttgaactcctgggctcaagtagtctgcccacttcagtctcccaaagtgctgggattacaggcatgagccaccatgcccggcgatacttatttttagtagttcacaatgaaataattaattatatttagtgccaatacaatttcaaataatgatgctggaatgacacccgataccacagtagrcaatgattttgatctctattagtttactagttatagtgggttaaatagtgacttcccaccaaaaatgcccacatcctaattcctgtaacctgtgaatgtgaccttatttggaaaaagggtctttgcagatgtaactacgttaagaatctcgagatgagaccatcctgaattatctggttggtccctaaatccaaagacaaatgtcctttacaacaaaaagaagagaagagggcacagacacagaggagaaggcaagtgaagatgaaggcagagactggagttacgtggccacaagccaaagaattcctgaagccaccagaggcaaggaaggattttctcatagagccttgggagccagtacacacctgctgacaccttgattttggaatt

SEQ ID NO: 938437 - DNA, 634 bp, Homo sapiens
cacccagctaatttttgtatttttaatggagatggggtttcaccatgttggtcaggctggtcttgaactcctgggctcaagtagtctgcccacttcagtctcccaaagtgctgggattacaggcatgagccaccatgcccggcgatacttatttttagtagttcacaatgaaataattaattatatttagtgccaatacaatttcaaataatgatgctggaatgacacccgataccacagtaggcaatkattttgatctctattagtttactagttatagtgggttaaatagtgacttcccaccaaaaatgcccacatcctaattcctgtaacctgtgaatgtgaccttatttggaaaaagggtctttgcagatgtaactacgttaagaatctcgagatgagaccatcctgaattatctggttggtccctaaatccaaagacaaatgtcctttacaacaaaaagaagagaagagggcacagacacagaggagaaggcaagtgaagatgaaggcagagactggagttacgtggccacaagccaaagaattcctgaagccaccagaggcaaggaaggattttctcatagagccttgggagccagtacacacctgctgacaccttgattttggaatt

SEQ ID NO: 938438 - DNA, 646 bp, Homo sapiens
gggcaagcgccagcccatgtcatcaccctcacagagccctgggtatacttgaccattgagggtcaggaggttaactgtcttctggacactggcacagccttctcagtcttactctcctattctggacaactgtcctccagatctgtcactattcgaggggtcctaggacaggcagtcactagatacttctcccagtcactaagttgtgactggggaactttactcttttcaaatgcctttctaattatgcctgaaagccccactcctttgttaaggagagacattctagcaaaagcagaggccattatacacctgaacataggaaaaggaacacccgtttgttgtcccctgcttaaggaaggaattaatcctgaagtctaggtaacagaaggacaatatggacaagcaaagaatgcctatcctgttcaagttatactaaagaattccacctcctttacctaccaaaggcagtacacccttagacccgaggcccaacaagkactccaaaagattaaggacctaaaagcccgaggcctagtgaaaccatgcaatagcccctgcaatactccaagtttaggagtaccgaaacccaacggacagtggaggttagtgcaagatctcaggattatcaatgaggctgttgtca

SEQ ID NO: 938439 - DNA, 646 bp, Homo sapiens
gggcaagcgccagcccatgtcatcaccctcacagagccctgggtatacttgaccattgagggtcaggaggttaactgtcttctggacactggcacagccttctcagtcttactctcctattctggacaactgtcctccagatctgtcactattcgaggggtcctaggacaggcagtcactagatacttctcccagtcactaagttgtgactggggaactttactcttttcaaatgcctttctaattatgcctgaaagccccactcctttgttaaggagagacattctagcaaaagcagaggccattatacacctgaacataggaaaaggaacacccgtttgttgtcccctgcttaaggaaggaattaatcctgaagtctaggtaacagaaggacaatatggacaagcaaagaatgcctatcctgttcaagttatactaaagaattccacctcctttacctaccaaaggcagtacacccttagacccgaggcccaacaaggactccaaaakattaaggacctaaaagcccgaggcctagtgaaaccatgcaatagcccctgcaatactccaagtttaggagtaccgaaacccaacggacagtggaggttagtgcaagatctcaggattatcaatgaggctgttgtca

SEQ ID NO: 938440 - DNA, 679 bp, Homo sapiens
taaaaagatacctgaaaatgtggaagtgactttggaactgggtaacaagcagaggttggaacagtttggagggctcagaagaagaaaaatgagagaaagtttggaacttcctagagacttgtcaaatggctttgacaaaaatgctgatagtgatatgaacaataagatccaggttgaggtggtctcagatggagatgagaaacttgttgggaactggagcaaaggtgacccttgttatgtttccgcagagactggtggcctttttccctgccctagagatttgtggaactttgaacttgagagagatgatttcagggatctggcagaagaaatttctaagcagyaaagcactcaagaggtgacttgggtgctgttagagcattccattttataagggaagcagagcataaaagtttcaaaaatttgcagcctgacaatgtaataaaaaagaaaaccccattttctgagaagaaatttaaccctgcggcagaaatttgcataagtaaaaaggagctgaatgttaatccccaagacaatgaggaaaatgtttccagggcatgtccaacgtctttgtggcagcctttctcatcacaagcatggagaaataggaggaaaaaatggctttgtgggtggagcccagggtccccatgctgtgtgcagcctaaggacttggtgtcct

SEQ ID NO: 938441 - DNA, 595 bp, Homo sapiens
ggggtactgcctagtggagctgtgagaagagggccaccatcctccagaccccagaatagcagatccactgacagcttgcaccatgcacctggaaaacccacagatactcaatgccagcctatgacggcagccaggagggaggctgtaacctgcaaacccacaggggcagagctgcccaagaccatgggaacccacctcttggatcagcatgacccagatgcaagtcatggagtcaaacagatcattttggaactttaagatttgactgccctgctggatttcggacttgcatggggcctgtagcccctttgwtttggctaatttctcccatttggaatggctgtatttacccaatgcctgtacccctattgtatctaagaagtaactaacctgctgttgattttacaggctcatagggagaagggacttgtcttgtctcagataagacactggactgtggacttctgagttaatgatgaaatgagttaagactttgtggggactgttgggaaggcatgactggttttgaaatgtgaggacatgagatttcggaggggccagggcagaatgatatggtttggttgtgcccccacca

SEQ ID NO: 938442 - DNA, 639 bp, Homo sapiens
aatcatgggggcagtttcccccacgctgtttttatgatagtcagttagttctcacaagatctgatggttttataaggggcttcccccttcaccagacactcattctctcccctgctaccctgtgaagaggtgccttctactgtgattgtaagtttcctgaggcctcctcagccaygcagaactgtaagccaattaaacctccttcctttataaattacccagtctcaggtatttcttcatagcagcgtgagaacagactaatacagtaaattgctactgggtagtggggtactgctgcaaagatacctgaaaatatggaagcaactttagaactgggtaacaggcagaagatggaacagtttggagggctcagaagaagacagaaagatgtgggaaagtttggaacttcctagagacttgttgaatacctttgaccaaaatgttgatagtgatatggacaatgaagtccaggctgaggcggtctcagatggagatgaggaacttgttgggaactggagtaaaggtcactcttgctatgcaaagagactggtggcattttgccccttccccatagatctgcgggacattgaacttgagatagatgatttagggcatctggtgaaagaaatttctaagcag

SEQ ID NO: 938443 - DNA, 639 bp, Homo sapiens
aatcatgggggcagtttcccccacgctgtttttatgatagtcagttagttctcacaagatctgatggttttataaggggcttcccccttcaccagacactcattctctcccctgctaccctgtgaagaggtgccttctactgtgattgtaagtttcctgaggcctcctcagccatgcagaactgtaagccaattaaacctccttcctttataaattacccagtctcaggtatttcttcatagcagcgtgagaacagactaatacagtaaattgctactgggtagtggggtactgctgcaaagatacctgaaaatatggaagcaactttagaactgggtaacaggcagaagatggaacagtttggagggctcagaagaagacagaaagatgtgggaaagtttggaacttcctagagacttgttgaatacctttgaccaaaatgttgatagtgatatggacaatgaagtccaggcygaggcggtctcagatggagatgaggaacttgttgggaactggagtaaaggtcactcttgctatgcaaagagactggtggcattttgccccttccccatagatctgcgggacattgaacttgagatagatgatttagggcatctggtgaaagaaatttctaagcag

SEQ ID NO: 938444 - DNA, 606 bp, Homo sapiens
taaatacatcaaaattaataacttctgcacaacaaaagatatttcagtcaaaataaaaggttatctacggtatagatacttacaaagtatataactagaaaagattcatctccagagtctgtttttaaaaatgcctacaattcaagatggccgaataggaacagctccggtctacagctcccagcgtgagcgacgcagaagacggtgatttctgcatttccatctgaggtactgggttcatctcactagggagtgccagacagtgggcgcaggtcagtgggtgcgcgaaccgtgcgcgagccraagcagggcgaggcactgcctcacttgggaagcgcaaggggtcagggagttccctttccaagtcaaagaaaggggtgacggacggcacctggaaaatcgggtcactcccacccgaatactgcgcttttccaacgggcttaaaaaacggcgcaccacgagattatatcccacacctgtcttggagggtcctacgcccacggagtctcgctgattgctagcacagcagtctgagatcaaactgcaaggcggcagcgaggctgggggaggggcgcccaccattgcccaggcttgatttggtaaaca

SEQ ID NO: 938445 - DNA, 641 bp, Homo sapiens
aaatcattgcaaatttgaggaagaaccaaataggaatgagaattttaacatttaaaaacccaataaaaaatgaaaaagtcattcagataggtttaatagcaaattcaacacaggtaaagagataattaatgaactggaaggtagattagaagaaactacccagaatgaataagaaagagataaaacaatggaaaatataaaggtgagaaaaatacaatgagcagacttaacatatttctaggagtcctagaaagagaagttagaagaacagcaaagtcatctcctaaaaatatggaaaaaaggaagtacaaaaatcagagcaaaaattaatgaaacaaaaaaatacaatagacaagatttaaaaggtaacaatttttaccttttaaatgataaaattgataaacytctgctgagacagatgaagacaaaaaatgggaaaggcacagataactcatgtcagtaatgaaaaagagaacatctgtggagaaaggagaacccttgtacactgttgggagtgtatgttagtactgccatcatgaaaaactatttgaaagttactttaaaaactaaaactagattatcatatgaccaagtaactccacttctgggtgtttatccaaatattgaaatcagattgtcta

SEQ ID NO: 938446 - DNA, 654 bp, Homo sapiens
gcggctcacacctgtaatctcagcactttgggaagctgaagcggatggatcacttgaggtcaggagttcgtgaccaccctggccaacgcagtgaaaccctgcctctactaaaaatacaaaaattagccgggtatggtggtatgcatctataatcccagctacccgkgaggctgaggcacgagaatcgcttgaacctgggaggcagaggttgcagtaagccgagatcgcgccactgcactccagactgggcaacagagtgagactttgtctcaaaaataagtaaatagataaaaaaagccaggtctagaaactcaaatattgcttggtctcattcacatgtgggagctaaacaagctgatttcatagaagtagagagtatagtggtagttaccagagactagggtggctagaggggtagggtataggaagatgctggtcaaaggatacataattacagttagataggaggagtaaatttcaagatatctattgtatagcaaggtgactatagttgatggtatattgtattattgaaaaatgtaaacagtggaagttatgtgctctcattacaaaaatgacagctatgtgagttaatgtatttttaaactagctagagttgttaaccattctacaatgtatatatacttcaaaaca

SEQ ID NO: 938447 - DNA, 654 bp, Homo sapiens
gcggctcacacctgtaatctcagcactttgggaagctgaagcggatggatcacttgaggtcaggagttcgtgaccaccctggccaacgcagtgaaaccctgcctctactaaaaatacaaaaattagccgggtatggtggtatgcatctataatcccagctacccgtgaggctgaggcacgagaatcgcttgaacctgggaggcrgaggttgcagtaagccgagatcgcgccactgcactccagactgggcaacagagtgagactttgtctcaaaaataagtaaatagataaaaaaagccaggtctagaaactcaaatattgcttggtctcattcacatgtgggagctaaacaagctgatttcatagaagtagagagtatagtggtagttaccagagactagggtggctagaggggtagggtataggaagatgctggtcaaaggatacataattacagttagataggaggagtaaatttcaagatatctattgtatagcaaggtgactatagttgatggtatattgtattattgaaaaatgtaaacagtggaagttatgtgctctcattacaaaaatgacagctatgtgagttaatgtatttttaaactagctagagttgttaaccattctacaatgtatatatacttcaaaaca

SEQ ID NO: 938448 - DNA, 654 bp, Homo sapiens
gcggctcacacctgtaatctcagcactttgggaagctgaagcggatggatcacttgaggtcaggagttcgtgaccaccctggccaacgcagtgaaaccctgcctctactaaaaatacaaaaattagccgggtatggtggtatgcatctataatcccagctacccgtgaggctgaggcacgagaatcgcttgaacctgggaggcagaggttgcagtaagccgagatcgcgccactgcactccagactgggcaacagagtgagactttgtctcaaaaataagtaaatagataaaaaaagccaggtctagaaacwcaaatattgcttggtctcattcacatgtgggagctaaacaagctgatttcatagaagtagagagtatagtggtagttaccagagactagggtggctagaggggtagggtataggaagatgctggtcaaaggatacataattacagttagataggaggagtaaatttcaagatatctattgtatagcaaggtgactatagttgatggtatattgtattattgaaaaatgtaaacagtggaagttatgtgctctcattacaaaaatgacagctatgtgagttaatgtatttttaaactagctagagttgttaaccattctacaatgtatatatacttcaaaaca

SEQ ID NO: 938449 - DNA, 654 bp, Homo sapiens
gcggctcacacctgtaatctcagcactttgggaagctgaagcggatggatcacttgaggtcaggagttcgtgaccaccctggccaacgcagtgaaaccctgcctctactaaaaatacaaaaattagccgggtatggtggtatgcatctataatcccagctacccgtgaggctgaggcacgagaatcgcttgaacctgggaggcagaggttgcagtaagccgagatcgcgccactgcactccagactgggcaacagagtgagactttgtctcaaaaataagtaaatagataaaaaaagccaggtctagaaactcaaatattgcttggtctcattcacatgtgggagctaaacaagctgatttcatagaagtagagagtatartggtagttaccagagactagggtggctagaggggtagggtataggaagatgctggtcaaaggatacataattacagttagataggaggagtaaatttcaagatatctattgtatagcaaggtgactatagttgatggtatattgtattattgaaaaatgtaaacagtggaagttatgtgctctcattacaaaaatgacagctatgtgagttaatgtatttttaaactagctagagttgttaaccattctacaatgtatatatacttcaaaaca

SEQ ID NO: 938450 - DNA, 745 bp, Homo sapiens
ttggacagtgagtgcagcccagggagggtgagctgaagcagggcggggtgacacctcacccagggaagcgcaaggggtcaggggatttccctttcctagccaagggaagccatgacagactgtacctggaaaatcgggacattgccacccaaatactgcgcttttccaacagtcttaacaaacggcacaccaggagattatatcccgctccttgcttagcgagtcccacacccatggagccttattcactgctagcgcagcagtccaagatccaacttcaaggaggcagcctgactgggggaggggcgtctgccattgctgaggctggagtaggtaaacaaaatggccgggaagctcgaactgggtagagcccactgcagctcaaggaggcctgcctgcctccgtagactccacctctgggggcagggcatagctgaataaaaggcagcagaaacttctgcagtcttaaacgttcctgactgatagctctgaagagagcagtggttttcccagaatggtgtctgagctctgagaatagacagactgcctcctcaagtgggtctctgactcctgtgtagcctaagtgggagatacctcccrgtaggtgccgactgacaactcatacagccaggtgcccctctgagacgaagcttccagaggaaggatcaggcagcaatgtttgctgttctgcagcctctgctggtgataccaaggcaaacagcatctggagtggacctccagcaaa

SEQ ID NO: 938451 - DNA, 806 bp, Homo sapiens
tagccagacagattagccaaatcagccctggcgattagtggggtgacagatgtcactgccagatcaccctcacgtcctcctcattctcttctgttttgtttttggttgtttttctttcttctgtttgatctagtctgttgttgaagctctcaattgtatttttatttcattcattgaatttttcagttctaagatttgtttgtttttttgtttaatgatttctatctctgctgaatttctcgcttagatcatgaatcatcttcctgctttccttgtagtgtctgtgttctcttctatcttcctgagtttccttaagattattattttgatttctttttttgagatagagtctcgctctattgcccaggctggagtacagtggcatgatcttggctcactgtaacctctgccatctkggttcaagtgattctcctgcctcagcctcccgagtagctgggattacaggagcctgccactatgcccagctaatttttgtatttttagtacagacggggtttcaccatcttggccaggcattattttgaatttttaaaaggtatttcatatatttccttttctttggggtctgttttggaaaattattgtgttcctttggtaatgtcgtgttttgctttatcatgtttcttttgtccctgtgttgatgtacgtgcagtcacttcttccaattttatggagtagctttcacagggaaagacctttttctgtagatgtagctatagtgttggttggatatgatactctggctttggttctggttgagtgcagtagtgtagtctccatatgat

SEQ ID NO: 938452 - DNA, 806 bp, Homo sapiens
tagccagacagattagccaaatcagccctggcgattagtggggtgacagatgtcactgccagatcaccctcacgtcctcctcattctcttctgttttgtttttggttgtttttctttcttctgtttgatctagtctgttgttgaagctctcaattgtatttttatttcattcattgaatttttcagttctaagatttgtttgtttttttgtttaatgatttctatctctgctgaatttctcgcttagatcatgaatcatcttcctgctttccttgtagtgtctgtgttctcttctatcttcctgagtttccttaagattattattttgatttctttttttgagatagagtctcgctctattgcccaggctggagtacagtggcatgatcttggctcactgtaacctctgccatcttggttcaagtgattstcctgcctcagcctcccgagtagctgggattacaggagcctgccactatgcccagctaatttttgtatttttagtacagacggggtttcaccatcttggccaggcattattttgaatttttaaaaggtatttcatatatttccttttctttggggtctgttttggaaaattattgtgttcctttggtaatgtcgtgttttgctttatcatgtttcttttgtccctgtgttgatgtacgtgcagtcacttcttccaattttatggagtagctttcacagggaaagacctttttctgtagatgtagctatagtgttggttggatatgatactctggctttggttctggttgagtgcagtagtgtagtctccatatgat

SEQ ID NO: 938453 - DNA, 597 bp, Homo sapiens
gttctttgtatttgctgacaagaataatggtaactaaacctgctttttttcttttaataaggtttatgaaatcacagcctaacccatgcaccaggtgggtacaggaagatctcaacttgctgggtaagtttcatgctgagaacaaagtgctgggaatgtttatgttcaaacttgatcttcactcacaacaaaggctgccaacagataccactatccctatgtctacaggaagaaggcttcaaaataatagttgtaaaccacactaaagatcatgtacatccacgcagactcctaaraaaggtggtttgaaatgagtgtcagtttcacccaaaaatgggtggaacagacacacaaaaaggtatatgtaactgtgcccatcccagctaattacagcctcttgtactaattttcaagaataaatatacaactaatctctcgtaaatgtaaactgctgcctgtacaccgtctcactgctgggcaccggagttttatcaatattgttaaaacaaaaagtgcataaagatgaagggaaataatacaggtctttcttctaaaacaatgggttacacagcagttttaatttggtgagtttttaaa

SEQ ID NO: 938454 - DNA, 737 bp, Homo sapiens
cactgacagcttgcactgtgtgcctggaaaagctgcaggcagtcaatgccagcccttgagagcaaccatgggatctgcgccctgcagaaactcactctttgcatcagtgtggcctgtatgtgagacatggagtcaaagattattttggagctttaagatgtaatgagtgccctgctaggtttcgaacttgcatggagcctgtagcccctttgtttttgctgatttctccctcttggaaaggctatgtttacccaatgcctgtaccctcattgtatcgtggaagtaactaactcgttttttattttacaggctcggaggtggaagggtcttgccttgtctcagatgagactttcaactctaggcttttcagttaatgctgaaattagttaagactttgggggactgttgagaatggatgcttatattttgcaatgtgagaaaaacatgagactggggggacaggggtaaaatatggtttagatttgtgtcctcccccaaatctcatgtcgacttgtaatccccagtcttggaggagaggcattgtgggagstgatttgatcatgggggcagatttccccctttctgttctcataatagtgatgaagttttcaccatatctggtagtttaaagctgtgtagtaccttctattttgctctctcctcctcctgctccatccatgtaggatattcctgcttccccctcaacttccaacacaattgtgcatttcctgaggcct

SEQ ID NO: 938455 - DNA, 625 bp, Homo sapiens
gaaatcttcccctctccccccacatcctttgcttagagtgctttttgctccagttgaaattttgttccaaatggtaaatattttatttccatgggcacgcctcccatacagatgactttaacacaatatggaaaatacctttcgctcctcagttcagcccaggagtygagatgagttctctgtgtggacagagggcacgcttttggcaaaacatcccgccttcctctggatcatgataagcccagggaatgcgcttgcccgctcctgccctccagggcctacttttgggcttgtgagatgccatgattcgggcagggaagcagcatccacgcgtgggttttattctagtcctgtctgcccggcgttggcatgcacctctgaaactcctgaaccgagtggagcacagtggacaggagtctggacaagctggctgggctgctttgggaaagtcacctcccctctctgatcctcggtttttccttccgtaaactggaggtgaacgcaacagagcccattccacagattcttgcaaggacagaataaaattgtgcttatgaaatgcttagcccactgctaagtctgttacaatggcagccactataaatatggaatcttagaaatgtag

SEQ ID NO: 938456 - DNA, 640 bp, Homo sapiens
agttttaaaatgcattaaattctttaaaaaattaaaatagaaatttaaaaaacaagctacaaaaggcaaaaaaaagtatggaagacaaaaacaggaacaaagaacaagagcaaccaatagaaaacaataacaaatatggcagacatcaattcaactatatcaataatcacttcaaatgtcaatggtctacctacaccacttaaaacataaataaagggctgggtgtggtgtctcaggcctttaatcccagcatattgggagaccaagccaagcagatctcttaagcccaggaattcaagatcatcctgagtaacatggcaaaacctcatctctacaaaaaaatacaaaaactagcsaagcatgctggtacacacctgtagtcccaacttctctggaggctgaggtgggaggatcacttcagcctgggaggtcaaggcagcagtaagccaagttcgtagcactgcactccagcctgggtgacagagccagaccctgcctcaaaaaaaaaaagaaaaagaaaaagatagatattcaaagtgcatcaaaacatatgacccaggaccgttccaagatggctgaataggaacagctctagtctgcagctcccagtgtgatcaacacagaagatgggtgatttctg

SEQ ID NO: 938457 - DNA, 567 bp, Homo sapiens
atatgtgagggctgattcttatcattttattaattgatttctagttgttttgtttatcctttgttcctttctcttttattttttatcattgtggtttggttgttttctttaggggtaacatttgagtcctttgtccttatttgtatgtttgctgtgtcagtaggttttatacttttgtgtgttttcacaatggtagatattgtcctttcacttctaggtgtaggactcttgaacatatcttgtagggttggtccagtggtgatgaattctgtcaccttttgctgtctggraaagactatttctttttcatttttgtagaatactttgctgaggatagtgtccttgactggtgatttttttctttcaacactgaatgtataatcacattctctctcatttctctctgttgagaaatctgctgttaggctgatgagagtttccttgtaagtgactagatgcttttctcttgctgtttttagtattctcttttgtctttgacttttatattttgaccataatatgccatggagaagacctttttgtattgtatctatttgggtatctctg

SEQ ID NO: 938458 - DNA, 589 bp, Homo sapiens
aggcaagtccttgggctctggtggtggcagtggcagtccagatgtgcctgttttggggccccagcatagtgtatgctggtactagtattagtgtgtctaggcacgttgattctttggcctcctcgtagtttggatagtgctggcagtggtagtggtatgctgggtaggtggatgggttcttggattcttsggcagcaagtgtggcatgggtgatggtagtagtagtgaacaggacaaccttctggctcccaagcagtaagtgcttagtgttggaggtgactatgatgggctgggtgggccagtccccagaacttccggttgtgactacaggtgggtaccagttgtggaggaaacagcaggttgtatgtgtctgaccttaggcctctgtgatgagtgcttaggtagcaaaggtggtagatggatcagggtgatccccaggtccccagatggtgtgcttggggacttgggcacagagctgggtctgctggacctgaccttaggccccccagttgtacgtgctggttcttgtggtaagcaggggtggggtgatccccaggcccctggcagaatgctgctgttgattttcttt

SEQ ID NO: 938459 - DNA, 589 bp, Homo sapiens
aggcaagtccttgggctctggtggtggcagtggcagtccagatgtgcctgttttggggccccagcatagtgtatgctggtactagtattagtgtgtctaggcacgttgattctttggcctcctcgtagtttggatagtgctggcagtggtagtggtatgctgggtaggtggatgggttcttggattcttcggcagcaagtgtggcatgggtgatggtagtagtagtgaacaggacaaccttctggctcccaagcagtaagtgcttagtgttggaggtgactatgatgggctgggtgggccagtccccagaacttccggttgtgastacaggtgggtaccagttgtggaggaaacagcaggttgtatgtgtctgaccttaggcctctgtgatgagtgcttaggtagcaaaggtggtagatggatcagggtgatccccaggtccccagatggtgtgcttggggacttgggcacagagctgggtctgctggacctgaccttaggccccccagttgtacgtgctggttcttgtggtaagcaggggtggggtgatccccaggcccctggcagaatgctgctgttgattttcttt

SEQ ID NO: 938460 - DNA, 678 bp, Homo sapiens
aaggccaggcacggtggctcatgcctgtaatctcagcactttgggaggctgaggagggcagatcatgaggtcaggagttcgagaccagcctgaccaacacggtgaaaccccgtatctactaaaaatacaaatatcagccaggcatggtggcacgtgcctgtaatcccagataytcagaagtctgaggcagcagaattgcttgaacccgggaggcagaggtcacagtgagccgagatcatgccattgcactccagcctgggtgacagagtgagactccaccaaaaaaaaaaaaaaaaaagaaaacaaaaaacaacagtggattgctattcatctggtattgtctggatttaaccaggctatgtttaaagtattgaaatacttctgtaccatttcgtaaatagccagtgcccccaagtacccccactctgaatctttcgccatctcagctacctcaatccttctctcaagaccctcgaatctaaaggtttaatgctagcaggaactacaggtgcccattatgattggtcagcacttgtattataccagttgctaatattatgactatcacccctacttctaagctaaagtcaatggcaacaactagtcctcattttagacaatgtcactgctcctaatttatagagaaagggatgcagtaagattgggattagaccaagg

SEQ ID NO: 938461 - DNA, 736 bp, Homo sapiens
gctgccaggccgttggccccacccagagtggagcttctcacccactccctccccttcctttctgccgtcagtcccccaatagtgtcacaatagtcccctaacagtgtcccactggccatctttgatgaccaggtgtgtagcaggttcgagcccggcttggaagttgtttctactatgagccaggcactgcctgagcacctgggtcccaccagtgaacaaatagacgacagtccccgccccgggggactagccttttcctagcaggacacagaaccccaaacactcacagaataaagaggtgaggctatgctgcgtccgaaagggatatgggcttaaaaaaaaaaaaagaaggctgggcgtggtggctcacacctgtgatcccagcactttgggaggccaaagcgagcagattgcctgggctcaggagtttgagaccagcctgggcaacatgacgaaaccccatctctactaaaaatacaaaaaattagccaggcgtggtgrtgcacacctgtagtctcagctactcgggaggctgaggcaggagaatcgcttgaacctgggaggcggaggttacagtgagctgagatcacgccacttaattccagcctgggtgaaagagcgagaccctgtctcaaaaaaacaaacaagaaaacagcagagagcagaagagggaagagggcaaggggtggggggtgagatttgacttggggctccctgctggttcatgcagtggcct

SEQ ID NO: 938462 - DNA, 502 bp, Homo sapiens
cactattctgactcctagcacctaagactagttacaaatcataatgtatgtgctcttttgtgtctgtctttttttgctgtgtgtgtgtgtgtgtgtgtgtgtgagcgcgcgtgcatgtttgtaattcatccatttttgtagcattttactgtagattattcattctcattgctagatggtattttattataggaatacatcacagattgtttattccattccayaatgttttatccattgcaggtgtttgggttgtttccaggtctggctgttatgattaatgctccatggacatttttgaacatgtcgttggtgagcaagtgtgcatatatctgctagttatgtacctaggagtaaaatggttgggtcacaggataggcacgtgctcagttttaatcaatactgccagtttaccagggtggttgcacagatttacagtctcatcagcacaggatgaagcttctatttgctcttatttctaaccaacacttggcatagactc

SEQ ID NO: 938463 - DNA, 571 bp, Homo sapiens
ctgagtgcagcaacaaatagcttaggctgccttggcagcccacgaaggtatcacggtttcctattgcagcatctcagtgatgcttttgttatgctgatctctgcaaagccctctgtgccccagcccaggatggtgacagccatgctgtggagaaaagggcagtgacyaggaccacaggctcagagcttgtaccctggaccacctgggaatgggagcccttcacatgttctctgcctctgtgttcaggttgggggtcctggccaaggaaaggagatgacccccatgctgggtcaaaagaacacactcccgggaacagactctctcttctttctgggtaatttctgcctctgcagtgaatggtgtaaccagacacatcctctctattggtatgacacaaagacaggcgttcctgctcatgggctgaatcctcaggtgaggggaggtgtagtacattcctgtgctctgctgactaaggcagggacacatgtcaccccatcagaatgagtgccagacaaatggctacaataaaatcatttccaataatcaaaggagtcaccttcattcatctaca

SEQ ID NO: 938464 - DNA, 589 bp, Homo sapiens
agatagggctcgggtattatgggaactgactagctcaaataagagtcttggaatattttggagtgagggaggcttccatgacttctgatttatgaggtcctctaagttgtgatcttcaaggaaggtaagagtttttgaaaatataaaagctgtgtgcaaagaaagtttatatatatatatatayacacacacacacacacacacacacacacatacccccccacacagaggagcaagtagtaatagcaggttaattgacatgaagtatgggtggggctaatggaagaggagtaaacaaccaaaaggcagccactattcatatgcagagtaaactgcgttctgactcaggcaggagcatgtatttctgagaataagtggtacatacatatgacttcccatatggagaaggagccagaattatgagactggatacataatgtataagtaataattcatctcatttgtatagacttttaatgtttgaaattgctttcaaatgctttttttgtttttccttgtacaaaacatgtgaacaggtattattttattcttatttcacggatgaggacattgagcctcagagtctcat

SEQ ID NO: 938465 - DNA, 566 bp, Homo sapiens
catccctcaaagcctggtgacttgagctaatttataaggaaaccaaacggcattacactctagacctggaggcttgaagagttcagagaaactaggacagagaaggccagccccgctgggagaggggcgcgtctctgtggcaacccttacacacacccacaccacaggaggacgtggtgggtgcattggatgagccggcccccgtgtggcagcacccagacgtggcctggctgcctagacactcacctttgtactgtggggtgaaccgcttcatggccagyggcagggattcatagaacctctgctcccgggagacgaggggcttgcacaccgtatgctcgtcatacttcatcacgctcatgtgccccccgacctggtgcaggaagggctccagctgcacgcctgccctcatgtccccggcatctgcgctgttttgcacaaccatggcggcagatggtggtggtggggggtccctgcacagtctgctagaggaaggtttgaagtagaaagggcagctcccaacagcacacggggctgtcagcggtcctcaactttctccttcttgg

SEQ ID NO: 938466 - DNA, 769 bp, Homo sapiens
tcattgcccctcagaggacaaggaacagggaagggcatggaggggctttctaggttccagcctccctggagcacaaggtcacatgcggagtgaggagctgtgtgggagcatgaggggtgggacgactccgggcagttctggttcccagaggtctggagtcccccttccttttgtgacccttggccacactccagggccacagttctgcagtcatgctcaggaacttcagcctggctgctacctcaaaccccttccatttctcaatttaacacggagaccaggcacacagctccccagggagaagtaccacattcaggaggatttggattcctgcgggtgagaaactcggcccagctttcatcaaaagcttgcctggaatcacactatctcagtgtagggcaagacctcagtgcatgcatccagctctatccatccattcagggctagcgtccctgccgagtgaccatgtaactctgcttacatacctccagtgacctaagcctcactacctcttagggcagcccaaagccttcctcctcctgtagagctggggtttgttttcagaggtgttcactcacraagcccagccctgcccccttaggcgtcctcagaaccagcctaaccctccctcctataatgtttagaacaagtgaccatcttcctgctgaaccttctacccaaccagagccaagagagagggccagtaagaacccccttggagaactgggaggtgccctccagaagggagagaggtatctaacgtaactaa

SEQ ID NO: 938467 - DNA, 695 bp, Homo sapiens
ccccaccatggtgctccatcccagggattggttgggaagtgggtccctccttcgtctcatatgtgtcctctagaagggacctctagaaaatgtggctcatgcccaggacctgatacttcccctgcccctgggtggagcttctctgaggcctgccaccctgcctctagtggattggtttacgtgagccagcacattcaccttgtgctgaagtttgtctgagttgtgtttctgggggatcttgtccattcttgtgttaattatctattgggagtaacagtctacccccaaacttagtagcttcatggtataacatttcataaaaacttcacacacacacacacacacacacacacacrcacgcacacacacacaaaattgttgaaacccagatacggcctgcacctaagttaataggattgtatcaaggtcagtttccttgttttgatagtatgttgtggttatgtgggatattatcattgggggaagctgggtgaagggtacacacgaactctctgtactatttttgcatcatcttgtgagtcttaaactatttcaagttaaaaagtaataataggaatttggtggcataagacaaccattatttacttatgcttccaccctttgggcagtgtgtggtgggaacagcttatcttttcacatggtgcatctgggctggtacagagtagctgcactca

SEQ ID NO: 938468 - DNA, 772 bp, Homo sapiens
aaggataagttgctgcatttggcccctcccacaactaagaaagaggcacaatgcctagtgggcctatttggattttggaggcaacatattcctcgtttgggtgtgttactctggcacatttagcaagtgacctgaaaggccgccagttttgagtgaggtccagaataggagaaggttctgcaacaggtccaggctgctatgcaaactcctctgccacttggtccatacgagccagcagatccaatggtgcttgagatgtcagtggcagatagggatgctgtttggagcctttggcaggacctcataggtaaatcacagtggaggcctctaggattttggagcaaggccctgccatcttctgcarataactaatctccttttgagagacaactcttggcctgttactgcgctttggtggaaactgaatgtttgaccatgggtcatcatgttaccctgtgaactgaactgcttatcatgaactgggtgctttctaacccatcaagccataaaatgggttatgtatagcaccattccatcatcaaatggaagtggtatatatgtgattgggcttgagcaggtcctgaaggcacaagtaagttacatgaagaagtttctcaaatggccatggtctccactcctgccaccctgccttctctcccctcgcctgcactgatggcctcatggggagttccctatgatcagttgacagaggaagaaaagactagggcttgcttcacagatggttctgcacgatatgcaggcaccaccctaa

SEQ ID NO: 938469 - DNA, 622 bp, Homo sapiens
gaatggcctttcgaagtccacaattacaatgctaactatgtgacaatactttgcagggctggggaaaagttctccagaaggccatgtatgctctgaatcagcatccaatatatggtactgtttctcttatagacaggattcactaaaattcaggcaccttctacctcagtaaaatttctagggatccagtggtgtggagtctgttgagatattccttctaaggtgaaggataagttgctgcatttggcccctcctataaccaagaaaaaggcacaatgcctaggggggctatttggattttggaggaaacacattcctcatttgggtttgttactctggcacatttatcaactgacccaaaaggctgccagttttgagtggggtccagaatcaagggatggaagtggaagtggcamcactcaccatctcccctagtgatccactagcaaatttttttgcttcccattcctgcgacattacattctgctggcctagaggtcttagttccagagggaggaacattgcccccaggagacacaacaattccattagactggaagttaagactttgggctcctcctacctttaagtcaacaggcttagaagggagtaacagtgttgg

SEQ ID NO: 938470 - DNA, 673 bp, Homo sapiens
gtgaatgtgtcttttttacagaatgatttattttcctttaggtatatacccaggaatgcagttgtgggttgaatggtagttttgtttttttaagttctttgaaaaatctccacactgctttctacagaggccaaactaatttacattaccaccaacagtgtataagcattctcttttctccatagcttctccagcacctgctatttttttttttttttactttttactaatagcaattctgactggtgtgagatgatattgcattgtggttttgacttgcatttttctgatgattagtgataaagagcatttttcktatgtttatcggacactcacatgtcttcttttgagaaatgtctgttcatgtttttttgccatttttttccttccaacttttaggtttagggggtacgtgggcaggtttgtgacatgggtaaattgtgtgttgctggggtttgatgtaaaaatgattttgacacccaggtagtgagcatagtacccagtaggtaattttttagtcttcaccctcctcccaccctccacctccaagaaagctgtggagtctattgttctcttcttagtgcccatgtgtactcagtgtttagctccctcttataagtgagaacatgtagtatttggttttctgtttctacattaattcacttagaataat

SEQ ID NO: 938471 - DNA, 770 bp, Homo sapiens
taatggtattggcatagtgataaacatagagatcattcaagcagaatggacagtccgtaagtaaaacatcatatcaattgtcaattgatttttcacaagtgttcaagatagtctaatggcaaaaagtgctattttcaaaaaatggcattgggataactagctactcacttgcaaaagaatgatattggacctacctcacaccatacatgaaaataaactcacaatggatcatagatctaattctaagagctaaacttatcaaacttttagaagaaaacataggagtaaatcttcattaatttgattaggctatgctttcttacatagaaacctaacatgtaagtgacgaaacaaacatcacttttatatcatcaaaattaaaacactcatgctttaatggtcatcataagaaagtgaaaaataaccaagagactgtaagataatgttgacaaattttatatttgacaagtaacttgtactgaggatatataaaatctcttataacccaataacaaagagataaataacccaattgaaacatggggaaaggatttgcatagacccctaaccaaagaagtcraacaaatggcaaataagcacatgaaaagatgtgcaacaccatatgttagttatttgggaaatgtaaatcgacaccacaatgagataccacttcacacacaatagaatggttataataaaaaagacagattaaagcaagcattagtaaggaagtggagaaattagaacccttatgtatttatttttggtgg

SEQ ID NO: 938472 - DNA, 646 bp, Homo sapiens
tctgactagaatttaccaggctggaattttccaatcctagtaagcctgagggcactgcaggagaccagggtatatttcagtccttatctcaaccgcataagacagacaatcccagagcggccatctgtagacctacccccaagaatgcatttcttccccagggcctcaattattaatatttcttgctgggaaaagaattcagtgatatttcttctactcacacatccgtctataggctttccgtgagaagaaaaacatggctctattctacccgaccccgcaggcagtcagaccttatggttatctttccttgttccctgaaaatcgctgttattctgttctttttcagggtgaactgatttcatattgttcaaacacacattttacaaacaatttgtacagttaacgcaatcatcacagggtcctgaggtgacatacatcctcagcttacgaagatgacgggattaagagattaaagtaagacaggtgtaagraattatgaaagtattaattttgggaactaataaatttccatgaaatattcacagtttatgttcagagattgcagtaaagacaggtgtaagaaattataaaagtattaattttgggaactgataaatgtccatgaaatcttcacaatttaagt

SEQ ID NO: 938473 - DNA, 641 bp, Homo sapiens
taaaagttagagggaaagatgcaaaccttcttggaaggccgcgaggttttgcaaaagcttcgaaagaggatttggctgaaggcagtcaaattctcttatccggagcctgagagcaaacggcagataacaatggaatgtaaagaaacttatctagataaattggtttcctcctgtccccaaaacccaacctctgatcattcacaagcaggactgctttctayttggggggtcgacaatgtttgttacccacaaattgtgtttgctccaagcttttgtcattaattctgtactaaataaatgcgagcatcactggcttagggggactgctaactctcttcggcccctagtgccggcagtccctagcctgctgtttcactggatacctgtgtctgagtactcctttcctttcatctgtcactcggccatagtctgagggacagacttggcaggtggtgccccatgagaggaacgctgcaatggatcacaatggaaccctcgaaaatgaaggtgaagagactgcgcagtcagtaagtcactggtgcccgcttgggatttccaagttcgagggaattgttcaggctagggtttcatcatgggacaacagttatcagctcaacagcaacagtatataaaagtaatga

SEQ ID NO: 938474 - DNA, 641 bp, Homo sapiens
taaaagttagagggaaagatgcaaaccttcttggaaggccgcgaggttttgcaaaagcttcgaaagaggatttggctgaaggcagtcaaattctcttatccggagcctgagagcaaacggcagataacaatggaatgtaaagaaacttatctagataaattggtttcctcctgtccccaaaacccaacctctgatcattcacaagcaggactgctttctacttggggggtcgacaatgtttgttacccacaaattgtgtttgctccaagcttttgtcattaawtctgtactaaataaatgcgagcatcactggcttagggggactgctaactctcttcggcccctagtgccggcagtccctagcctgctgtttcactggatacctgtgtctgagtactcctttcctttcatctgtcactcggccatagtctgagggacagacttggcaggtggtgccccatgagaggaacgctgcaatggatcacaatggaaccctcgaaaatgaaggtgaagagactgcgcagtcagtaagtcactggtgcccgcttgggatttccaagttcgagggaattgttcaggctagggtttcatcatgggacaacagttatcagctcaacagcaacagtatataaaagtaatga

SEQ ID NO: 938475 - DNA, 775 bp, Homo sapiens
ataaggcgagttatcctggattattagagtagatccaatgaaatcacaaagaccttttaatgtagaagagggaggcagaagagcctgagaagatgtggcaatggaagcaatgttggagtgaggcaaagggagaaagaytcaaccagcctttgctggctttgaaaatggaggaagggactgaaagtcaaggtctgtgggcagactctagaagctgaaaaaggcaaggaaatagattctctgttggagccaccagaagaaatgcagccccgccaacacctatgttttagtccattgagacctgttttggctttctgaccaccagaactgtaaaaatgcattcctattgttttaagccactaagtttgtggcatttgttaacgacaataggaaactaataaaatctcaattgccgtggatgtaccaaaggtcaatcatcttgaaggaaactcaaagaaggagcaaaaaagatttaagggacaagcctaaggttgcaaatttccctcttcgttgcagtaggagctcttatcttggattccatggagataagcagagcacactctatggtggagaataagccagcccttgccttacagagtcagggccagaatgaggcatagaagtaacctggaaagagaccccaagccatggtcataggtgtgtgaaggtttctttctttatcacagaaactttaaaagagtttcattaatcatgactaattagtctttgctgtgcagtgagaaattaagcacgctcactaaagagagcacagtgtttt

SEQ ID NO: 938476 - DNA, 643 bp, Homo sapiens
ttgtgtaaaaaaagaggtaactttgtagattagggattaaaaatctgagcacaattcagattgtttcttatagaacaaattgaggctgatggttgcaaaggggaggcgtagagaggagaaatgtggaaggctcggcaatgatgagagtttggaatagcccttgtgaggacaggagaggaaggggctcaaggaagacaagacaaagcactagggtggggcccagtggcttgcggaaartaccaagcgccctgcacggtggattcttccagcagactgagcacagggggttcagaggagctggtaatgcagtcatactgtggctggggtttacaaaaggttaagtgactcactaaaggtcacacagggacatttacacaaacatcctggccccaagtccagtgctctaatctgtaacagggtctatccttttttttttttttttgagacagggtcttggtcagtcacacaggctggagtgcaatgatgtgaacaccgcacactgcagcctcgcccttccaggctctagtgatcctcctgcctcggcctcccagtgttgggattataggcatgagccaccatactcagccaagtctgtccttaatcagggttcttttgggtctcattttcttaagctgcaaaagcc

SEQ ID NO: 938477 - DNA, 494 bp, Homo sapiens
tactgccaacacctctaggctgctgtaactgtagtttcggctcctggatctgcttccaattagttatgttccctgtcactttgggtaagtcatcccagctccatggcttgcttctggaactcaattatggtccagaagcccaagttctaaagtgctgattctgatgagtgcccatttaccaggcactctgatcccatcatagcatctactacagcctgggaggtctattcatgtgtgcattcatgttaagcactatcaccaatcaaatcacttaaattrcataggtaataatccaacagcacatccaaacaaggctgaaaattgtaaaagaaaattacactgtgtgtgtgtgtgtgtgtgtgtgtgtgtgtgtgtgtgtttaagagacaagattgctctctgtcacccaggctggagtgcaacagtgccatcatagctcactgtggcctccaattcctggcatcaagcaatcttcctgccttggcctcccaagt

SEQ ID NO: 938478 - DNA, 494 bp, Homo sapiens
tactgccaacacctctaggctgctgtaactgtagtttcggctcctggatctgcttccaattagttatgttccctgtcactttgggtaagtcatcccagctccatggcttgcttctggaactcaattatggtccagaagcccaagttctaaagtgctgattctgatgagtgcccatttaccaggcactctgatcccatcatagcatctactacagcctgggaggtctattcatgtgtgcattcatgttaagcactatcaccaatcaaatcacttaaattacataggtaataatccaacagcacatccaaacaaggctgaaaattgtaaaagaaaattacactstgtgtgtgtgtgtgtgtgtgtgtgtgtgtgtgtgtgtttaagagacaagattgctctctgtcacccaggctggagtgcaacagtgccatcatagctcactgtggcctccaattcctggcatcaagcaatcttcctgccttggcctcccaagt

SEQ ID NO: 938479 - DNA, 670 bp, Homo sapiens
ggaagtcattatcctaagcaaattaatgcaggaacagaaaaccaaataccatatgttctcacttataagtgaaagctaaacaatagatgctcatggatatcaaggtggcaataatggacactggaattctagagggkgcacagcagaaggggacacaggttgaaaaactattgggtcctatgctcagtacctgggtgatgggatcaatcataccccacacctcggtatcacacaatatacccaggtaataaacctacacatgtacttccaaatctaaaatcaaagtggaaattataccaaaaaactaagctcaaaaaaaaaaaaatttctttgcccattaaaaaaacaaataaaaatacaagaatcatcctaggccgggcgcggtggctcttgcctgtaatcccagaactttgggaggccgaggtgggcggatcacgaggtcaggacatctagactatcctggctaacacggtgaaaccccgtctctactaaaaatacaaaaaaattagccgggcgtggtggcgggcgcctgtagtcccagctactcgggaggctgaggcaggagaatgacgtgaacccgggaggcggagcttgcagtgagccgagatcacgccactgcactccagcctgggcgacagggcgagactccgtctcaaacaaacaaaaaaga

SEQ ID NO: 938480 - DNA, 670 bp, Homo sapiens
ggaagtcattatcctaagcaaattaatgcaggaacagaaaaccaaataccatatgttctcacttataagtgaaagctaaacaatagatgctcatggatatcaaggtggcaataatggacactggaattctagagggggcacagcagaaggggacacaggttgaaaaactattgggtcctatgctcagtacctgggtgatgggatcaatcataccccacacctcggtatcacacaatatacccaggtaataaacctrcacatgtacttccaaatctaaaatcaaagtggaaattataccaaaaaactaagctcaaaaaaaaaaaaatttctttgcccattaaaaaaacaaataaaaatacaagaatcatcctaggccgggcgcggtggctcttgcctgtaatcccagaactttgggaggccgaggtgggcggatcacgaggtcaggacatctagactatcctggctaacacggtgaaaccccgtctctactaaaaatacaaaaaaattagccgggcgtggtggcgggcgcctgtagtcccagctactcgggaggctgaggcaggagaatgacgtgaacccgggaggcggagcttgcagtgagccgagatcacgccactgcactccagcctgggcgacagggcgagactccgtctcaaacaaacaaaaaaga

SEQ ID NO: 938481 - DNA, 670 bp, Homo sapiens
ggaagtcattatcctaagcaaattaatgcaggaacagaaaaccaaataccatatgttctcacttataagtgaaagctaaacaatagatgctcatggatatcaaggtggcaataatggacactggaattctagagggggcacagcagaaggggacacaggttgaaaaactattgggtcctatgctcagtacctgggtgatgggatcaatcataccccacacctcggtatcacacaatatacccaggtaataaacctacacatgtacttccaaatctaaaatcaaagtggaaattataccaaaaaactaagctcaaaaaaaaaaaaatttctttgcccattaaaaaaacaaataaaaatacaagaatcatcctaggccgggcgcggtggctcttgcctgtaatcccagaactttgggaggccgaggygggcggatcacgaggtcaggacatctagactatcctggctaacacggtgaaaccccgtctctactaaaaatacaaaaaaattagccgggcgtggtggcgggcgcctgtagtcccagctactcgggaggctgaggcaggagaatgacgtgaacccgggaggcggagcttgcagtgagccgagatcacgccactgcactccagcctgggcgacagggcgagactccgtctcaaacaaacaaaaaaga

SEQ ID NO: 938482 - DNA, 670 bp, Homo sapiens
ggaagtcattatcctaagcaaattaatgcaggaacagaaaaccaaataccatatgttctcacttataagtgaaagctaaacaatagatgctcatggatatcaaggtggcaataatggacactggaattctagagggggcacagcagaaggggacacaggttgaaaaactattgggtcctatgctcagtacctgggtgatgggatcaatcataccccacacctcggtatcacacaatatacccaggtaataaacctacacatgtacttccaaatctaaaatcaaagtggaaattataccaaaaaactaagctcaaaaaaaaaaaaatttctttgcccattaaaaaaacaaataaaaatacaagaatcatcctaggccgggcgcggtggctcttgcctgtaatcccagaactttgggaggccgaggtrggcggatcacgaggtcaggacatctagactatcctggctaacacggtgaaaccccgtctctactaaaaatacaaaaaaattagccgggcgtggtggcgggcgcctgtagtcccagctactcgggaggctgaggcaggagaatgacgtgaacccgggaggcggagcttgcagtgagccgagatcacgccactgcactccagcctgggcgacagggcgagactccgtctcaaacaaacaaaaaaga

SEQ ID NO: 938483 - DNA, 627 bp, Homo sapiens
ggttaattttttattttttagtagagatggggtttcatcatgttgcccaggctggtctgaaatgatgtgccccactgggccccgcaaagtgctgggattacaggcgaaagccatggcgcctggctaaggaatttcttcatctgataaatggtagctcacacacacacacacacacacacacacacgctcgtaaagcaattggagagacactgaaagcttttcctttgagaatagaagtgtacactgatggctgctgttgccacttctaattcaacactgtactgaaggttctagccagtgctagggrgaaaaatgactgaaaaggaaaaaatacaatgtattattttcacatgatataactgtgtactataaaatccaaaagaatctatagataatttagtagaactaataagtgagtttaggctgggcacaatggctcaggtctgtaatcctagcattttaggaggcagaggctgaggctggcagatcacttgagcccaggagtttgagaccaatctggggcaacatggcaaaaccccgtttctacaaaaaaataaaaaaattagctgggcatggtggcacctgcctgcagtcctagctactcgggaggctgatgtgggagggatt

SEQ ID NO: 938484 - DNA, 627 bp, Homo sapiens
ggttaattttttattttttagtagagatggggtttcatcatgttgcccaggctggtctgaaatgatgtgccccactgggccccgcaaagtgctgggattacaggcgaaagccatggcgcctggctaaggaatttcttcatctgataaatggtagctcacacacacacacacacacacacacacacgctcgtaaagcaattggagagacactgaaagcttttcctttgagaatagaagtgtacactgatggctgctgttgccacttctaattcaacactgtactgaaggttctagccagtgctagggagraaaatgactgaaaaggaaaaaatacaatgtattattttcacatgatataactgtgtactataaaatccaaaagaatctatagataatttagtagaactaataagtgagtttaggctgggcacaatggctcaggtctgtaatcctagcattttaggaggcagaggctgaggctggcagatcacttgagcccaggagtttgagaccaatctggggcaacatggcaaaaccccgtttctacaaaaaaataaaaaaattagctgggcatggtggcacctgcctgcagtcctagctactcgggaggctgatgtgggagggatt

SEQ ID NO: 938485 - DNA, 625 bp, Homo sapiens
aataagtgagtttaggctgggcacaatggctcaggtctgtaatcctagcattttaggaggcagaggctgaggctggcagatcacttgagcccaggagtttgagaccaatctggggcaacatggcaaaaccccgtttctacaaaaaaataaaaaaattagctgggcatggtggcacctgcctgcagtcctagctactcgggaggctgatgtgggagggattccctgagcccagggaggttgaagctgcagtgagccatgatcgcatcactgcactcccgcctgggtgacaatgaaaccctatctcaaaacacacaaacaaacaaaaaaaaagtgagtttagtcaagttgctaawtacaagattaatgaataaaatgaactgcatttaaatcaacaacatttagaaaataaacattttaaagggatatcatttaaataaccacaaaatatcaaatatctaggaataaatctcatcaaaaatatgcaagctttctacacagaaaatgagaaaacattgtaaagagaaatggaaggaaacctaactgaatgagagaacatctctcttcatgggttggatgggtcaatattgtaaagattcaattctccccaatctatagattcaacaca

SEQ ID NO: 938486 - DNA, 633 bp, Homo sapiens
tcaggtagtgtgatgcctccagctttgttcttattgcttaggactgttttggctatacagagtcttctttgatttcatatgaaatttaaaatacttttttttttatttctgtgaagaatgtcaatggtagtttgatgggaataacattggatctataaattactttgggcagtatggccattttcacaatattgattcttcctatccataaggatggaatgttttccatttgtttgtgtcctctcttttttccatgagcagtggtttgtagttctccttgaagaggtccttcacatcccttgttaactgtattcctaggtattttattctctttgtagtgattgtgaattggagttcatttatgatttggctctctgcttgcctattgttcatgtaaaggaatgcttgtgatttttgcacattgattttgtatcctgagcctttgctgaagttgcttatcagttcaagawgttttggggctgagaggatggggttttctaaatctaagaccatgtcatctgctaacagagacaaattgacttcctctcttctcatatcaataccctttatttttttctcttgtctgattgccctggacagaacctccaatactatgttgagtaggagtggtga

SEQ ID NO: 938487 - DNA, 640 bp, Homo sapiens
gggtacttttaatttttttttattttttttcctttttgttgatttgcatttttaaattgttctacagaggtcatatagtgctgatgtaattacatggtgggatggaaagccatttgctagagtggaccagggaaggagacccctggcaacgtccccacttgcaaacctcgtcccagtggtggctgcagtacagtggcgacgcgccttgggaaaggacccctccctgagcagagagagcacgctttggcctcttgcctacacagttcctggggtggggggcggcagggcgctcactcctgttggcggtggggaggctgagcttccaggcactggggtagtcacagagcggcagcctgggacccctttccctgcacctgtgcatgggagacagcgtgggagacgttgaggatcttggccctgttcaggccacctccaggcagacctcccgactggtggggctgttaccgctgcacccagcagccccctccttyttcaggctcctcctctgtccagaggaaatggctgtccctgccgacgttactcccagggggacaagatttgctgggcttgggaacggcaggagcagacatgccaaggctggggtgctcagtgttggcaccacgtggggaaagtcacgtgt

SEQ ID NO: 938488 - DNA, 643 bp, Homo sapiens
acccagcagaacacagaagtagtcagcttgaggatagcttaatagaagagacccaaactgaagctcgggcaggaaaaaagaggggaaaaacaacaagaaacaacaatagaaaaccagaatagagcataagagacacgtgtaacaaactcaaaaggcctaaaaaacataattggaatcccagaaagagagaaaagagagaaggggcagaagtaatattcaaagaagtcatggctaaacatttccccaaattccaaaagacaaaaatctctagccacagattcagcaagaaaactacaaacaaaaaaccaaccagcatacctggktatatcatagtgaaattgccaaaaacaaagacaaaaaatttgacaagcagcaagagaaaaaggacatactactttgaaacgaacataagatggatagctgtcttctcaacaaatgaacagaaacaatggaagctgacaagcagtgaaataacgtatatttaaactgccgaaggaggttgggcacagtggctcccgcctgtgatcccagcactttgggaggctgaagcgggaggatcacttgagccaggagttggagaccagcctggccgacatggtgaaacctcgtctctactaaaaattcaaaaatcagccaggcgtgg

SEQ ID NO: 938489 - DNA, 596 bp, Homo sapiens
atatccacatgcaaaaaagatgaacttagatactcactagagaccataccccaaaaatgaactcaaaatggatcataggcttaaatgtaagtaccaaaacaataaaatgtttagaagaaaacatagaaaatccttaagatcttgcagagcamagatttattagatatgacaccaaacacatagtctaaaaaagaaatgaaccgttttggaaagaaacttttttttttttcaaaagaaaaccttgaaaaatgaaaagaaatgcaacagactaggagaaaatctttggaaaacatatatctggtaaataacttatattcaaaggaatttacaaaggattcttggaatgtaataataagacaaaccaaacaaaaaaatgagcaaaagatatgaacagatattataccacaaatgaagatacacaaatggctaaataaatacatgaaaacatgttcgacatcattatccattacagaaatttaaattaaaaccacagtgagataccatttcacacccactagactggctataatgaaaaagacaataagaagtggagatgtggagaaatggaaactctcatacattgctagtggaaatgt

SEQ ID NO: 938490 - DNA, 567 bp, Homo sapiens
gaaacccatatcattttccctcacgatcatagctcctgtttcccacaaggtaacagcgatgctaacttctggtattacagtttagttttacctgtttttttattttatataaactagatggtatgttgctggcttcttttcattcaacattgtatttgtgagaaccatccatatttttacatgttgtggctcttcattttctttgctgtgtagtagttaattgtatgaatatatcacaaatatttattaagtccactaacccaaatagtagttggatatttgggttgttttcaatttggggctattataggtgatgctgtagtgaacatttctgtacgtgtcttttagtgccctggtacatgcttatcttagtttgctcaggctgctataacaaaataccataaamtgggtggctcataaacagaaatttatttctcaggtttctggatgatgggaagtccaagataaaggtaccagcatggtcaggttctggtgaaggccctcctcctggttgtagactgctgatttctcctcacatggtgaaaggagcaatcaagctcccttagg

SEQ ID NO: 938491 - DNA, 572 bp, Homo sapiens
atcttgagttgatttttatataaggtgagagacaaggatccagtttcattctcctacatgtggctagccaattatcccagcaccatttgttgaaaagggtgtcctttccccactttgtttttgtttgctttgttgaagatcagttggctgtaagtatttaggttcatttctgggttctctattctgttccactggtctatgtgcctatttttataccagtactacactgttttggtgactatgggcttatagtayagtttgaaatcaggtagagtgttgcctccagatttgttctttttgcttagtcttgctttggctgtgtgggctcttttttggttccatatgaatgttagaattgtttttcctaattctataaagaatgatggtggtattttgatgaggattgcatttaatttgtagattgcttttggcggtatgatcattttcatattattgattctacccatctgtgagcctgggatgtgtttccatttgtgtcatctatgatttctttcagcagtgttttataattttcctcatagaggtttttttactccttggttagatatatt

SEQ ID NO: 938492 - DNA, 572 bp, Homo sapiens
atcttgagttgatttttatataaggtgagagacaaggatccagtttcattctcctacatgtggctagccaattatcccagcaccatttgttgaaaagggtgtcctttccccactttgtttttgtttgctttgttgaagatcagttggctgtaagtatttaggttcatttctgggttctctattctgttccactggtctatgtgcctatttttataccagtactacactgttttggtgactatgggcttatagtacagtttgaaatcaggtagagtgttgcctccagatttgttctttttgcttagtcttgctttggctgtgtgggctcttttttggttccatatgaatgttagaattgtttttcctaattctrtaaagaatgatggtggtattttgatgaggattgcatttaatttgtagattgcttttggcggtatgatcattttcatattattgattctacccatctgtgagcctgggatgtgtttccatttgtgtcatctatgatttctttcagcagtgttttataattttcctcatagaggtttttttactccttggttagatatatt

SEQ ID NO: 938493 - DNA, 641 bp, Homo sapiens
tgcctagtgctgtcaatggaggattgaagtcccccactattattgtgttgctgtctatctcatttcttaggtctattagtaattgttttataaatttgggatctccagtgttaggtgcatatatgtttaagattgtgatattttcctgttagacaagggcttttaccattatatactgtccctctttgtctcttttaactgctgtggctttaaagtttgttttgtctcatataagaatacccctgctagcttttggtgtccatttgcatgaaatccctttttccaccctctttaagtttatatgagtcctcatgtgttaggtgartctcttgaaggcagcagatagttggttgttgagttcttatccattatggaattgtgtcttttaattggagcatttaggccatttacattcaatgttagtattgaaatgtgaggtaccattgctttcatcatgctctttgttgcctgtgtactttggttttgttttttgttttttatttctgctttttaacttgtatttttgttttataggtcctgtatgatttatgctttaaagaggttctgctttgatgtgtttccagaatttgtttcaagatttagagctccttttaatggctcttgtagtgatgttttggtaa

SEQ ID NO: 938494 - DNA, 618 bp, Homo sapiens
ctccagtggggaagctttatgtatatgtaacccaggcataacttggcatttcagtaagcttggctgaagactccaatttgaaaatgttctacagccacaaccagtaacatactctctaaaataaaaaaggaaacaaattacctacctcttgactcctttaccacttagaaaataacttgtctaccaaggaggggaaaaagaagtcttgaaataagatttagaagcctgaagagtatagacccttcatctacaaggatttttgttttcagaccacttttaagttggttgcttggtttgcattatcaaagcagaacaccttacagtcaagaaacaaaagctaggttctkctttccccccaattttttcctttacagcaggttttctttcttgtgtcataaggagtttgtttacacaggaattcaaattactattaaaggaggtaatcagcacagtgacaaataaaagttaaaaagatgtttgtcttctatgataaagctcaaataatcccagacttcaaacaatcaaggtaacatacatatttctgtttttattacattaaaaagtagaaaaaaatgatgtcccccagaatagtttaatggattttctaaaaagttcttt

SEQ ID NO: 938495 - DNA, 694 bp, Homo sapiens
acagtataagaaaagtgccattttcttcttatctttcatcatatgcttcaaggatgcatattatcaatatgtattagtgtttatgtcaacctttgtcacctgagagacagaattcctcattgtaacattaccctttccctcyatttcctctttttttgtactatgcttgttggaagaaagtcacgatgcatagctcatatttaaggagtaaggagttatgcttcacctccttaaaggcaaaaatttttactttatgaagttatatttaagttatggatttcttctgcatggaagattagtacactctcttgcatgtattttttattcaataattcatatcagtatggactcatgcatatgtattttatacccaatacattttacttcctttgttgctaagattttttccagttttggccatgggagctcttccattgccttttgtagctctttgatataccacaatcattgtgggtatattgatgtattcatttattggctgaacttttctgagcacttctttattgtttagcacaagacactccaggatcatcttctatatttcctgttccagtcctaaaatcagccagttctccaagtagctttggtttcttcttattagagaaagttattagaaaccaaaatttaggcattaggtagactcattccactggagtgtgattgcttctagggc

SEQ ID NO: 938496 - DNA, 631 bp, Homo sapiens
atttagacactatcagtttggatacaactttttcccttttaccaatgtctctaaaatatgtggcacatattaaaagcttagaaagtgacttaattggctgggcacagtggctcacacctgtaattccagcactttgggaagctgaggcgggcggatcacctgaggtcaggagttcgagaccagcctggccaacatggtgaaaccctgtctctactaaaaatacaaaaagttagccggggtagtggcgcatgcctgtaatcccagctacttgggaggctgaggcaggaaaattgcttgaacccaggagacgtaggttgactgcactccagcatggcaayagagcgaaaccatgtctcaaaaaaaaaaaaaaaaaaagaagacttaatcttcaagaggatcagtatacacctcttcttcagttgtctggtgaaaggatggaaaattaggccaggcgcggtggctcacgcctgtaatcccagcactttgggaggccgaggtgggtggatcacaacgaggtcaagagatcaaggccatcctggccaatatagtgaaaccctgtctctaccaaaaatacaaaaattagcagggcatggtggcgcgtgcctgtaatcccagctacttgggaggttga

SEQ ID NO: 938497 - DNA, 612 bp, Homo sapiens
cctaacatggcaactggtattcaaacatacagacatccagggagctggcattgggacagaatgaaggcagcaagggccagggggcaggtgaggatgagcagtaaatgtccttcacaggtgctggggtgccttcccaggtagggcagcctccatgtgcggagaataaaggatacagacagaacccttctggaaggagatcggctgtgcccagctcccagtgtgacactgagctgctctctaaacttttctgagcctcttttctctttcatgaaacagggagttgggctagaaaatttctttccagctctaaaaatactgtctaaaaaagcagaagaggggcaggcttgaaggcctcgtcctctgggctrtgtgggtctgaggctctggggagccaccagtggccccgggcaaggtggcccccgtgcatcctcaacccaagtcctgggtcgagccaggaaaagtccagtctgcagaccctcagttcttccctccccgttcccaccctctggttctctcctgcaaccagaagaaggcctgatgcctcccctggacccaactactcacaccatgtcttctgcagcccccaggctgctgggccagcctgcccagtga

SEQ ID NO: 938498 - DNA, 647 bp, Homo sapiens
aagtaaagattacccttggctgggcttggtggctcacacctgtaattccaacactttgggagcccgaggtgggtggatcacttgaggtcaggagttcgagaacagcctggccaacatggtgaaacatctgtctctgctaaaaatacaaaaaaattagccagatgtggcagtgcacgcctgtagtcccagctacttaggaggctgaggcacgagaatcgcttgaacctgggagacggaggttgcagtaaaccgagatcataccatttcactccagcctgggcaatagagtgaaactccgtcttgaaaaaaaaaarggggggggccaggcctggtggctcactcctgtaattctagccctttgagaggccaagatgagcggatcacctgagttcaggagtttgagaccagtctgggcaacacagtgaaaccctgtctttattaaaaatacaaaaaattagctgggcatggtagtgcatgcctgtaatcctagctactcaggagacaggcacaagaatcacttgaacccaggaggcggaggttgttgtaagccaagatcacaccacttcactccagtctgggtgacagagtgagactctgtctcaaaaaaaaaaattacccttgatgtgtgggtggtgggcctcatccaa

SEQ ID NO: 938499 - DNA, 647 bp, Homo sapiens
aagtaaagattacccttggctgggcttggtggctcacacctgtaattccaacactttgggagcccgaggtgggtggatcacttgaggtcaggagttcgagaacagcctggccaacatggtgaaacatctgtctctgctaaaaatacaaaaaaattagccagatgtggcagtgcacgcctgtagtcccagctacttaggaggctgaggcacgagaatcgcttgaacctgggagacggaggttgcagtaaaccgagatcataccatttcactccagcctgggcaatagagtgaaactccgtcttgaaaaaaaaaagggggggggccaggcctggtggctcactcctgtaattctagccctttgagaggccaagaygagcggatcacctgagttcaggagtttgagaccagtctgggcaacacagtgaaaccctgtctttattaaaaatacaaaaaattagctgggcatggtagtgcatgcctgtaatcctagctactcaggagacaggcacaagaatcacttgaacccaggaggcggaggttgttgtaagccaagatcacaccacttcactccagtctgggtgacagagtgagactctgtctcaaaaaaaaaaattacccttgatgtgtgggtggtgggcctcatccaa

SEQ ID NO: 938500 - DNA, 847 bp, Homo sapiens
acatttgtggtgatgagaacatttgagatttcctctcttagcaattattagctcgatagcactcaattattagttctatttaccatgttgtgcaatagatctcaaaaaaaaaatcagacttgttctatctgactgagactttgtaccattgatcattatctcccatttcccccaccctctgcccccgtaaccaccattctcctctctgattctatgagttcaattgtatcagactctacacagaagtgagaatatgcggtgtttgtttttctgtgtttggcttatttcactcagcataaatgttcttcagtttcatggctrttgtcacaaataaccatttcttccttgtttaaaggtgaatggtggccaggcgcggtggctcacgcctgtaatcccagcactttgggaggctgagacgggcggatcacgaggtcaggagatcgaaaccatcctggctaacatggtgaaaccctgtctctactaaaaatacaaaaaaattagccgggtgtggtggcgggcgcctgtagtcccagttactcgggaggctgaggcaggagaatggcatgaacctgggagatggagcttgcagtgagcagagactgcgccattgcactccagcctgggcgacagagcaagactccgtctcaaaaaaaaaaaaaaagtgaatagtattccactgtgtatataccgcattttttcttatctattcagccatcgatggacccttagtttgattccatatcttgactattgtgaatagtgctgcaacgaacacaagagtgcagataactcttcaacatgctgatttcaaatactttggataaatatccaggagtgggatagctga

SEQ ID NO: 938501 - DNA, 847 bp, Homo sapiens
acatttgtggtgatgagaacatttgagatttcctctcttagcaattattagctcgatagcactcaattattagttctatttaccatgttgtgcaatagatctcaaaaaaaaaatcagacttgttctatctgactgagactttgtaccattgatcattatctcccatttcccccaccctctgcccccgtaaccaccattctcctctctgattctatgagttcaattgtatcagactctacacagaagtgagaatatgcggtgtttgtttttctgtgtttggcttatttcactcagcataaatgttcttcagtttcatggctgttgtcacaaataaccatttcttccttgtttaaaggtgaatggtggccaggcgcggtggctcacgcctgtaatcccagcactttgggaggctgagaygggcggatcacgaggtcaggagatcgaaaccatcctggctaacatggtgaaaccctgtctctactaaaaatacaaaaaaattagccgggtgtggtggcgggcgcctgtagtcccagttactcgggaggctgaggcaggagaatggcatgaacctgggagatggagcttgcagtgagcagagactgcgccattgcactccagcctgggcgacagagcaagactccgtctcaaaaaaaaaaaaaaagtgaatagtattccactgtgtatataccgcattttttcttatctattcagccatcgatggacccttagtttgattccatatcttgactattgtgaatagtgctgcaacgaacacaagagtgcagataactcttcaacatgctgatttcaaatactttggataaatatccaggagtgggatagctga

SEQ ID NO: 938502 - DNA, 607 bp, Homo sapiens
agccgagagacttttccgggaggctgaaggcacaccttccttgtgaagaatgctgagcagttgtagagtttgtttcttttaaacacgaaattgctgaggataaacatgaaatgttttatttatttaaaaaaatgtttttccttgttgyggttcctatttttccttgttgtggttcctattacccaaaggattgggtttgcttttttttttttttttttttgctggcatttcagggaactctcatttacaagcaaaactcatgctttaagttttagaacaaatccagacagactgccattggggtttaccggtctttaaaaaccagtgatttatttaatgttgttgatgaaaacctagcttccaaaatgttttcttgtgagatgattgcttggtcttagtttctagaaggctgagtttctccaccactcaatcatgtgcaatgacctcaccctttcatctgcccaggaagggaaaccgactccagtgtccatagagacaagcaagggagtctggctctcatttcctgacttgcagagaatccggctggctgcccctggtttcagtgggactgctcaaagctgagagctcaatttcagcaggaaatgca

SEQ ID NO: 938503 - DNA, 499 bp, Homo sapiens
ttccaagttgcttccacattttcaggtatgtttatagcaatgcctcacttctctggtaccaattttctgtattagtccattctcacactgctataaaaaactacctgagaatggcaaatgtataaagaaaagaggtttaattgtctcacagttccagaggctgtatcagagtcatacctggggaggcttcaaggaacttacaatcayggaggaaggcaaaggggaagtaagaatatcttcacatggcggcaggagagagagagagtgaagggggacgtgtcagacacatttaaaccatcagatctcatgagaactcactatcatggaacagcaaggggaaaaactgcacccatgatccaatcacttcctaccaggtccctcccccaacactgagaattacaattcaacatgagatttgggtagggacatggagccaaaccatatcaatattttattattattattattttagacacagggtctctgtgcagtgcagtgg

SEQ ID NO: 938504 - DNA, 594 bp, Homo sapiens
caggcttaacaaacggcacaccaggagattatatcctgcacctggctcggagggtcctatgcccatggaacctcgctcattgctagcacagcagtctgagatcaaactgcaaggtggcagcgaggctgggggaggggcgcccgccattgcgcaggcttgaggaggtaaacaaagcagcagggaagcttgaactgggtggagcccaccacagctcaaggaggcctgtctgcctctgtaggctccacctctgggggcacagcacagacaaacaaaagacagcaataacctctgcagacttaaatgtccctgtgtgacagctttgaagagagtagtggttctcccagcacgcagcttgagatctgagaataggcagactgcctcctcaagttggtccctgacccccgagtagcctaactggggggcacccccaactaggggcggactgacacytcacatgtccgggtactcctctgagacaaaacttccagaggaacaatcaggcagcagcatttgcggttcaccaatatccgctgttctgcagccaccactgctgatacccaggcaaacagggtctggagtggactgccagtaaac

SEQ ID NO: 938505 - DNA, 619 bp, Homo sapiens
gggcgaagtatatgaacagacacttctcaaaagaagacatttatgcagccaaaaaacacatgaaaaaatgctcatcatcactggccatcagagaaatgcaaatgaaaaccacaatgaggtaccatctcacaccagttagaatggcgatcattaaaaagtcaggaaacaacaggtgctggagaggatgtggagaaataggaacamttttacactgttggtgtgactgtaaactagtttaaccattgtggaagtcagtgtgtccatttccttgttgctatttctgtttcagcaacatgctcagagatagggatgatttctattaggtgtaatggcaaagtgcttcttccattcttgctgtacccagggaatgctgttaggtactatagtctggattatatttttctttttttttctgtatttctctatatagaaccacctgacacattcttttgtgtagtggattgataatataattcatgtagcaaatatattctaaaaacagaggaacaataattacaatcgtttgaagtaaaggtcaaaatctgaattcgtttgaaagtgacggaggaagatcatgaaatttagggactttttacagttaatgaaagtgttcccttca

SEQ ID NO: 938506 - DNA, 619 bp, Homo sapiens
gggcgaagtatatgaacagacacttctcaaaagaagacatttatgcagccaaaaaacacatgaaaaaatgctcatcatcactggccatcagagaaatgcaaatgaaaaccacaatgaggtaccatctcacaccagttagaatggcgatcattaaaaagtcaggaaacaacaggtgctggagaggatgtggagaaataggaacaattttacactgttggtgygactgtaaactagtttaaccattgtggaagtcagtgtgtccatttccttgttgctatttctgtttcagcaacatgctcagagatagggatgatttctattaggtgtaatggcaaagtgcttcttccattcttgctgtacccagggaatgctgttaggtactatagtctggattatatttttctttttttttctgtatttctctatatagaaccacctgacacattcttttgtgtagtggattgataatataattcatgtagcaaatatattctaaaaacagaggaacaataattacaatcgtttgaagtaaaggtcaaaatctgaattcgtttgaaagtgacggaggaagatcatgaaatttagggactttttacagttaatgaaagtgttcccttca

SEQ ID NO: 938507 - DNA, 616 bp, Homo sapiens
tataatataaacttttaaaaaatatattatccttatttgtgtgtctatagatactgagagaaaaatatatatgaacccatgtagcttacttagcatatacatataaatacaaaagttaaaaacaggatttattatcaatactattactataaaaatatttagcttaattctgaaagaattttgaaataagaataatatatttcccacataaatcctttcatataatgtrttcattcctttcctggttttattactgatagagcatgtaaaatgaaaatatacattattctctcatttcactctttattacaaacaaattatagtatatgattttgtttcaaatatagtttcatataactgaaactataaacatagcaaggaaagacagaatataacaatataacagtgttaagatatatagcttaatacagatgcagtttttaaaaattactcttttggtatctgtagctgcagggattcttttgtttgcttgcttgcttctttcacttttctcctttatttctttgctttctcttcactccaataagttcttccaagataaaaatattggtagtaggcatcctttttcagttatgattgtttacagaattcaaga

SEQ ID NO: 938508 - DNA, 539 bp, Homo sapiens
attattttttaaaatttgagatggattctccctctgtcgcctaggttggagtgcagtggcacgttctcagctcactgcaacctccccctcccgggttcaagcaattctcctgcctcagcctcctgagtagctgggattacagacacacatcaccatgcctggttagttttttgtattcttagtagagatggggtttctccatgttggtcaggctggtctcaaactcccaacctcaggtgatccgccctcctcggcctcccaaagtgctgggattacagacgtragccaccgcacccggtcacctccttactgattttaaacgtaatgttccttggtgaatctccacgtaaactatttctactgttggtgtcggggactgggagaaaagcagcttacatggtaagggtgaagtttggtgtggtggatgcagagatcccttgtgagatatgaagtccctcttggagcagactagggcgtgtctcagggagggagcaaaagggcctctgaggagttgggagtgaagattcttgaggattggg

SEQ ID NO: 938509 - DNA, 691 bp, Homo sapiens
tttatttaaaacagcattttttttctctttttttaaacaagatgaggtctcgccatgttgcccaggctggtcttgaactcctgggctcaagcgatcctcccgccttggcctccaaaagtgatggggattataggtgtkagccactgtgcctggcccaaaacaactttttttttttttagacggagtctcactctgtcacccaggctggagtgcagtggctcgatctcagctcactgcaagctctgcctcccgggttcacatcattctcctgcctcagcctcccgagtagctgggactacaggcgcccgccaccacacccagctaattttttgtatttttagtagagacggggtttcaccgtgttagccaggatggtctcgatctcctgacctcgtgatccgcccgcctcggcctctcaaagttatgggattacaggcgtgagccaccgcgcctggccaaaactcttttgagaatatattcattcatggtttctactcttcctatataaacatgaaaattaaaattttgaattatatattttagccatttttatttaattcagacctacatgttaaatatttatctctgtatagaaaccctgtatttttttacctagaaaaacaacttagaatggacatgagcaggactcagcgttaataaccccgtgagaataaacgccacggacccaggg

SEQ ID NO: 938510 - DNA, 382 bp, Homo sapiens
gtaaccgtgcagtacatcacacgtgatcatgatatgaaaggactatgttactgctgtatgtagtcactataattttaatgattattttagagtgtactcctacttattaaaaaaaagttaactgtaaagcagcctccagcaggtccctcagaaggaatccagaaggcaytgttctcataggagatgacagctctacgcatgttactgcccctgaagatcttccagtgggacaagctgtggaggaggaagatgacagtgattgatggttctgaccctgtgcaggcctaggctaatgcggcatttgtgttttaatttttaataaaacatttaaaaagttaaaaaattgaaaaatataaaaagcttgtagaataagggtaaagag

SEQ ID NO: 938511 - DNA, 381 bp, Homo sapiens
ctctttacccttattctacaagctttttatatttttcaattttttaactttttaaatgttttattaaaaattaaaacacaaatgccgcattagcctaggcctgcacagggtcagaaccatcaatcactgtcatcttcctcctccacagcttgtcccactggaagatcttcaggggcagtaacatgcgtagagctgtcatctcctatgagaacartgccttctggattccttctgagggacctgctggaggctgctttacagttaacttttttttaataagtaggagtacactctaaaataatcattaaaattatagtgactacatacagcagtaacatagtcctttcatatcatgatcacgtgtgatgtactgcacggtta

SEQ ID NO: 938512 - DNA, 454 bp, Homo sapiens
gcaacaaaagtgcacagaacatatcctcatgcacatcctcctgaaaaatatattgcatgaaaacaaacaagcattgttgccttgttgtcaatatctatagaattgtcaacctggattaaataccacagtgactcattaattctctctaaaaactgtgcctcaatatcctctgctagttcatcaattcatttagctatggtgctagataraagaggaacatgtgccaccttttgaactgtagcctctcctaacgtttaaccacaaatgtccttagcagccggcaggatgaactcttcaccaataggaaaggatttcttagctttagcaatgcagttagccactaggaattatgctttcagtgcagacacatttgatgaagtggtggtcttcaataactgcttctgttatttgtgttcacattttttcttttgaaaaactccaaaggcttgtcttt

SEQ ID NO: 938513 - DNA, 782 bp, Homo sapiens
aagtacaccaactcacttgccactataaagctgccacgagatgcagtttaaatgccacttgctactcactgatagggttttgatctgtgtctccaagcaattgatttattatggtttctgtgcagttaaaaatctctgctaatgttaatctgtatttgcagccactccccagtgctgcatcaccaccttgggtccaccttagatcatctggcattagattctcataagaagagtccaacctagatcccttgcattcgcagttcacaatatggttcgtgctcctatgagaacctaatgccactgctgatctgacaggaggcagagctcaggtggtaatgaaagtgatkggcagtggttgtaagaacagatgaaactttactagcttacccatctttaacctcctgttgtgtggctcatttctaatgagccacagaccagtattagtctgtggtctgagggttgtggtcccttccctaatggctcattgataaggggtttcagaggcagagatgtagaggttataggcaaagtcataattcaatatatggcagctataaattattttgaactaaaaaggtggcatatcttgaagcagaaaggagacctacagattataggtggagtcaaagattttctgattttgctaaccatggaaaagattcgagttactggtggcatatctatacagatctgcagcaacctcaattcttgtctcctcagaagaaagaatttaagtgagaggcataagagagaagaagataccaaggcaagtttcacagcag

SEQ ID NO: 938514 - DNA, 599 bp, Homo sapiens
ataacttgtgcagaggaactccactttgtaaaaccctcagatcttgtgagactttttcactatcatgagaacagcatgggaaagacttgcccctatgattcaactacctcccactgggtctatcccacaacacatgggaattcaagatgagattttggtggggacaccatcaaaccatatcactctactcctggcccctcccaaatctcatgttctcacattasaaaaccaatcatgcctttccaacagtcccccaaagtcttaactcgttccagcgttaactcaaaagtccacacttcaaagtctcatccgagacaaggcaagtcccttccacctaggagcctgtaaaatcaaaagcaggttagttacttcctagatacaatgaggttacaggcattgggtaaacacagctatcctaaatgggagaaattgggaaaataaaggggctacatgccccatgcaagtccaaaatccagcagggcagtcaaatcttaaacttccaaaatgatcttctctgactccatgtctcatattcaggtcatgctggtgcaaatggtgggttcccatggccttggaaagctccacaccagtggctttgc

SEQ ID NO: 938515 - DNA, 599 bp, Homo sapiens
ataacttgtgcagaggaactccactttgtaaaaccctcagatcttgtgagactttttcactatcatgagaacagcatgggaaagacttgcccctatgattcaactacctcccactgggtctatcccacaacacatgggaattcaagatgagattttggtggggacaccatcaaaccatatcactctactcctggcccctcccaaatctcatgttctcacattagaaaaccaatcatgcctttccaacagtcccccaaagtcttaactcgttccagcrttaactcaaaagtccacacttcaaagtctcatccgagacaaggcaagtcccttccacctaggagcctgtaaaatcaaaagcaggttagttacttcctagatacaatgaggttacaggcattgggtaaacacagctatcctaaatgggagaaattgggaaaataaaggggctacatgccccatgcaagtccaaaatccagcagggcagtcaaatcttaaacttccaaaatgatcttctctgactccatgtctcatattcaggtcatgctggtgcaaatggtgggttcccatggccttggaaagctccacaccagtggctttgc

SEQ ID NO: 938516 - DNA, 753 bp, Homo sapiens
aatgaacaaaattacagggaatgtgtacacgcccagcgttattgggagtaatatcaaactcgcccttcttaaatattagaaaaaatataaaagggggtgtgtaaaccccttgcaatattgaaagtaataccatcctctctctttctggatattaggaataacatcacagaagggtgtataccctcctcgatattgggagtaatgtaatcctctcttttcctggatattaataacaatatcacggtggggggtgtaaatctccttcgatattggtagtaatatcattctctacacccctggatattaggaacaatatcacagaaaatgtgtacaccccctgcgacattgggagtaatatcatcctctctgccrtggatactagaaacaatatcacggcggggggacaaggtttacatcccctgcgatattgtgagaaatatcatattctcccatactggatattatgaacaagatcatagtggaggtgtacatcttctgccatattgggagtaatatcatccttttccaccttggatattaggaacaatatcatacgtttggcatacacacgctgatatattgggagtaatatcatctgctccctttctgaatattaggtacaatatcacagtggggttgtaccctccctgaaatattgagagtaatattatcttcttcccctttgaatattaaaacatatatcacagagggggtgtacaccccctgtgatattgggtttaatatcatctgcta

SEQ ID NO: 938517 - DNA, 603 bp, Homo sapiens
attagtgaagaaggcatgtcaaaagttgagataggctgaaagataggcctcttgtgcaaacagttagccaacactatgtatgcaaagaaaaagttcttaaggaaaattaaaagtgcttctccaatgataagaaaacaaaacttaagccttactgctgagatggagaaagttttagtggtctgagtagaaaatcaaaacagccacaatattcccttaacctaaagcctaatccatagcaatgctgtagctctcttcaattttatgaagactgagggaggtgaggaagctgcagaagaaaagttgggaattaacagaggttggttcatgaggtttaaggacagaagccatcttcataacataaaagttcaagtgaagcagcaaatgctgatggagttgctgcagcaagttatccagaatatctggctaagatcattgatgaagrtggctatgctaaacaacagatttgcaatgtacacaaaagagacttcttttggaagaagatgccatctagaattttcatagctaaagagaagtcaatgtctggcttcaaagtttcaaagtacagcctgattcttttgttaggggttaatgcagctggtaact

SEQ ID NO: 938518 - DNA, 583 bp, Homo sapiens; identical to SEQ ID NO: 921598

SEQ ID NO: 938519 - DNA, 754 bp, Homo sapiens
aaaaggtgaagcaggagcaggcacatcacatgttgaaaacaggaggaagggtgcaagggagttgccacacctttaaacaatgagatcttgggtgaacagacttataacccaggggatgatgctgagccattcatacaggatatgcccccatgttccaaacacctcctaccaggtcccaccttcaacactgaggattacattttaatatgagatttggcaggggcacaaatccaaaccatatgattctatccttggccaccaaaatctcatgttcttctcacattgcaaaatayagagatctcttcccaacactcccctaaaagtctgaactcattcaagcaccaagtccaaagttttaagtgttatctgagactcattttattctgcctatgagcctgtaacattgaaaatatgttacttatttccaagatgcaatgggggtatatgcattggttaaacgttccccatccaaaagggagaaattagtcaagagaaaggggctacaggcttcacaaaagttcaaaacccagcaggaaagtaattaaatctttaaactccaaaataatctcttttgactatattacaaatcaaaaccacaaagggtacactggtgcaaaacgtgggctcccaaggccttcagcaactctgccccagggctgctttcagagtttattaaatgtctgcagcttttccagatgtgaggtgcaagtttctggtggatttgccattctagggtttggaggatgttgacacc

SEQ ID NO: 938520 - DNA, 754 bp, Homo sapiens
aaaaggtgaagcaggagcaggcacatcacatgttgaaaacaggaggaagggtgcaagggagttgccacacctttaaacaatgagatcttgggtgaacagacttataacccaggggatgatgctgagccattcatacaggatatgcccccatgttccaaacacctcctaccaggtcccaccttcaacactgaggattacattttaatatgagatttggcaggggcacaaatccaaaccatatgattctatccttggccaccaaaatctcatgttcttctcacattgcaaaatatagagatctcttcccaacactcccctaaaagtctsaactcattcaagcaccaagtccaaagttttaagtgttatctgagactcattttattctgcctatgagcctgtaacattgaaaatatgttacttatttccaagatgcaatgggggtatatgcattggttaaacgttccccatccaaaagggagaaattagtcaagagaaaggggctacaggcttcacaaaagttcaaaacccagcaggaaagtaattaaatctttaaactccaaaataatctcttttgactatattacaaatcaaaaccacaaagggtacactggtgcaaaacgtgggctcccaaggccttcagcaactctgccccagggctgctttcagagtttattaaatgtctgcagcttttccagatgtgaggtgcaagtttctggtggatttgccattctagggtttggaggatgttgacacc

SEQ ID NO: 938521 - DNA, 750 bp, Homo sapiens
cgagccgagatcacaccactgcactccagcctgggcaacattgagcactgagtgaacgagactccatctgcaatcccggcacctcgggaggccgaggctggcagatcactcacggttaggagctggagaccagcctggccaacacagtgaaaccctgtctccaccaaaaaaatatgaaaaccagtcaggcgtggcagcgcgcgcctgcaatcgcaggcactcagcaggctgaggcaggagaatcaggcagggaggttgcagtgagcagagatggcggcagtacagtccagctttggctcggcatcagagggagactgtggaaagagagggagagggagaccgtggggagagggagagggagagygcaataaatatttttagggaagaaaaaggaatgaagttcttatacatgctataacatagatgcacctcaaaaacgtaacgctaagtgaaagaagtcagttacaacagcccacatgttgtatgattcaatttatgcaaaattttcaggacacaaacaaatataaaggcagaaactggaatagtaattggttagaaagggggaaatgacaagattgatgattaacagctagaaggtatggaatttctatttggcatgttgaaaatgttctaaaattgattgtgttaatggttgcacaacactctacatacactacagagcattgacttgtacatttattgggcatgatgtacagtatgtgaattatatctcaataagtttattttttt

SEQ ID NO: 938522 - DNA, 622 bp, Homo sapiens
aaactgtgaaattatccttcaaaagtgatggtaaaataaagacttcctcaaacaaacaaaaattaaagcactttgtcaccactaaacttgtcttgcaagaaaggacaaaagatctccagtagaagaaaaatgatatgtcggaaatatagacctaaaaagaaagaaaaaaagagcactagaaaagaaataaatgaagattaaatattttatttttcaaattcttaatggacctaacagataagaatttgtctataataataattgtaatgatacatttggtgattgtatcttacaaataagtaaaaagaatgatagtaccattataagggactaaatggagaaattggaaatagtctgtkgatcctgtacaacccataactacgttactggaatttgaaaagtggacataaactaaccacaaatgcatattgcaagctctaaggcaaccattaaaaaatgaaaaagaagaagtataatttacatggtaagagaagacagaaaataagatcatataaaatattctcttaaaaaagagaagtcaaaagaagactgaaagacaaaaataaaaacaaaaacaataagtagaagatggtaaacaatatagtagatactattacaccat

SEQ ID NO: 938523 - DNA, 555 bp, Homo sapiens
agaatgactttgacgagctgacagaagtaggcttcagaaggttggtaataacaaacttctccaagctaaaggaggatgttcaaacccatcgcaaggaagctaaaaaccttgaaaaaagattagaccaatggctaactacaataaacagtgtagagaagascttaaatgacctgatggagctgaaaaccatggcatgagaactacaggacgcatgcacaagcttcactagccgacttgatcaagtggaagaaagggtatcagtgattgaagatcaaattaatgaaataaagcgagaggagaagtttagagaaaaaagagtaaaaagcaacaagataaagcctacaagaaatacaggactatgtgaaaagaccaaatctacatttgattgttgtacctgaaagtgacggggagaatggaaccaagctggaaaacactcttcaggatattatccaggagaacttccccgacctaccaaggcaggccaacattcaaattcaggaaatacagagaactccacaaagatactcctcgagaagagcaaccccaagacacgta

SEQ ID NO: 938524 - DNA, 574 bp, Homo sapiens
caaagaggaccagtaccattccttctgaaagtattccaaacaattgaaaaagagggaatcctccctaactcattttatgaggccagcatcatcctgataccaaaacctggcagagacacaacaaaaaaagagaattttaggccgatatccctgataaacactgatgcgaaaatcctcaataaaatactggcaaactgaatccagcagcacatcaaaaagcttatccaccatgatcaagtcgrcttcattcctaggatgcaaagctagttcaacatactcaaatcaataaacgtaatccatcacataaacagaaacaatgagaaaaacaacatgattatctcaatagatgcagaaaaggcctttgacaaaattctacagcccttcatgctaaaaagtctcaataaactaggtactgatggaacatatctcaaaatcataagagctatttatgacaaactcacagcaaatataatactgaacgggcaaaaactggaagcattccctttgaaaactggcacaagacaaggatgccttctctcaccagtcctattcaacatactattggaagttctgg

SEQ ID NO: 938525 - DNA, 540 bp, Homo sapiens
agtgtatggtctaacctactcattttatgaactcagaatacaaggttcagaaaagggaaagatatttttcaaaatcaaattatttattagccaagaccagcctaagagaagaatcggaaacgaactaaaagaaggcagggagaattctactaaagcagtcaaatagcctccttgtgtccaccaacacaaatgtcaggactgaacaataaattatatcatagcctcccacttacctgccaygctgaggatgtttcatggcgtctgacttttagtttaaaaacaacagcaacatcagaaaaaaacaatacctgagaaactgtgagatcagattttgttttaatccttctggcaatgctaagaagataaaaatatctccaagagaaaactgatggaggccaggcatggtggctaacacctgtaatcccagcattttgtgaggccaacatgggcagatctcttgagctcaggagtttgagaccagtctgggcaacatagcaagacctcgtctctaaaaataataataataataatacaaaaatt

SEQ ID NO: 938526 - DNA, 540 bp, Homo sapiens
agtgtatggtctaacctactcattttatgaactcagaatacaaggttcagaaaagggaaagatatttttcaaaatcaaattatttattagccaagaccagcctaagagaagaatcggaaacgaactaaaagaaggcagggagaattctactaaagcagtcaaatagcctccttgtgtccaccaacacaaatgtcaggactgaacaataaattatatcatagcctcccacttacctgccacgctgaggatgtttcatggcrtctgacttttagtttaaaaacaacagcaacatcagaaaaaaacaatacctgagaaactgtgagatcagattttgttttaatccttctggcaatgctaagaagataaaaatatctccaagagaaaactgatggaggccaggcatggtggctaacacctgtaatcccagcattttgtgaggccaacatgggcagatctcttgagctcaggagtttgagaccagtctgggcaacatagcaagacctcgtctctaaaaataataataataataatacaaaaatt

SEQ ID NO: 938527 - DNA, 793 bp, Homo sapiens
caatttggcagtttctaaaaaaaagttagggatagagttactgagttaacccagcatttccactttacttctcacccaagagatgaaaatatgtgtttacacaaaaactcatagacatatgttcatagcaactttattcataataaccaaaaagtggaaacaatacaagtgcccatcaattgatgaatggatagacaaaatgggatgtgtgtgtacaatgggagagtatttggcaataaaaaggaatgaaggactgatatacactatgacatggatgaaccttgaagtcattacgctaagtgaaagaagccagctacaaaagaccaaatatgatatgattccattcatataaaatgtccaggataggcaaatccacagagatgaaaagtatagtgattccttagggctggagggagagaaaatgttggggtaaatggggagtgactgctaatgggaactgggcttccttctgggttgatgaaaatgttctaaaatgagatggtggaaatgattgtacatgtctgtaaatatactaaaaagtcactgaattctacactttcaatgagtgaattcatagtatgagttatgtctcaataactctgattatacatgtgtatttcatgtatatgkgaaataatatgtttactggaaaaaatatctattaggagaaataccagccaaaaggaggtttctccagcttgagtcagctcaaccaccaatctaaattggatcttagttaaatctctttccttctctcagcctcagttttctcatctgcaaaatgggccgatgg

SEQ ID NO: 938528 - DNA, 713 bp, Homo sapiens
gaggagttcctctgaaggaggcatgggagcttgctcactaaggagagtgtgctgccgacacttgagccaagatggccgaataggaacagctccggtctacagctcccagggtgagcaatgcagaagacgggtgatttctgcatttccatctgaggtaccgggttcatctcactagggagtgccagacagtgggtgcaggacagtgggtgcagtgcaccgtgcatgagccgaagcagggcgaggcattgcctcactcgggaagcgcaaggggtcagggagttccctttcttagtcaaagaaaggggtgacagacggcacctggaaaatcgggtcactcccacccaaatactgygcttttccgacaggcttaaaaaacggcacaccaggagattatatcccgcacatggctcggagggtcctatgcccacagagtcttgctgattgctagcatggcagtctgagatcaaactgcaatgcggcagcaaggctgggggaggggcgcccgccattgcccaggcttgcttaggtaaacaaagcagccaggaagctcgaactgggtggagcccaccacagctcaaggaggcctgcctgcctctgtaggctccacctctggggacagggcacagacaaacaaaaagacagcagtaacctctgcagacttaagtgtccctgtctgacagcattgaagagagcagtggttctcccagcatgca

SEQ ID NO: 938529 - DNA, 713 bp, Homo sapiens
gaggagttcctctgaaggaggcatgggagcttgctcactaaggagagtgtgctgccgacacttgagccaagatggccgaataggaacagctccggtctacagctcccagggtgagcaatgcagaagacgggtgatttctgcatttccatctgaggtaccgggttcatctcactagggagtgccagacagtgggtgcaggacagtgggtgcagtgcaccgtgcatgagccgaagcagggcgaggcattgcctcactcgggaagcgcaaggggtcagggagttccctttcttagtcaaagaaaggggtgacagacggcacctggaaaatcgggtcactcccacccaaatactgcgcttttccgacaggcttaaaaaacggcrcaccaggagattatatcccgcacatggctcggagggtcctatgcccacagagtcttgctgattgctagcatggcagtctgagatcaaactgcaatgcggcagcaaggctgggggaggggcgcccgccattgcccaggcttgcttaggtaaacaaagcagccaggaagctcgaactgggtggagcccaccacagctcaaggaggcctgcctgcctctgtaggctccacctctggggacagggcacagacaaacaaaaagacagcagtaacctctgcagacttaagtgtccctgtctgacagcattgaagagagcagtggttctcccagcatgca

SEQ ID NO: 938530 - DNA, 713 bp, Homo sapiens
gaggagttcctctgaaggaggcatgggagcttgctcactaaggagagtgtgctgccgacacttgagccaagatggccgaataggaacagctccggtctacagctcccagggtgagcaatgcagaagacgggtgatttctgcatttccatctgaggtaccgggttcatctcactagggagtgccagacagtgggtgcaggacagtgggtgcagtgcaccgtgcatgagccgaagcagggcgaggcattgcctcactcgggaagcgcaaggggtcagggagttccctttcttagtcaaagaaaggggtgacagacggcacctggaaaatcgggtcactcccacccaaatactgcgcttttccgacaggcttaaaaaacggcacaccaggagattatatcccgcacmtggctcggagggtcctatgcccacagagtcttgctgattgctagcatggcagtctgagatcaaactgcaatgcggcagcaaggctgggggaggggcgcccgccattgcccaggcttgcttaggtaaacaaagcagccaggaagctcgaactgggtggagcccaccacagctcaaggaggcctgcctgcctctgtaggctccacctctggggacagggcacagacaaacaaaaagacagcagtaacctctgcagacttaagtgtccctgtctgacagcattgaagagagcagtggttctcccagcatgca

SEQ ID NO: 938531 - DNA, 713 bp, Homo sapiens
gaggagttcctctgaaggaggcatgggagcttgctcactaaggagagtgtgctgccgacacttgagccaagatggccgaataggaacagctccggtctacagctcccagggtgagcaatgcagaagacgggtgatttctgcatttccatctgaggtaccgggttcatctcactagggagtgccagacagtgggtgcaggacagtgggtgcagtgcaccgtgcatgagccgaagcagggcgaggcattgcctcactcgggaagcgcaaggggtcagggagttccctttcttagtcaaagaaaggggtgacagacggcacctggaaaatcgggtcactcccacccaaatactgcgcttttccgacaggcttaaaaaacggcacaccaggagattatatcccgcacatggctcggagggtcctatgcccacagagtcttgctgattgctagcatggcagtctgagatcaaactgcaatgcggcagcaaggctgggggaggggcgcccgccattgcccaggcttgcttaggtaaacaaagcagccaggaagctcgaactggktggagcccaccacagctcaaggaggcctgcctgcctctgtaggctccacctctggggacagggcacagacaaacaaaaagacagcagtaacctctgcagacttaagtgtccctgtctgacagcattgaagagagcagtggttctcccagcatgca

SEQ ID NO: 938532 - DNA, 482 bp, Homo sapiens
gctcctggtaaggtcaaatccttctcctgtgatctagaccttcaggttccccagtgaggatgtgcatttgggagcagattctcaccctctcacactttgggcactcccagttttttggctgttctcatggcacctgcagtggcaagctgcttccttgaaagggtctgcggattctctggcctttcctggtatgttcctgtggtagttcttggagcagaaaatcacaatgtgagtcttcacatgctgctctgtacatctgagtggaagctgcaagttagttttgtctcctatctgccatttttcccctcaggattattagaatttcraagcttggaggagaggccacaaggagctgagactcagagctctgcagggagtgggaggtgccagttgctgctaggatctctgagagggcacaataaggcagcctctgaagtgtgggaaaagcaaattgcaaactaggaccaactactgacaatgga

SEQ ID NO: 938533 - DNA, 582 bp, Homo sapiens
aaataaacataggcattgaacattaaagacaaacactttaaaacaactatcttaaatatgctaaattgggagctgaaagtactagaactgaattgaaaattttactggcgggattcaacagcagatttcgcaggcagcagaaagaattttcaaacttgaagatagataggccaataaaaatagaagaaaatraacaaacagagtctaaaagagttgtgagacaccctcaagtgaaccaacatatacattttgagagtctcagaagaagaaaggagttgaaagattatttgcagaaataatggccaaaaactttccaaatttgatgaaagacatgaatctacaaatccaagaagctaaacaaactctaagttgaaaaagccaaagggacccacactaagattaaaatcagtcttaagaaacaaagagggaatcttgaaagcagcaagaaaagcaactcattgtgtacaagaaattctcaataactttataaactgatttctcagcagaaaccttgcaggacagaaggcagtggaattatgtatttgaagtgcagaaagagggggaggggccaagatggctgat

SEQ ID NO: 938534 - DNA, 653 bp, Homo sapiens
cacgcctgtaatcccagtcccagcactttgggaggccaaggtgggtggagaagtgacctcaccagaggtcaggagttcgagaccagcctggccaacatggtgaaaccctgtctctaccaaaaacactaaaattagccaggtatggtggtgtgtgcctatagtcccagcagaataatcgcttgaacccaggaggtggaggttgcagtgagccaagatcatgccactgcactccagcctgggcaacagagtgasactctgtctcaaataaataaataaattgccaggctggtggtgcacacctgtagtcccaggtactggggagtggggagatgcagaggtgagaggatcacttgggcccgggaggtcaaggctgcagtgggccaagatcacatcactgcactgcagcccgggtgacaaagcaagaccctgtctcaaaaaaataaatatataaataaaaataacttaaaataaatttttaaaaaagagatggagtcttgctacgttgcctaggctggtcttaaactcctgagctcaggcaatcctccccctcagcctccaaaagtgctaggattacaggcacgcaccactgcacctgtctacacttcccttttaaagtgtccacacactccctctcctcaaagtccaggtccctt

SEQ ID NO: 938535 - DNA, 618 bp, Homo sapiens
tctgaagatttaatttgttcctttgaatgagccatgttttcttgtttctttgtatgctttgggatttgttgttgatgttgaaaactggatatttgtttatcatataatgtggtaattctggaaatcagattctcccccttccccagggttgctttctattttttattgctgtcgggtatctctgtgctagagatcatcctgaggcaaaagcttaaaggcttttctatactttgtctttccctgggcggtatggtgacattgtaaatattctcgtatatatggttgcttttcaatgttctaagttttacacgtctggctcccaacactagaaaaagggaggaaaaaaaagaagaaaagacccttctcacaccattctagatactgtccctggatgctgcttctgttgrtggggttgaaacaatggcttcacttttctgtgtctgcacttttccatcatcagaagcagcagtcagcagttcagaatacagaattattagaggatgagatctgtattgaccaccctggcttctgaaactctcaccaggaatgtggccatggctgcttaccatggtactgatgttgaagagataggtagctatgactgaaattgactgaaat

SEQ ID NO: 938536 - DNA, 689 bp, Homo sapiens
tcctgaagtcggccagaccatgaacccgctggaaggaaccaactctggacacactgggagccaccacacccagccaaaagttctttatatattctgattactagttctttatcaggtatgtgacttgcaaatattttctcccactctaaagcttgcctttacttgatagtatcctttgatgcagaaaagttttaaattttggtgaaacccaagttacctactttttttctttttttttgagacaagagtctcacgctgttgcccaggctggagtgcagtggtgcgatcttggctcactgcaacctctgcctcccrggttcaagcgattctcctgcctcagcttcctgagtagctgggactacaggcatgcgccaccatgcccagctaatttttgtatttttagtagaaacagggtttcaccatcttggccaggctggtctcaaactcctggcctcaagtgatccacccacctcagcctcccaaagtgctgggaatacaagtgtgagccactgcacacagccttactttttttcttttgttgctggtggttttggtgtcatatccatgaaactgttgccaaatacaattgtgtgaagattttctccaaaattttcttctaaaagttttatagttttagctcttatgtgtagatcttggatgcattttgagttaattttttatgttgtcca

SEQ ID NO: 938537 - DNA, 774 bp, Homo sapiens
gccgttttttaagccggtctgaaaagagcaatattcgggtgggagtgacccgattttccaggtgtgtccttcacccctttctttgacttggaaagggaactccctgaccccttgtgcttcccaggtgaggcaatgccccgccctgcttcagctcgcgcatggtgcrcacacccactggcctgcccccactgtctggcactccctagtgagatgcacccggtacctcagatggaaatgcagaaatcacccgtcttctgcctcgctcacgctgggagctgtagaccagagctgttcctattcggccatcttggctcctccccgcttattttttaattatgttagtttctgacattgccagattctacttacacagagaaggcttctgtgacaagctttttaaaaaattggtggtaaaatgcacataacatactttaaccattttaagtgtctaattcagtggcactgagtctattcacatcattgtgtaaccatcaccaccatccatctccagagcttttttttcatttcccaaaactgaaactccgtacccattaaacaataactcctcatttatgacagccttttaaaatcacttaaaagtatagtaaagagaaattttagagcgacaccttctacaattgttcttcacaaaatattggtatctttttcccctgatttttaagaattcttttccagctaaggaatgcagctagctgtccattccacacagcctctccatgcaggccactcaggctccttccctaccctgaaaaa

SEQ ID NO: 938538 - DNA, 774 bp, Homo sapiens
gccgttttttaagccggtctgaaaagagcaatattcgggtgggagtgacccgattttccaggtgtgtccttcacccctttctttgacttggaaagggaactccctgaccccttgtgcttcccaggtgaggcaatgccccgccctgcttcagctcgcgcatggtgcgcrcacccactggcctgcccccactgtctggcactccctagtgagatgcacccggtacctcagatggaaatgcagaaatcacccgtcttctgcctcgctcacgctgggagctgtagaccagagctgttcctattcggccatcttggctcctccccgcttattttttaattatgttagtttctgacattgccagattctacttacacagagaaggcttctgtgacaagctttttaaaaaattggtggtaaaatgcacataacatactttaaccattttaagtgtctaattcagtggcactgagtctattcacatcattgtgtaaccatcaccaccatccatctccagagcttttttttcatttcccaaaactgaaactccgtacccattaaacaataactcctcatttatgacagccttttaaaatcacttaaaagtatagtaaagagaaattttagagcgacaccttctacaattgttcttcacaaaatattggtatctttttcccctgatttttaagaattcttttccagctaaggaatgcagctagctgtccattccacacagcctctccatgcaggccactcaggctccttccctaccctgaaaaa

SEQ ID NO: 938539 - DNA, 850 bp, Homo sapiens
cagggatttctagaaacctcgggggcggaagtttaaccagagaattaggaggcaaggggaagagtagcaatgaggttaacctgtgcagtgtagtcatttcacgagtttgagaacgcctagcacgatgccttaacggagcgtcgggcacagagtcatttgggaggatttctttttcggatttttgagacaggaacctgatttgaagcaacagggaagaacaccaagaggacgaagagccaaggacgggcgtgcccgggagctctcacctggaaggggtgggagcaagcagggcctgacgtcctcccgccttggcggccgtggacgccccaggtgccacccacagcagcctcccaccacacatgactgaggctcgggaagcaataaagtggctttcaaaatactaaacgcaattgagattttttcctgagttaaaacaaaaaaaaaaaggaactgaatgccgaaatatacggagaagaaactccagttgccacgtccccgaacgtctccacccagtcctgcctgctgtctcgcccttagtctgggcctcgcacagcacggcggagcgcgggaggggcggggcgggcctgctgacgtcgccggacctgaactgcgcaggcgcggcgcgagatcgcgggagcgagcgcgcggtaacagttcgcggcagttcgcgcgggagcggkgcgcctgggtggatgggcgcttgggcgcctgggctgccggacggtgggaacggaagtcgctgtgggacgctgaggaagccaggatggcgactccgagcaagaagacgtcaactccaagcccccagccttccaagagagctctcccgagagacccttcgtcggaggtcccg

SEQ ID NO: 938540 - DNA, 724 bp, Homo sapiens
ttttcgcaaaggtggtttcatctttatccaagagtagggacttgccgctggatccccctgtcagacacacgctgctgtgagtcagctctggattccgctttaggacacctgggagctgtcccagttcagaatctgattccctgttggaagctctgcccagaatttctcaaaactcagtctgcatcctggccccyacccccatgaataatggggagaataaatgtgaacccggttttgtctacatcatagggctgctgtgagaatcaaaaagggtgaaaaaaaacctccctgccggtagagaccagtctaactgcaactgtgcatttttttcttaactatccccctattgtttgattgtgtttgccattttctctgctataaacagcactgcaatgaacatctttacatgcctgcatatgggtgaagggaaaacttccccttttccttctgaaggttcactgaaaatcacctgacaaaaggcagattagtaggagaaaaaggatacacatttattaacattcatgggagagaattacagtgtgattaccccaatcccccaatggggtacagaagcttatgtactctttttcccaggggagcgaggagatgggaaacatagagcattgttttgaggagcagtaaatgattattaaggagaatgaatggatcagggagacagaaatcaacttgtgaatggaatgagtctgagaggcagacattatgt

SEQ ID NO: 938541 - DNA, 724 bp, Homo sapiens
ttttcgcaaaggtggtttcatctttatccaagagtagggacttgccgctggatccccctgtcagacacacgctgctgtgagtcagctctggattccgctttaggacacctgggagctgtcccagttcagaatctgattccctgttggaagctctgcccagaatttctcaaaactcagtctgcatcctggcccccacccccatgaataatggggagaataaatgtgaacccrgttttgtctacatcatagggctgctgtgagaatcaaaaagggtgaaaaaaaacctccctgccggtagagaccagtctaactgcaactgtgcatttttttcttaactatccccctattgtttgattgtgtttgccattttctctgctataaacagcactgcaatgaacatctttacatgcctgcatatgggtgaagggaaaacttccccttttccttctgaaggttcactgaaaatcacctgacaaaaggcagattagtaggagaaaaaggatacacatttattaacattcatgggagagaattacagtgtgattaccccaatcccccaatggggtacagaagcttatgtactctttttcccaggggagcgaggagatgggaaacatagagcattgttttgaggagcagtaaatgattattaaggagaatgaatggatcagggagacagaaatcaacttgtgaatggaatgagtctgagaggcagacattatgt

SEQ ID NO: 938542 - DNA, 724 bp, Homo sapiens
ttttcgcaaaggtggtttcatctttatccaagagtagggacttgccgctggatccccctgtcagacacacgctgctgtgagtcagctctggattccgctttaggacacctgggagctgtcccagttcagaatctgattccctgttggaagctctgcccagaatttctcaaaactcagtctgcatcctggcccccacccccatgaataatggggagaataaatgtgaacccggttttgtctacatcatagggctgctgtgagaatcaaaaagggtgaaaaaaaacctccctgccggtagagaccagtctaactgcaactgtgcatttttttcttaactatccccctattgtttgattgtgtttgccattttctctgctataaacagcactgcaatgaacatctttacatgcctgcatatgggtgaagggaaaacttccccttttccttctgaaggttcactgaaaatcacctgacaaaaggcagattagtaggagaaaaaggatacacatttattaayattcatgggagagaattacagtgtgattaccccaatcccccaatggggtacagaagcttatgtactctttttcccaggggagcgaggagatgggaaacatagagcattgttttgaggagcagtaaatgattattaaggagaatgaatggatcagggagacagaaatcaacttgtgaatggaatgagtctgagaggcagacattatgt

SEQ ID NO: 938543 - DNA, 724 bp, Homo sapiens
ttttcgcaaaggtggtttcatctttatccaagagtagggacttgccgctggatccccctgtcagacacacgctgctgtgagtcagctctggattccgctttaggacacctgggagctgtcccagttcagaatctgattccctgttggaagctctgcccagaatttctcaaaactcagtctgcatcctggcccccacccccatgaataatggggagaataaatgtgaacccggttttgtctacatcatagggctgctgtgagaatcaaaaagggtgaaaaaaaacctccctgccggtagagaccagtctaactgcaactgtgcatttttttcttaactatccccctattgtttgattgtgtttgccattttctctgctataaacagcactgcaatgaacatctttacatgcctgcatatgggtgaagggaaaacttccccttttccttctgaaggttcactgaaaatcacctgacaaaaggcagattagtaggagaaaaaggatacacatttattaacattcatgggagagaattacagtgtgattaccccaatcccccaatggrgtacagaagcttatgtactctttttcccaggggagcgaggagatgggaaacatagagcattgttttgaggagcagtaaatgattattaaggagaatgaatggatcagggagacagaaatcaacttgtgaatggaatgagtctgagaggcagacattatgt

SEQ ID NO: 938544 - DNA, 457 bp, Homo sapiens; identical to SEQ ID NO: 937147

SEQ ID NO: 938545 - DNA, 551 bp, Homo sapiens
ctgaggtacgtggttcatctcactgggactggttggacagtgggcagagaccatggagggtgagctgaagcagggtggggcgttgcctcacccaggaagtgcaaggggtcgggggatttccctttcctagccaagggaagccttgacagtctgtaccaagagraatgatacactcctgcccagatactgcacttttcccatagtcttcacaaccagcagacaaggagattccctcgggtgcctggctcagtgggtcccacatccattggcttgaaatccttgctgccagcgcagcagtctgagatcaacctgggatgcttgagcttggtagggggaggggtgtcggccattactgaggcttgagtaggcggttttatgctcacagtgtaaacaaagcaactgcaaagttcaaactgggaggagcccaccacagctcagcaaggctgactgccactctagatttcacctctgtgggcagggcatctctgaacaaaaggcagccccagtcagggacttatatataaaaccctcatctccctgggacagagcac

SEQ ID NO: 938546 - DNA, 763 bp, Homo sapiens
cccattcttttcaaagtcacctctccactcactgagataaatgcatatctgattgcctcctttggaaatgctaatcagaaactcaaaagaatgtaaccatttgtcttttatctacctatgacctggaagccccctccccgcttcaagttgtcctgcctttccggaccaaaccagtgttcatcatatatgttgattgatgtctcatatctccctaacatgtataaaaccaagctgtcctctaaccgtcttgggcacatagcatcaggacctcctgaggctgtgtcacaggcacatgttctcaaccttggcaaaataaactttctaaattaactgaaacctatctcaggtgtttggggttcacatttggcaaccacaaagggattctgagtggagttacccctgacctttggcaaatctcctkttggtgcttgataccagcatgagctaactttatggctcaaaccaataggacaatttgctgaggcctgggagcaccccactccagagaatccccaatctcccaagatttggtcaagatctagtttattttgctgtacaactccctttttttagagttttacttgcttccaacaaggaaggcaagatttcctgctttcatgatgatggaaggcaggtaattcctttatagagtctgaggttgctcccaacaagggagacaagtttgatttttttgctggttcttcagcccaagacccaaccctaggtaagtatctgaatttgggttttgtcttggctaaagtta

SEQ ID NO: 938547 - DNA, 642 bp, Homo sapiens
gtctccatctcctcacctcctgatccgcccaccttggcctcccaaagttctgggattacaggcatgagccaccgcaccaggcctttttcaactcttgataaggtcagccttttccatcttagccatcctaacaaaagtggttttactttgtatctacttaatgactaatgatgttgacaaaaaaaggctccttcaactcttctgcccatttctaattgggtttttgtcttcttcctgctgagtttcaagagttctttatatatgtgtgatacatattttgcaaatattttctcctattctctggctccctagtcatgacatgcgattattagtaycttttgaaaagaaaaaggttttcattttcataaagtcaatgtatccatttttttcatttatagttatactttttgagacatattcttaaaatgtttgcctagcccaaagtcactaagacagtctacatttttttctagaagtttaattgcctgaactcttacatttaagtttatgatatgtttcaagttaattcttccatgagctgtgaggtaagtgctcaggtttgttttgttttcttttcatgcttctggatataaaattgttcctgcaccccttgttgaaagaattctcctcacccagctgaat

SEQ ID NO: 938548 - DNA, 572 bp, Homo sapiens
gcaccaggcctttttcaactcttgataaggtcagccttttccatcttagccatcctaacaaaagtggttttactttgtatctacttaatgactaatgatgttgacaaaaaaaggctccttcaactcttctgcccatttctaattgggtttttgtcttcttcctgctgagtttcaagagttctttatatatgtgtgatacatattttgcaaatattttctcctattctctggctccctagtcatgacatgcgattattagtatcttttgaaaagaaaaaggttttcattttcataaagtcaatgtatycatttttttcatttatagttatactttttgagacatattcttaaaatgtttgcctagcccaaagtcactaagacagtctacatttttttctagaagtttaattgcctgaactcttacatttaagtttatgatatgtttcaagttaattcttccatgagctgtgaggtaagtgctcaggtttgttttgttttcttttcatgcttctggatataaaattgttcctgcaccccttgttgaaagaattctcctcacccagctgaattaa

SEQ ID NO: 938549 - DNA, 609 bp, Homo sapiens
atctggtcttggcctatttttggttggtaggctattaattattgcctcaatttcagaacctgtcattggtctattcagagattcaacttctccctggtttagtcttgggagggtgtatgtgtccaggaatttatccatgtcttctagattttctagtttatttgcatagagttatttatggtattttctgatggtagtttgtatttctatgggatcggtggtgatatcccctttatcatttttattgcatctatttgattcttctctcttttctctttattagtctggctagtggtctattttgttgatcttttcaaaaaaacagctyctggattcaatgatttttgaaggggtttttatgtctctatctccttcagttctgctctgatcttagttatttcttgccttctgctagcttttgagtttgtttgctcttgcttctctagttattttaattgtgatgttagggtgtcaacattagatctttccttctttctcttgtgggcatttagtgctataaatttccctctacacactgctttaaatgtgtcccagagattctggtacgttgtgtcttcattctcattgttttcaaagaacatctttatt

SEQ ID NO: 938550 - DNA, 615 bp, Homo sapiens
aatagttcttttaatgtccttgtattagctcaggctgctataacaaaataccatagactgggtggcttaaacaacagatatttatttcttaccattctgtaggttggaagtccaaactcaagctgccaaccaattcatttcctggtgagagccctctttttggtttgcacattgctccttctcactgtgttctcacacggtacaygcaaaaaaggtaatctgtatctctctcttcttcttcttataaagttattaatcttatcataaaggccctactctcataacatcacctgacactaattaccaaattaccaaagtgtccatctccaattatcatcacattaagagttaggacttcaacatacggatttggtaaagatgaggagggtcacaattcagtccatagcagtccttgtctagtaattctatcatctgtgtcatttctaggcctttttctatatactgtttttctcctcattatgggtcacattttcctgcttctttgaatgcctggtaatttctttttctttttacttttttggagacaaggtcttgctgtcactcaggctggagtgaagtggcacaatcatagctcaatgcaacctcaaactcctg

SEQ ID NO: 938551 - DNA, 659 bp, Homo sapiens
catggcccctgctatgaactgcgcgtgtgagggatcccagttgtgctccttatgagaatctaactaatgcctgaagatctgaggtgggacagtgtcatcctgaaaccatcctcctgccccccacccccaacatctgtggaaaccacaaaacctgtccctggtgccaaaaaggttggggatggctggactttataatcttcaggtagttatacagtggtgaatttgagacttaagtgtgtgtggggtgtgtgtgtgtgtgggtatgtgtgattaaagtatagaaatacctaacaattatccttttattaattcaacaagggtcaactaagtacatgttatatgcataatgtgaatgtagaaaaagaggagttttcataaacatgttcaaagggaggktaaactttaagcatgaagccaggcccagtggctcacacctgtaatcccagcactttaggaggccaaggtgggcggatcacttgaagtcaggggtttgagatcagcctggccaacatggcgaaaccctgtctctcctaaaaatacaaaaattagctgggcgtggtggtgggtgtctgtaatcccagctacttgggaggctgaggcaggagaatagcttgaacccgggacgtggaggttgcagagagctgagatagcaccactgc

SEQ ID NO: 938552 - DNA, 647 bp, Homo sapiens
aagcacaggatacagacagggacgatcgttcttttggccgtgatagaaatcgggattctgacaaaacagatacagactggagggctcgttctgccacagacagctttgatgactacccgcctagaaggggtgatgataggtttggagacaagtatcgagatcgttatgattcagaccagtatggccgtgggtattggtatgagtatcgggatggcccatgccgggatatggatcgatatggctggcggtagggatcgctatgatgaccgaggcagcagagactatgctagaggctatcattcctggataggcagtggcagaagggcatttggcagtgggtacccagggacaatgactacagaggaggcagggaccgctatgaagaccgatacaacagatgggatgatgggtcgtgcagctccagagatgatttctctcgggatgattrtaggtataatgatagacgtccccctcaaagacccaaactgaatctaaagcctcataatactcctaagggagatgattcttctgctagtacctcccagtccagtcgagcttcttttgtctttggaggggcaaagcccgttgatagagctgctagagaaacaaaagtagaagaatggctacagaaggaacaagataagttg

SEQ ID NO: 938553 - DNA, 734 bp, Homo sapiens
cactcaccaagactaaaaagcttacacttacttccctggaaagtgcttatttatttggcaactccagcatttaaaaaaaaaaaaaaaaaaaaaaaggtaaatcactccttgcctgaaatctcctcccttcccccaatataatgtcatctacttcctgtgcaggagagagcatttgctaaatccaggttgtctcatacttaactgccaataaaccaacttccacataacttccagacagctgggggaaaggtcctcggagttttagtcatggtccagaaacacgcgtccacacaaaaatttgcagctgtcctttctctacagtgcatttttaatgtgattcaggggggcctgttgtgaaacatctgacaaaatgtaaaatcctcttagataccttctagtttacccactgcacgtgtgtaagagaagttgcaccaggatttctccaccgagaaatctaggcactttttgcacacagccaggggcacctcgtgggatgtaaggaggcattcraaacctggaaagacttctactgtaatctttaaaagcacagcctctggtgcaactattaaaatgctagttttctaaagcaaatatttttttcaatggcgtgcagaactgcagcgatccagcacggcaaacagaacagcattcttgatctgcaagcccctggaaaccttccggtaactttttcacagcttgctaagaaacagaaagctgaccaacttccagcaatg

SEQ ID NO: 938554 - DNA, 592 bp, Homo sapiens
ggtgggggggtgggaggacaactgggaaggaccaccattaacccttcacactccaaggtctaaatcttttgtattagaaaggattatgttgtttcagtgaggaaaaaacgtccatttttcacaagccagaaagagaagttrcccggctaaataaaatcccaatgaataggcccctctcggtttcctttaaatgctggattccaagttcaaaaatgaattcaagatgcagcttatttatctgttcaacctagtagcaaagagctcggttgaaaagcaaataactttggataagagaagatgcaagggctcgaataatcaagtccttaaaaagaaatttcaaacctaactggaatttcaaccaccatattcctatttccactttgccaggagggaaaaagaaatgtaaaactactttttccaatcaactttaataggttacagtattcttatctttaatatacaaatgttaccacagttctaatatttgcagttctaacacttcccatctacttaactagacctctccttaatgcagttttgtatctgaatctgtctttttaaaagccattcctattactgaatcaaagactaa

SEQ ID NO: 938555 - DNA, 592 bp, Homo sapiens
ggtgggggggtgggaggacaactgggaaggaccaccattaacccttcacactccaaggtctaaatcttttgtattagaaaggattatgttgtttcagtgaggaaaaaacgtccatttttcacaagccagaaagagaagttgcccggctaaataaaatcccaatgaataggcccctctcggtttcctttaaatgctggattccaagttcaaaaatgaattcaagatgcagcttatttatctgttcaacctagtagcaaagagctcggttgaaaagcaaataactttggataagagaagatgcaagggctcgaataatcaagtccttaaaaagaaatttcaaacctaactggaatttcaaccaccatattcctatttccmctttgccaggagggaaaaagaaatgtaaaactactttttccaatcaactttaataggttacagtattcttatctttaatatacaaatgttaccacagttctaatatttgcagttctaacacttcccatctacttaactagacctctccttaatgcagttttgtatctgaatctgtctttttaaaagccattcctattactgaatcaaagactaa

SEQ ID NO: 938556 - DNA, 767 bp, Homo sapiens
gggtgcagtccaccccaggacctttgcatttgctgttcctcatgcctggaatattcttatcacagacatattcatggactgcctgccctctcatctccttcaggacttcactgacaaggtaaaaattgttacctaacctgattgatttatttattttattttatttttgagacaagagtcttgctgtgttacrcaggctggagtgcagtggtacaatcttggcttactgcaacctccacctcccgggttcaagtgtttctcatatctcagcctcccaggtagctggaactacaggtgtgtgccaccaccctgggctaatttttatttttatttttatttttatttttagtagagacggggtttcaccatgttagccaggctggtctcaaactcctggcctcaagcgatctgtctgcctcagcctcccaaagtgctgggattacagacatgagccattgtgcccggccacctaacctggtttaaagttgctactctcctcgtctctgaccctttctacctgctgccttgctttatttttcttcatcacactcatttccatttagcatactgtgtagtattatccatcttgtttgtggtcatttcctctcagtaaaacctcagttccaggaaagcagacatttctgcttgttttgtagacttctataaatctagaacttaaaactgtgtgtggcacaaagttggccttcattaaatctttgttgaatgaatgaatgaatgttctaaatcccaagcttcaactccgggtg

SEQ ID NO: 938557 - DNA, 824 bp, Homo sapiens
cgtggcctccatgacaaggctcctcaagagaacttcctgaggctgggccttcacagtgtgcttgagaaacaccctcgctcctgctgatcccagctctctggggccctcctctgtgaatgacatcctcacagaggggactctgtgctctggcacctcctgcactcagggaccccttccctggcaccaccctcagggctgctccccttggccagcctcctccgccaccataacgcagaccaggaggggagcaagcgatccctcatccttccttcaatcagcagggtcttgtggtgggctctggagccaccttaaaagcagtcccctgggccgggcgcggtggctcacgcctgtaatcccagcactttgggaggccaaggygggcggatcacgaggtcaggagatcgagaccatcctggctaacacggtgaaaccccgtctctactaaaaatacaaaaaattagccgggcgtggtggcgggcgcctgtagtcccagctactcgggagtctgaggcaggagaatggcgtgaacccgggaggcggagcttgcagtgagccgagatcgcgccaccgcactccagcctgggcggcagagagagactcagtctcaaaaaaaaaaattataataataaataaataaataataaaagagcagtcccctgttacctggggaatggaccggggcttatagatgccaaagaactctccagggtccacagccagcgcaccagcaatctgctctcacccaccactcgcttgctcaacagacatttgtggctgccaatgggccgggggctgtttgggggtatattcagctctgggcctgc

SEQ ID NO: 938558 - DNA, 824 bp, Homo sapiens
cgtggcctccatgacaaggctcctcaagagaacttcctgaggctgggccttcacagtgtgcttgagaaacaccctcgctcctgctgatcccagctctctggggccctcctctgtgaatgacatcctcacagaggggactctgtgctctggcacctcctgcactcagggaccccttccctggcaccaccctcagggctgctccccttggccagcctcctccgccaccataacgcagaccaggaggggagcaagcgatccctcatccttccttcaatcagcagggtcttgtggtgggctctggagccaccttaaaagcagtcccctgggccgggcgcggtggctcacgcctgtaatcccagcactttgggaggccaaggtgggyggatcacgaggtcaggagatcgagaccatcctggctaacacggtgaaaccccgtctctactaaaaatacaaaaaattagccgggcgtggtggcgggcgcctgtagtcccagctactcgggagtctgaggcaggagaatggcgtgaacccgggaggcggagcttgcagtgagccgagatcgcgccaccgcactccagcctgggcggcagagagagactcagtctcaaaaaaaaaaattataataataaataaataaataataaaagagcagtcccctgttacctggggaatggaccggggcttatagatgccaaagaactctccagggtccacagccagcgcaccagcaatctgctctcacccaccactcgcttgctcaacagacatttgtggctgccaatgggccgggggctgtttgggggtatattcagctctgggcctgc

SEQ ID NO: 938559 - DNA, 824 bp, Homo sapiens
cgtggcctccatgacaaggctcctcaagagaacttcctgaggctgggccttcacagtgtgcttgagaaacaccctcgctcctgctgatcccagctctctggggccctcctctgtgaatgacatcctcacagaggggactctgtgctctggcacctcctgcactcagggaccccttccctggcaccaccctcagggctgctccccttggccagcctcctccgccaccataacgcagaccaggaggggagcaagcgatccctcatccttccttcaatcagcagggtcttgtggtgggctctggagccaccttaaaagcagtcccctgggccgggcgcggtggctcacgcctgtaatcccagcactttgggaggccaaggtgggcggatcacgaggtcaggagatcgagaccatccyggctaacacggtgaaaccccgtctctactaaaaatacaaaaaattagccgggcgtggtggcgggcgcctgtagtcccagctactcgggagtctgaggcaggagaatggcgtgaacccgggaggcggagcttgcagtgagccgagatcgcgccaccgcactccagcctgggcggcagagagagactcagtctcaaaaaaaaaaattataataataaataaataaataataaaagagcagtcccctgttacctggggaatggaccggggcttatagatgccaaagaactctccagggtccacagccagcgcaccagcaatctgctctcacccaccactcgcttgctcaacagacatttgtggctgccaatgggccgggggctgtttgggggtatattcagctctgggcctgc

SEQ ID NO: 938560 - DNA, 572 bp, Homo sapiens
aatgtcaggggctccagaccagcgtggataaggtaagacttgggggctggtttcttgagattttttcctgtagttacacagattgcaatgtcagtagaccccagggagaccctgtctttctctgatttcccttgaaatcttttcttctttgccagaactcatgacttcatgcttaaaatgcaagttaccagtagttcataacaayacatggataatgtttatataagatgtttgttagtttcatgcctgtgactaccatagtgacctataatcaacctgagtctatacttcttgaacctaacaaaacgctgtgtattcctggaagggagagagaggctctgtctgcagcttctgggtggagcattttcttcctcctgaattcacctgtagagtcatccgtctcatttcctagcacaggattaactcccataatgactgacggcgaacgacagcatcttatacatccacattcactataacattgagtggaaggtttcatatgttatttattgctaaagagtttttcaggaagagaatccattgcacatactcagtgacattaaactagttgt

SEQ ID NO: 938561 - DNA, 699 bp, Homo sapiens
agctcaagggaaagcaataaatagagctcataaaatcctgcccttgaggtgtttacattctagtgggcagaaacaaccaatatggaagtaaacaagaaaaatctataatatgtaagggatgaataagtgattagaataatgataatgcaattaaggagaaccagatgttgtatatgtatagggtggtcaggagatacytttgataagaaagtatttgagatatgaagaaaatgtaaaagtgaactttggtatatctgatgtattagtttattttcatgctgcttttaaaagcatacctgagactgggaggaaaaagaggtttaatggacatacagtttcatgtggctggggtggcctcaaaagcatggcagaaggcaaggaggagcaagtcacgtcttacatgcatggcagcagacaaatagagagcttgtgcagagaaactccttcttataaaaccatcaggtcttgtgggacttattcactgtcataagtacagcacgagaaagaccggccgccatgattcaattacctcccaccggggccctcccacaacatgtgggaattaaagacgagatttaggttgggacacagccaaaccatgtcatctgggttggagcatttcaggaagaaagaacagagaacgccaaagactcacactggagcatgtttgtattgttttatgaacagcaaaaatgtcac

SEQ ID NO: 938562 - DNA, 699 bp, Homo sapiens
agctcaagggaaagcaataaatagagctcataaaatcctgcccttgaggtgtttacattctagtgggcagaaacaaccaatatggaagtaaacaagaaaaatctataatatgtaagggatgaataagtgattagaataatgataatgcaattaaggagaaccagatgttgtatatgtatagggtggtcaggagatacctttgataagaaagtatttgagatatgaagaaaatgtaaaagtgaactttggtatatctgatgtattagtttattttcatgctgcttttaaaagcatacctgagactgggaggaaaaagaggtttaatggacatacagtttcatgtggctggggtggcctcaaaagcatggcagaaggcaaggaggagcaagtcacgtcttacatgcatggcagcagacaaatagagagcttgtgcagagaaactccttcttataaaaccatcaggtcttgtgggacttattcactgtcrtaagtacagcacgagaaagaccggccgccatgattcaattacctcccaccggggccctcccacaacatgtgggaattaaagacgagatttaggttgggacacagccaaaccatgtcatctgggttggagcatttcaggaagaaagaacagagaacgccaaagactcacactggagcatgtttgtattgttttatgaacagcaaaaatgtcac

SEQ ID NO: 938563 - DNA, 699 bp, Homo sapiens
agctcaagggaaagcaataaatagagctcataaaatcctgcccttgaggtgtttacattctagtgggcagaaacaaccaatatggaagtaaacaagaaaaatctataatatgtaagggatgaataagtgattagaataatgataatgcaattaaggagaaccagatgttgtatatgtatagggtggtcaggagatacctttgataagaaagtatttgagatatgaagaaaatgtaaaagtgaactttggtatatctgatgtattagtttattttcatgctgcttttaaaagcatacctgagactgggaggaaaaagaggtttaatggacatacagtttcatgtggctggggtggcctcaaaagcatggcagaaggcaaggaggagcaagtcacgtcttacatgcatggcagcagacaaatagagagcttgtgcagagaaactccttcttataaaaccatcaggtcttgtgggacttattcactgtcataagtwcagcacgagaaagaccggccgccatgattcaattacctcccaccggggccctcccacaacatgtgggaattaaagacgagatttaggttgggacacagccaaaccatgtcatctgggttggagcatttcaggaagaaagaacagagaacgccaaagactcacactggagcatgtttgtattgttttatgaacagcaaaaatgtcac

SEQ ID NO: 938564 - DNA, 601 bp, Homo sapiens
gcccctagaggtagttgttaataattttgaaatattaaggtcttgccaagcttctgatgattcaaacctgtactactgattattaagcaggacagactgagctttctgctgcaaataccttggaggagaaagtaatttctaaatatacagagaggtaacttgactatatatgttgcatcctgtgcctcccttcatattaatatttgataaagattttaattcatataaaacttctaaagcagaatcaaagctcctcttggggaaatggcaagtctttaggacaggcgagaccctgtatgcatagtaccaaagcattaccacatggtagagaacacactcgattaaaaatgttaagctatctgaaaaataaaatatgcaagtcytcaggatggcacaaaacaaaggttaatactttttgggacacatttcttagcgggcttgctgagtgtgtaaatataatcaacttttgtttgtgttacatgactttgatgacttcattgaaaatctgcacaattcagtttcagctctggataacttcagttgacctttgtgaaggtttttatctgtgtagaatgggtgtttgacttgttttagcctatta

SEQ ID NO: 938565 - DNA, 581 bp, Homo sapiens
attatactaatgtataataatagaaagcaaataaaaagagtaaaagtttggagaaggttatgagttctatgtaaaactcttcataaaatattctactctttctacactatgataaggctcacaaaaatacataacataaaaatagtcatattttatccagtgggttttaaatatttatggaagtcctcatgattctctttaataatgacatttttgtatataaaatgtcaagtgatcacttccttaagcttatgttttcttgggctgacatggcccattaccacatgttcctgctgcaatccatccctgtctccttttgaggctgacagcagggtcaagggctccctgaagggcttgttccaytgggtgtgggacttcctgcccaagggccttgcctttcctgaaggaaaagtgaggctgtcccaaggggaaggaagaggagctcagagctagtagagaggcccactcccagggacatccatgcagggggtgaggcactgctgggatgcttctgatggggacagtccagccagcatgccattgcagccacagccatcccagggcagtgccagttgcaactc

SEQ ID NO: 938566 - DNA, 581 bp, Homo sapiens
attatactaatgtataataatagaaagcaaataaaaagagtaaaagtttggagaaggttatgagttctatgtaaaactcttcataaaatattctactctttctacactatgataaggctcacaaaaatacataacataaaaatagtcatattttatccagtgggttttaaatatttatggaagtcctcatgattctctttaataatgacatttttgtatataaaatgtcaagtgatcacttccttaagcttatgttttcttgggctgacatggcccattaccacatgttcctgctgcaatccatccctgtctccttttgaggctgacagcagggtcaagggctccctgaagggcttgttccattgggtgtgggacttcctgcccaagggccttgcctttcytgaaggaaaagtgaggctgtcccaaggggaaggaagaggagctcagagctagtagagaggcccactcccagggacatccatgcagggggtgaggcactgctgggatgcttctgatggggacagtccagccagcatgccattgcagccacagccatcccagggcagtgccagttgcaactc

SEQ ID NO: 938567 - DNA, 575 bp, Homo sapiens
tctggtcctgggctttttttggttggtagacaatttattactgcttcaatttgagaattctttattggtctattcagggattcagtttctccctggttcagtcttgggggtggtgtgtgtgtccacaaatgtatccatttcttctagattttccagtttatgtgcataaaagtgtttatagtattctctaatgtttgtttgcatttctgtgggatcagtggcgatatcccccttatcatttctgattgtgtctatttgattcttctctcttttcttctttgttagtcwagctagtggtctattaatttttaaaaaagaaagctcctggatttgttgaatttttgaagggtttttcgtgtctctatctccttcagttctgctctgatcttggttatttcttgtcttctgctagccttggggtttgtttgctcttggttctctagttcttttagtagtaatgttaggttgttgatttgagatctttctagctttttcacatgggcatttagtgctataaattaccttcttaacactgctttagctgggtcccagagatcctggaatgttgtcttttt

SEQ ID NO: 938568 - DNA, 621 bp, Homo sapiens
gaagaagggtttcctttttgctcatatgcttgctatgcctcccaacaatacaatatattcctcaactttccccaagtcccacgtcccatcacatcgggcagttccaagccatgggagtctgggcagacacaggagaatgcatgcttttttctctcgaagccttcatgggaaattcccagaattctatggcataaagctgtctattttgttcactctctatttccggagcctacgcagtacytggtacgtggtagacactcaatagcatttcttgaaggaataaatggaggactaaatgaagttttccagaggagacactcacatgccaaacatcctatgtccatgtccagatgcttccatttacctctgaagaaatttctcctgtttgtttttgtatctttcttccttgaagtggaaaaaaagtcaaaatggagaaatgacatttttgtcaaatcatgaggcatgaaagtaaaaggcccagagtgtgggaaatctgggaaggtgacgacgtttgatgcctgactcccctgccagggtctcatccgcagtgcctggctcctgaccacctctccatttttctttcctcctgcctgtctcttgcttccccatcccactcccctg

SEQ ID NO: 938569 - DNA, 593 bp, Homo sapiens
ggttgtacaacaagaaggcctggacaacgagaactctttgtctggattagttccaacgatgctttgttcctgaagtcaggaaataccttgccagtaagggagtgcctttcaaagttcctttgataatggacaatgcccctggccactcagagcctcatgccttcamcattgaaggtgttgagtggtctacttgccccgaagcacaatgtctctaattcagtctctagatcaaggagtcataggacctttaagcctcattacacatggtaccctttgcaaaggactgtcaatactgtggaagagagcccaagagaacatcatgaaggtctggaaggattacaacattgcagatgccattgttgttatagaagaagccatgaaagccatcaagcttgaaacaataagtttctgctggagaaaactgtgtccagatgttgtgcatgacttcacaggatttatgatggaaccaacccaggaaatcataaaagagactgtggataaggcaaaaaaggtggaagatgaagggtttcaagatatggatcttgtttctccaattatccaattctatagctaatagacaccacatcagagaa

SEQ ID NO: 938570 - DNA, 593 bp, Homo sapiens
ggttgtacaacaagaaggcctggacaacgagaactctttgtctggattagttccaacgatgctttgttcctgaagtcaggaaataccttgccagtaagggagtgcctttcaaagttcctttgataatggacaatgcccctggccactcagagcctcatgccttcaacattgaaggtgttgagtggtctacttgccccgaagcacaatgtctctaattcagtctctagatcaaggagtcataggacctttaagcctcattacacatggtaccctttgcaaaggactgtcaatactgtggaagagagcccaagagaacatcatgaaggtctggaaggattacaacrttgcagatgccattgttgttatagaagaagccatgaaagccatcaagcttgaaacaataagtttctgctggagaaaactgtgtccagatgttgtgcatgacttcacaggatttatgatggaaccaacccaggaaatcataaaagagactgtggataaggcaaaaaaggtggaagatgaagggtttcaagatatggatcttgtttctccaattatccaattctatagctaatagacaccacatcagagaa

SEQ ID NO: 938571 - DNA, 647 bp, Homo sapiens
ctgtcactctgtatgaacagtccataacccttcggccaccctccacctatgcgctggaacccaaatgcwctcacctactccagaacatcatttgtcccctgtctcttctgctgcatcatcaacttctacttttgactatattattcccacatacaaacatgctgcaattctcccatttcaggggaaaaaagtttctctttaccccacttcaccaccagctaccatcccatcttctggtcccctttatgataaaactatgaaaagcataatttatatcagtgctgtccagtagccatataatgtgagccacatctgtcattttaatttttctagtagccacatgaaaaaaatttaaaaagaaacaaatgaaattaattttaataataaatttttggagttattttcagatataggccatttttatgccccagttctgtacagccccaatttctcctccttccatcctcttttgaacccacgtctcagggttttgccttcaccactcaactgacactgctcttatcaaagtctccaataatttgctctatctagaggtcaattctcagcctatcacttgcttgacctgtcacactgtattagtcaatgttctctaaagggacagaactaattggacagatgaatgtatg

SEQ ID NO: 938572 - DNA, 647 bp, Homo sapiens
ctgtcactctgtatgaacagtccataacccttcggccaccctccacctatgcgctggaacccaaatgctctcacctactccagracatcatttgtcccctgtctcttctgctgcatcatcaacttctacttttgactatattattcccacatacaaacatgctgcaattctcccatttcaggggaaaaaagtttctctttaccccacttcaccaccagctaccatcccatcttctggtcccctttatgataaaactatgaaaagcataatttatatcagtgctgtccagtagccatataatgtgagccacatctgtcattttaatttttctagtagccacatgaaaaaaatttaaaaagaaacaaatgaaattaattttaataataaatttttggagttattttcagatataggccatttttatgccccagttctgtacagccccaatttctcctccttccatcctcttttgaacccacgtctcagggttttgccttcaccactcaactgacactgctcttatcaaagtctccaataatttgctctatctagaggtcaattctcagcctatcacttgcttgacctgtcacactgtattagtcaatgttctctaaagggacagaactaattggacagatgaatgtatg

SEQ ID NO: 938573 - DNA, 574 bp, Homo sapiens
agttattttcagatataggccatttttatgccccagttctgtacagccccaatttctcctccttccatcctcttttgaacccacgtctcagggttttgccttcaccactcaactgacactgctcttatcaaagtctccaataatttgctctatctagaggtcaattctcagcctatcacttgcttgacctgtcacactgtattagtcaatgttctctaaagggacagaactaattggacagatgaatgtatgaaggggagtttgttaggagaactgactcacatgatcacaaggttaaagtctcacaataggccatctgcaagctaagaagccaggaagccagtctgagtcccaaaacctcaaaagcaggaaagctgacagtgyagccttcagtctgtggccaaaggcccaagagcccctggcaaaccactggtgtaagtccaagagtccaagaacttggagtctgatgtttgagggcaggaagcattcagcacaagagaaagatggagaccagaagactcagccagtctagtccttccacgttcttctgcctgcttttatcctagccgtgctg

SEQ ID NO: 938574 - DNA, 594 bp, Homo sapiens
aagtcttacaattcttatgttcaatgtgtttcttagtgtgttgctcttttttatgctatggtaaattgaattattttattaattttattttcagattattcattgctactgtatagaaatgcagtgttgcatgttgatcttgtattctgcaacctcactgattttacttactgattctaatagctttttagtagatttcttatggttttctataygcaagatcatgtcatctgtaatatattgtgtatgatccttgaagttttactgttagtttagtggttagcttatgattagacagaggtttccataattacctcaaacaagtaagtctccctgcctttgccaagtgagctctacgtgcatgttggagcacactttcaatgcttttgcaggcagtttacaactctaccgtgccttcactccctgcttgccggaagcctcaaggtcagacagaggtgacagattagggccatcttaggtattacctgggcatacacacaacactgagcatgcatgtcaccttctagatttccaggaatatgtcagagcttttcaaagcccaatgtggatatcttattttccaaactttccttt

SEQ ID NO: 938575 - DNA, 594 bp, Homo sapiens
aagtcttacaattcttatgttcaatgtgtttcttagtgtgttgctcttttttatgctatggtaaattgaattattttattaattttattttcagattattcattgctactgtatagaaatgcagtgttgcatgttgatcttgtattctgcaacctcactgattttacttactgattctaatagctttttagtagatttcttatggttttctatacgcaagatcatgtcatctgtaatatattgtgtatgatccttgaagttttactgttagtttagtggttagcttatgattagacagaggtttccataattacctcaaacaagtaagtctccctgcctttgccaagtgagctctaygtgcatgttggagcacactttcaatgcttttgcaggcagtttacaactctaccgtgccttcactccctgcttgccggaagcctcaaggtcagacagaggtgacagattagggccatcttaggtattacctgggcatacacacaacactgagcatgcatgtcaccttctagatttccaggaatatgtcagagcttttcaaagcccaatgtggatatcttattttccaaactttccttt

SEQ ID NO: 938576 - DNA, 787 bp, Homo sapiens
ggtgacctgggaatcaatctgtgaggtggggggggcctgttagcaggactacattttgctttgctgagttttattctttttttccctttcacccaataaaatcctgctctactcacccttcaatgtgtccacgtgcctaaattttcctgatcgtgtgacaagattctggttttagctgaactaaggagcaaaattctgctacattttggcacccagatgtaggacttgaggaagagtaagatgcaaaccaaaaacttttttccttttgcttctaagcctttttgtcctcgaacttctgaaggtagagaaaactatgcctccctccccccccaaccactgttgctcccaggggttgggaatgtcagccttttccttctttttctggatagacaggcaaactrgcagctcccctgctcccctcttaagtttctctccctgttggaagaacccacttgcatttaagagtaagaggttcttcctccaggtgtctttccaaccctgcactttaaactttttccttttctctaccctgtcagcagttaacttttaagtaagagttttttcttttttctttttagaagacattttactaggccagaaatgataaggatcattgtttatattctctgtaaagttttaactatgaaaaaggatctgtaaggtttgtcttaagctgtagccaatctggtgtgctttgcatgactttctgtatagtcagcagcaaacttcgctgcaggcctccatcttgttttacatccttgagagcatgacctgtaaccatgtggca

SEQ ID NO: 938577 - DNA, 779 bp, Homo sapiens
ctgttagcaggactacattttgctttgctgagttttattctttttttccctttcacccaataaaatcctgctctactcacccttcaatgtgtccacgtgcctaaattttcctgatcgtgtgacaagattctggttttagctgaactaaggagcaaaattctgctacattttggcacccagatgtaggacttgaggaagagtaagatgcaaaccaaaaacttttttccttttgcttctaagcctttttgtcctcgaacttctgaaggtagagaaaactatgcctccctccccccccaaccactgttgctcccaggggttgggaatgtcagccttttccttctttttctggatagacaggcaaactggcagctcccctgctcccctcttaagtttctctccctgttggaagaacccayttgcatttaagagtaagaggttcttcctccaggtgtctttccaaccctgcactttaaactttttccttttctctaccctgtcagcagttaacttttaagtaagagttttttcttttttctttttagaagacattttactaggccagaaatgataaggatcattgtttatattctctgtaaagttttaactatgaaaaaggatctgtaaggtttgtcttaagctgtagccaatctggtgtgctttgcatgactttctgtatagtcagcagcaaacttcgctgcaggcctccatcttgttttacatccttgagagcatgacctgtaaccatgtggcaatgttttgtttagcccattttacaatgg

SEQ ID NO: 938578 - DNA, 648 bp, Homo sapiens
tgggcctgcagcacctttgactggctataaatggggttcccgtaatgcccttctcaggttcaataattggttagaatggctcacagaattcatgaaagtgatttatttaccattaccagtttattataaaagatattatcaagaatataaatgaatgrccagataaagaggtatataaaaaaggtccagaaggttctaagcacagtagcttctgtccctttcgagttggggtgcaccaccctcctggcaggtggatatgttcaccaatggagaagctctctgaaccccattgtttagggtttttatggtggttccattacacaggcatgatttattaggtcaacagccattagtgattaactcaatctccagcccctctcccctccctggtgggtgggggagtgggactgaaagttacaacctgctgatcacatggttggttcctctgacaaccagccccatcttgaagctacaaagaggccctccaggagtcacctcattagcataaattcagatgtgttgaaaggggcttattatgataataaaagctattccttttgctcctgtcactcaggaaattccagggattttagaagctcttgtgtcaaagactattgtaacaagagatgctctataacccctatcact

SEQ ID NO: 938579 - DNA, 536 bp, Homo sapiens
aacaaaccttccacaccctagaagaggacccgagcaggttgccaatgctcgctggggcagcctgcttttattctcttatctggccccacccacatcctgctgattggtagagcccagtggcctgttttgtcagggcrctgattggtgcgtttacaatccctgagctagatacaaaggttctccacgtccccatcagattagttagatacagagtttggacacacaggttctccaaggccccaccagagcagctagatacagagtgtcgattggtgcattcacaaaccttgagctaaacacagggtgctgattggtgtgtttacaaaccttgagctagatacagagtgccgattggtgtatttacaatccctgagctagacataaaggttctccaaggccccaccagagcagctagatacagagtgtcgattggtgcactcacaaaccttgagctaaacacagggtgctgattggtgtatttacaatccctgagctagatataaggactctccacgtccccaccagactcaggagcc

SEQ ID NO: 938580 - DNA, 776 bp, Homo sapiens
attaccagaaccagaagtggaaaaggggagattacaatcaatcttatacaaataaaaggttcataaagaatactataaccaattgtatgccactaaattggataacttagatgagatggacaaattcctaggaagacacaaactactgaaactgacttaagaaatagacaatctgagtagacacataacaaataaagagattgaatttacaattttttaaaaaactaagactatgttttcagggatcatttctatggtttgttactagagaagtttatctgaatgtgtggagcaccaacggtctcaaattaatgatctaacatcacacctagaggaactagaaaaacaaraacaaactaactccaagactagtagaagaaaagaaataactaaaatcagagcagaactgaatgaaattgagaaccaaaaattcacctaaaggatcaaagaaaccaaaagttggttctctgaaaggataaataagattgataggccactagctagattaacaaagaagagagaagatcaaataatgataatcagaaatgacaaaggtgacattacaaccaatcctacagaaatacaaaatattctcagacacttttatgaacatctttctgcacacaaactagaaaatgtagaggaaatggataaatttggggaaacacacaacctcccaagattcaatcagatagaaattgaaactttgaacataccaatattgagttacaaaattgaatcagtaataaaaaacatagtaaccaaaaaagccctgt

SEQ ID NO: 938581 - DNA, 776 bp, Homo sapiens
attaccagaaccagaagtggaaaaggggagattacaatcaatcttatacaaataaaaggttcataaagaatactataaccaattgtatgccactaaattggataacttagatgagatggacaaattcctaggaagacacaaactactgaaactgacttaagaaatagacaatctgagtagacacataacaaataaagagattgaatttacaattttttaaaaaactaagactatgttttcagggatcatttctatggtttgttactagagaagtttatctgaatgtgtggagcaccaacggtctcaaattaatgatctaacatcacacctagaggaactagaaaaacaaaarcaaactaactccaagactagtagaagaaaagaaataactaaaatcagagcagaactgaatgaaattgagaaccaaaaattcacctaaaggatcaaagaaaccaaaagttggttctctgaaaggataaataagattgataggccactagctagattaacaaagaagagagaagatcaaataatgataatcagaaatgacaaaggtgacattacaaccaatcctacagaaatacaaaatattctcagacacttttatgaacatctttctgcacacaaactagaaaatgtagaggaaatggataaatttggggaaacacacaacctcccaagattcaatcagatagaaattgaaactttgaacataccaatattgagttacaaaattgaatcagtaataaaaaacatagtaaccaaaaaagccctgt

SEQ ID NO: 938582 - DNA, 595 bp, Homo sapiens
agaaaatatttgcaaatcatatatttgataagggatgttcatctagaaggtataaaaaacacacttcaaaaataaagaggcaagtaagccaatttaaaaattagccaaaggatcaaaacagacatttttctgaggaaaatatgcaaattgycaataaacacatgaaaaggtgattgacatcattagtcatcaaggtaatgtaaatcaaaaccactatgagtgaccagtgcacaaccagcagggtggctagaatccaaaagtcagataataacaggcgttggtggggatggatagaaactggaaaccacacacactgctggtgggaaagtaaaatggcagaaagcaaactgccagttcctaaaatgattaaacatgaatttaccagatgacccagcaattccacttctaagaatatattcaagagaaatgaaaacatatgtccacacaaaaacttgtacatgaattttatatcagcattagtcataaaagccaaaagctgcaaacaatccaaatgtgaatcaactgatgaatggataaacaaaatgtggtatatccttacactggaatgttatttggctgtaaagagacatgaagt

SEQ ID NO: 938583 - DNA, 595 bp, Homo sapiens
agaaaatatttgcaaatcatatatttgataagggatgttcatctagaaggtataaaaaacacacttcaaaaataaagaggcaagtaagccaatttaaaaattagccaaaggatcaaaacagacatttttctgaggaaaatatgcaaattgtcaataaacacatgaaaaggtgattgacatcattagtcatcaaggtaatgtaaatcaaaaccactatgagtgaccagtgcacaaccagcagggtggctagaatccaaaagtcagataataacasgcgttggtggggatggatagaaactggaaaccacacacactgctggtgggaaagtaaaatggcagaaagcaaactgccagttcctaaaatgattaaacatgaatttaccagatgacccagcaattccacttctaagaatatattcaagagaaatgaaaacatatgtccacacaaaaacttgtacatgaattttatatcagcattagtcataaaagccaaaagctgcaaacaatccaaatgtgaatcaactgatgaatggataaacaaaatgtggtatatccttacactggaatgttatttggctgtaaagagacatgaagt

SEQ ID NO: 938584 - DNA, 631 bp, Homo sapiens
tgagtctggtggggacgtggagaacctttatgtctagctcagggattgcaaatacaccaatcagcactctgtatctagctcaaggtttgtaaacacaccaatcagcaccctgtgtctagctcagggtttgtgaatgcaccaattgacactctgtatctagctgctctggtggggccttggagaacccttatgtctagctcagggattgtraatacaccagtcggcactctctgtatgtagctcaaggtttgtaaacacaccaatcagcaccctgcgtctagctcagggtttgtaaatgcaccaatcgacacttctgtatctagctactctggtggggacttggagaacctttgtgtccacactctgtatctagctcatctggtggggaggtggagaacctttgtgtctagctcagggattgtaaacgcaccaatcagtgccctgtcaaaacagaccacttggctctaccaatcagcaggatgtgggtggggccagataagagaataaaagcaggctgccggagccagcagtggtaacctgcactggtgcccttccatgctgtggaagctttgttttttgcaataaatgttgctactggttactctttgggttcacactgcctttatgagct

SEQ ID NO: 938585 - DNA, 631 bp, Homo sapiens
tgagtctggtggggacgtggagaacctttatgtctagctcagggattgcaaatacaccaatcagcactctgtatctagctcaaggtttgtaaacacaccaatcagcaccctgtgtctagctcagggtttgtgaatgcaccaattgacactctgtatctagctgctctggtggggccttggagaacccttatgtctagctcagggattgtgaatacaccagtcggcactctctgtatgtagctcaaggtttgtaaacacaccaatcagcaccctgcgtctagctcagggtttgtaaatgcaccaatcgacacttctgtatctagctactctggtggggacttggagaacctttgtgtccacactctgtatctagctcatctggtggggaggtggagaacctttgtgtctagctcagggattgtaaacrcaccaatcagtgccctgtcaaaacagaccacttggctctaccaatcagcaggatgtgggtggggccagataagagaataaaagcaggctgccggagccagcagtggtaacctgcactggtgcccttccatgctgtggaagctttgttttttgcaataaatgttgctactggttactctttgggttcacactgcctttatgagct

SEQ ID NO: 938586 - DNA, 630 bp, Homo sapiens
tctataatctagacttttttttttttagacaggatctagctctggcaccaacactggagtgcagtggctcaatcatggcttcactggaacctctgcctcccaggctcaaggaatcctcccaccatggcctcctgaatagctgggaccataggcatatgccaccatgcccggctaatttttacattttttgtagagatggggttttgccatgatgcccaggctagtctcaaactcctgggcacaagtgatctgcctgtctcagcctcygaaagtgctaggattacaggcatgagccaccgtgccagcctagacttctctatctaatctatacttccataatcgaatgcttttttactttgttgctcagactgttccagctttggccactgacagcagtttcagttggctcctatgtccatttgacatactcttatgacttttggtttttcagttggaattcttccatacactctaccatataaaatgttctaggttcaccttgtatatattctggcccaatcctagaatcaagcatttctccaaaaagcctggattttactggaaaatggtcttagaaaccaagatccaggcttaagtgtactcgttgctaatggagtgtcacttcttgta

SEQ ID NO: 938587 - DNA, 750 bp, Homo sapiens
cgccgcctggccctgcagctggaggcgggacgcgcctttcctcctcccgggctgaccgtcctagccccccgccagacaaaacgacctcacccagcgggcgccttccactagagagcaccacccaccccgccccaccctgttttggtttcgccgccgcagtcgaagcggctgagtggctgcgtttccctttcaagccgtagagggttcctctgccggtggctggaagctggagcgccgcagccaccagactccctacttcctttaccctcctctgcgctaggcatagtttcctacaccctgatctgacaygttcggtgtcacacaagcaaatacaggggactgctagcttcgggtcacttccgtctctgtggagtgagagttatttcacctctgtaagaaacggtgtttactgtcatactatgtgcattctgataagtcatttgcatgccacgggtcctcaaaaagggtgccttgctccttaacttgtctgcccccgaacacccacacatcaatgttacttggaaaacttttccaagttattgctaggttctgagaaacataaaaatcttgaagatccttttcaggaatcgctagctgatgaaaaagggtttcaggaaggtaatattctgggctgctgggtagaaaaccaaagaaagtgagctcacgtggcccccagcctccgctgggtaaaccggcattcgatcagacaggcaatgactttcggggccgactttatcaatgtggcctcca

SEQ ID NO: 938588 - DNA, 612 bp, Homo sapiens
taagtgagaggaatcactttaccagacactaaggcttagtatgtagctacagtaatcaaggcaatggggtattgtagagggatgaacacatagataaataaaacaaaataaaaaaattagaagtatacccaggaaaatatgctcaactgatttctgacaaaaatttaaaaaaatgattaaatggataaaggatcacctcttcaccaaatggtgctggacatccatgagcaaaaaaatgaaaagaaataaattaagcctaagcctcaacatcttatacaaaaattgacctaagatggatcatgaacataagtataaaatataaaaccagaaawtatttagtgaaaaacagaaaaaaaatcttcaggatctagaactaggtgaataattcttaggtttgataccaaaggatgatctatacaaggaaacaacaacaacaaaaaagatcattacaacctcatcgagatgaaaaactttgctctgtggatgaagctgtacagaagatgaaagaaaagctggacactgagagaaattattaaaattacatatgcaataaaatgattgtatccagaatatataaaaaagtttctaaactcaatgataagaaaacaatct

SEQ ID NO: 938589 - DNA, 555 bp, Homo sapiens
tccagaatatataaaaaagtttctaaactcaatgataagaaaacaatctaattagagaatggacaaaatacataaacagaaatttaaacaaagatttacagatggcaaataagaacatgaaaaaaatgttcaacatcattagctaccaggaaatacaaattaaaacctaaattaaatacaatgacaaatttatcagaatggctataataaaaataatgacaacaccaaaggttggtgaaggtacagaaaaactggattgctcatatgttgctgttgggaatgtaaaataagactatggaaaatagttttaaagtttcttattcraatgaaacgtgcaattgacctataacccagcaattgcactttatttcccagagcaatgaaaatttgtctttatttttttttaatgtatacaattttttaggagttttacttctaatagtcaaaaattggaatcagcctagatgtctttcaagaggtgaacagttaaataaactgtggtatgccaataccatgtgtgaaggttaattttttatgtcaacttgtctgggccat

SEQ ID NO: 938590 - DNA, 604 bp, Homo sapiens
caactctttgcctggagtccccagagtccgccgtatcattcttatgcctttgcatcccatagcttagctcccacttatgagtgagaacatacgatgtttggttttccattcctgagttactccatttagaataatggtctccagttccatccagtttgctgcaaatgccattattttgttcctttttatggctgaatagtattccatgttttatatrtcacatatccatgtgatatatatatatatatatatcacatatccatgtgatatatatatatatatatatatatcacaatgtctttattcactcattgattgatgggcatttgggctggttccatatctttgcaattgcaagttgtgctgctataaacatgtgtatgcaagcatctttttcatataatgacttttttcctctgggtagatatccagtagtgggattcctgggtcaaatggtagttctagtttcaattctttaaggaatctccacactgttttctatagtggttgtactagtttacattccacgagcagtgtaaaagtgttcccttttcactgcatcctcaccaacatctattattttttgattttttgattatggaca

SEQ ID NO: 938591 - DNA, 602 bp, Homo sapiens
gatcagagtctgtgattagatctgtttctccaggaaaagtcaaagttgggaataattttaaatgagcacatagaaatatgtattatgtgtagaagcggatgaaaaaccagcgtagggccaggcgcagtggctcacgcctgtaatccctgcactttgagaggctgaggcaggtggatcacgaggtcaagagatcgagaccgttctggccaacatggtgaaaccccgtgtctaataaaaatacaaaaattagctgggtgtggtggcgtgtgcctgtagtcccagctactcgggaggctgaggcaggagaatcacttgaacctgggaggcggaggtggcagtgagccgagatcgcaccactgcactccagcctgttgacaaagygagactctgtctcaaaaaaaaaaaaacaaaaacaaaacaaaccagcatgggagaaatatgtattaaatgtagaagcagattaaaaaccagcgtggggccagatgcagtcactgacacctgtaaatccagcactttgggaggccgaggcaggagaatcatttgagcctaggagtttgagaccggcctggacaacacagcaagaccccgcctctacaaaaact

SEQ ID NO: 938592 - DNA, 602 bp, Homo sapiens
gatcagagtctgtgattagatctgtttctccaggaaaagtcaaagttgggaataattttaaatgagcacatagaaatatgtattatgtgtagaagcggatgaaaaaccagcgtagggccaggcgcagtggctcacgcctgtaatccctgcactttgagaggctgaggcaggtggatcacgaggtcaagagatcgagaccgttctggccaacatggtgaaaccccgtgtctaataaaaatacaaaaattagctgggtgtggtggcgtgtgcctgtagtcccagctactcgggaggctgaggcaggagaatcacttgaacctgggaggcggaggtggcagtgagccgagatcgcaccactgcactccagcctgttgacaaagcgagactctgtctcaaaaaaaaaaaaacaaaaacaaaacaaaccagcatgggagaaatatgtattamatgtagaagcagattaaaaaccagcgtggggccagatgcagtcactgacacctgtaaatccagcactttgggaggccgaggcaggagaatcatttgagcctaggagtttgagaccggcctggacaacacagcaagaccccgcctctacaaaaact

SEQ ID NO: 938593 - DNA, 676 bp, Homo sapiens
gctgggatttgacaccatagcaaagtataagaagctcagggtagccttttaggtttgagagattgaaaaataattttagtatttagaatgtaaagaaaagcacttctttcttccttctttttttaaagacaaggtcttgctatgttgcccaggctggagtgcagtggcgtgataacagctcactgcagccttgaactcctggggctcaagcaatcctcctgggtagctagaactatgcttatcactatgcctggctaactttttcttttcttttctcttttcttttctttctctctctctttctttctctttctttctttcattcttttctttcttcctttctccctctctctctctccctccctcccacctttctttctctctctttctttctcattctctctcttttttctttctttctttctctccccctccctccttccctccstccctccctcacttctttctttctttctttctttctttctttctttctttctttctttctttctttctttctttctttctttttctctctctctttctttctccctctctctccttctttctttctttctttctttctttctttccttctttctttctttctcactttcttcttttttttgagacagggtctcactatgttgcccagtcttatcttgacttgtcttga

SEQ ID NO: 938594 - DNA, 766 bp, Homo sapiens
cacccggagttgaagcttgggatttagaacattcattcattcattcaacaaagatttaatgaaggccaactttgtgccacacacagttttaagttctagatttatagaagtctacaaaacaagcagaaatgtctgctttcctggaactgaggttttactgagaggaaatgaccacaaacaagatggataatactacacagtatgctaaatggaaatgagtgtgatgaagaaaaataaagcaaggcagcaggtagaaagggtcagagacgaggagagtagcaactttaaaccaggttaggtggccgggcacaatggctcatgtctgtaatcccagcactttgggaggctgaggcagacagatcgcttgaggccaggagtttgagaccagcctggctaacatggtgaaaccccgtctctactaaaaataaaaataaaaataaaaataaaaattagcccagggtggtggcacacacctgtagttccagctacctgggaggctgagatatgagaaacacttgaacccgggaggtggaggttgcagtaagccaagattgtaccactgcactccagcctgygtaacacagcaagactcttgtctcaaaaataaaataaaataaataaatcaatcaggttaggtaacaatttttaccttgtcagtgaagtcctgaaggagatgagagggcaggcagtccatgaatatgtctgtgataagaatattccaggcatgaggaacagcaaatgcaaaggtcctggggtggactgcacc

SEQ ID NO: 938595 - DNA, 777 bp, Homo sapiens
tttagtctttgattcagtaataggaatggcttttaaaaagacagattcagatacaaaactgcattaaggagaggtctagttaagtagatgggaagtgttagaactgcaaatattagaactgtggtaacatttgtatattaaagataagaatactgtaacctattaaagttgattggaaaaagtagttttacatttctttttccctcctggcaaagkggaaataggaatatggtggttgaaattccagttaggtttgaaatttctttttaaggacttgattattcgagcccttgcatcttctcttatccaaagttatttgcttttcaaccgagctctttgctactaggttgaacagataaataagctgcatcttgaattcatttttgaacttggaatccagcatttaaaggaaaccgagaggggcctattcattgggattttatttagccgggcaacttctctttctggcttgtgaaaaatggacgttttttcctcactgaaacaacataatcctttctaatacaaaagatttagaccttggagtgtgaagggttaatggtggtccttcccagttgtcctcccacccccccacctcacccctgattgttttgacaacacttttcaaagtgtgacattccaagcccctacataacaatgtaatattactgtaattacacaggtcattacattttaaatagagaacaataaaatgcttatcgccctgaaaaagaacaggtgttcttacccttctttggtatttatgctaattgtttttca

SEQ ID NO: 938596 - DNA, 777 bp, Homo sapiens
tttagtctttgattcagtaataggaatggcttttaaaaagacagattcagatacaaaactgcattaaggagaggtctagttaagtagatgggaagtgttagaactgcaaatattagaactgtggtaacatttgtatattaaagataagaatactgtaacctattaaagttgattggaaaaagtagttttacatttctttttccctcctggcaaagtggaaataggaatatggtggttgaaattccagttaggtttgaaatttctttttaaggacttgattattcgagcccttgcatcttctcttatccaaagttatttgcttttcaaccgagctctttgctactaggttgaacagataaataagctgcatcttgaattcatttttgaacttggaatccagcatttaaaggaaaccgagaggggcctattcattgggattttatttagccgggyaacttctctttctggcttgtgaaaaatggacgttttttcctcactgaaacaacataatcctttctaatacaaaagatttagaccttggagtgtgaagggttaatggtggtccttcccagttgtcctcccacccccccacctcacccctgattgttttgacaacacttttcaaagtgtgacattccaagcccctacataacaatgtaatattactgtaattacacaggtcattacattttaaatagagaacaataaaatgcttatcgccctgaaaaagaacaggtgttcttacccttctttggtatttatgctaattgtttttca

SEQ ID NO: 938597 - DNA, 644 bp, Homo sapiens
catgaatgacacagtaactatctggaccagggaactcatgaccaaccaactacttcaaaggaaacaaatggtcatagatatccttaacactgggaaggcaacagtaccaaagacagaaattctggaaaaattagtcaaaatatacaagaccacactggatgtcatctttgtatttggattcagaacttattttggtggtggcaagatagctgactttggtgtgatttatgatttttttggattatgtaaaaaaccatgaacccaaacatagacttgcaagacatggcctgcctccatgagaagaaaaagacctcaagaaagcagtgagacraatgcaagaatagaatgaaaaagctcagggggttggcaaaggccaatgttggtgctggcaaaaagccaaaggagtaaagatgctgcaattatgttatctgcagacattgtgtggattaataaactaaaaactttcaagtgaaagaaaggcatcctactgctgccacttagaccttgaaatgccccagaatcaggtggagagattagaactaggtaaccacagtgggactcaggtggtggataacacgattgcaaatgaggatggtttacagaagcaagattggaatgtactgagccaaatcaaagagccttaa

SEQ ID NO: 938598 - DNA, 755 bp, Homo sapiens
gcattacaaatgtttcctctatcttgtctttaacctgttcatgatagctttggttaggcatacattaatttaaatgacagatctatcaatcgtttaccttatgttttgtactttctgcttctcatgtaaggaatcttattttttaaacgatattatttctctacaaccataaagatattcttctatwttttctattgaaatcttgtagttttaattctcatattaaatctttaatctacttaagatttattttatataatgtgagttaaggattgaattttaatttttccttttggttatgtcacagcataaattattaaacagcccatcctttctgcactagttatagtgctgcctctgtcatagatcaagttttcatatcagtccatttctacactctctatcctgctccattgatgtcttcatccttctctaagccaatttcacattgtcttcattattatgggttgagataacctaactatctggtatgtgagcctcccaaccttttttgtttgtttgtttgtttgttttttgttttgttttgttttttgagacagtcttgctctgtcaccaggccagagtgcagtggcgcgatcttggctcactgcaagctccacctgccgggttcaagcgcttctcctgcctcagcctccgaagtagctgggattaaaggcgcctgccaccacgcccagctaatttttgtatttttagtagagacggggtttcaccatattggccaggatgatcttgat

SEQ ID NO: 938599 - DNA, 712 bp, Homo sapiens
ggccagagaaacaatgcaaggggactcctgggttttggctaagtagttttgggggagcaggtgaagacgtggggatccctggcccagccaggagctgccctagtataggcccagccccaagggttgtgtggggcagtctggaggttttggcctgggaaggggtcgggggaaggctgtataaaaagcttgaaagtgcggaacaggttggtggacctgaactccacctcctcgagtgggccccctgtatccacacccttcccagtcctgagcccagagttattctaaactcccgctgctgggagaggggaactgggaaccactaaatggcagaacagcacccttttccggccatatcacctgggccagaaaaaaaaaaaagagggggcccagagaaaagcgggctgtttctggggcaccgcggaggccgcagatcasaatccagctttttacaatagagcggaagcgaacctggctcagggcgattccggggcgggctaggcctgcgggtctctctgcctggtcccccggggcttttctgtcgcgcggaggcttcctgtcgcgggccctggtcccccctagcccccttccgggatgggcgagctcccgtcttcaagcccaagttaatgaccagggactttgaactttttggagatctgcaaagggctggcccctcggggacagtgacgccccccaccccctcccctgagcccgg

SEQ ID NO: 938600 - DNA, 658 bp, Homo sapiens
ataaagaatcatgggacttttgctcatggcagagcttactcttgggtctgcactaggtaatgatcaggcagtactgtgtctggaatttattccttccagtgggttcttgatctcgctgacttcaagaatgaagccgcggaccttcgcggtgagtgttacagctcttaaaggtggcgtgtccagagtttgttccttcagatgttcagatgtgtccggagtttcttccttccagtgggtttgtggtcttgctgacttcaggaatgaagccacggaccttcacggcgagtgttacagctcttaaaggtggtacagacccaaagagtgagcgagcagcaagatttattatgaagagcgaaagaacaaagcttccatgctgtggaaggggacccgagtgggttgctgctgctggctcaggtggccagcttttattcccttatttggccccacccacatcctgctgattgttgtgcttacagtcctttagctagacacagagcactgattcgtgcatttttacagagygctgattggtgtgtttacaatcctttagctagacacagagcactgattggtgcgtttttacagaatgctgattggtgcatttacaatcctttagctagacacagaaaagttctccaacttcccactcgacccagga

SEQ ID NO: 938601 - DNA, 576 bp, Homo sapiens
ccagttatagtctcattaattcaacagccttcattgattgcctcctgcatgccaggaactgtgctttgcccggtggcttccagagaatgacaagtgaacaatgataatgacataatttatgtggcaaaaatgcaactcctaaggagtgcctctctcaaattgagttactttttcactattgaataaattgtaatttgaaaggctagtaaaagtgccctcttttggtgagccatgccaatcaatacgtgccattttcaatgcttcattctgcttttctcctattcakgcagactggagaaaaagcaagcatttgaaggctgaggttactgagttaggtttcttaatacagtgaggttttttttttttcttttttttgtttttgagtgatttgtttctgaagaatagacagcctagggcagcaggctaagtggactgctttcctggacccccaaccccccaaacccccacccaacagtgggcttgcctgtccactggtcatggaggcagggtgagggggatagggaatagcctctgccaaaatcttctgggagatgcagatactctgatggccccagg

SEQ ID NO: 938602 - DNA, 562 bp, Homo sapiens
  misc_feature 90: n = A,T,C or G
atttcaatacatgtaaaaattgtgggatgatcacatcagagtaattagcatatccaccatctcaaatatttattgtttctctgtggtgangacattaaaaaccctctcttttagctcttttgaagtatacaacacattattattagctwtagtcaccttgccgtgcagtagaacaccaggacttactcctcctatctagctgtaacttcgtacccattgataaattatccctcctttctggttcaccccccgccccttccccaagactgtggtaaccacgattttaccctctacttctagaagttcaacttttttagattccacatataagtggatcatactgtatttgtctctctgtgcctggcttatttcacttaacataatatctgctaggttcatccttgtcacaaatgatagaattccctatttttttaaaggctgaatagtactccattgtgtatatacatcaaattttaaaaacccattcatctgttgatgaacatttagattgtttctataccttggctaacatgcatactgctgcaatggacgtgggagtata

SEQ ID NO: 938603 - DNA, 665 bp, Homo sapiens
atggaagactccttctatttgagaaaagcagagggaaacataaaggaggctttgtcttgcaccttaggtaccagttcagccacagaggggtagagcaccaagagggttcttgggggagtcctcgagtccaggcttaggctcttgacagcatttctggatctgccctgggccagaggggagcccactgccctgaagggtgagttctaggcctggcagcattcaccgcaagctgacagaagaatgcttgagctttatgtgatcatcagccgtggcctggcagaaacccccatgaacaggtggtggtggtggctataggagaggctcctctgcctgtkgaaagggaagggaagagttgaaagggcttgtattatggtttgaatgccaggttagctacagtagaatagaacatcaggtaggccaggcgcagtggctcacacctgtaatcccagcactatgggaggccgaggtgggtggatcaccaggtcaggagttcaagaccagcctggccaacatagtgaaaccctgtctctaataaaaatacaaaattagccgggcgtggtggcggacgcctgttatcccagctactcaggagactgaggctggagaatcacttgaatctgggaggcagaggttgtagtgagctgagattgcgccattgtactcca

SEQ ID NO: 938604 - DNA, 665 bp, Homo sapiens
atggaagactccttctatttgagaaaagcagagggaaacataaaggaggctttgtcttgcaccttaggtaccagttcagccacagaggggtagagcaccaagagggttcttgggggagtcctcgagtccaggcttaggctcttgacagcatttctggatctgccctgggccagaggggagcccactgccctgaagggtgagttctaggcctggcagcattcaccgcaagctgacagaagaatgcttgagctttatgtgatcatcagccgtggcctggcagaaacccccatgaacaggtggtggtggtggctataggagaggctcctctgcctgttgaaaggsaagggaagagttgaaagggcttgtattatggtttgaatgccaggttagctacagtagaatagaacatcaggtaggccaggcgcagtggctcacacctgtaatcccagcactatgggaggccgaggtgggtggatcaccaggtcaggagttcaagaccagcctggccaacatagtgaaaccctgtctctaataaaaatacaaaattagccgggcgtggtggcggacgcctgttatcccagctactcaggagactgaggctggagaatcacttgaatctgggaggcagaggttgtagtgagctgagattgcgccattgtactcca

SEQ ID NO: 938605 - DNA, 613 bp, Homo sapiens
agcaggaaggagttttgctaaaagcttatgcaatttttatgagataagctcttctaagttgactgatgttgccttggcttgcctaaattatgaaataaatactgcagaagatgagcaaaggagaagagtgacaagaaattgtctttttcaagatatttatactctgttgcaccgatctagttgaaacaygtgattcctcaaagcttgagtatatagaacaccttcctaaaagtatgggaagacttgctttacccagaataaatgttcattgtaaaaaacctgtcctataggagtattgtaattaaaagaaatcattcttctgaaactttttagaattcagatgtgtctttaagtctgttgggcttctgcccactaggagacattagtgtggggaatgggtaacattttggaaagaatgaatctgaaggagacactctaggcctgttcaatattaacattacagtctaaaagcaaagtagagggataggtctcatttagatggtctttcaatccagaccctatggacttctgatgaaatctgaaattacagtgaggatgccattactaaaagtaaaaatgagaagaactgtttccataaacatcatcttaaggc

SEQ ID NO: 938606 - DNA, 628 bp, Homo sapiens
ttagggcaataaagctgggtgcggtggctcatgactacaatcccagcactttgggaggctgaggtgtaaggatctcttgatccaggagtttgagatcaacctgatcaacatagcaagacctcatttctataaaagaagcatatatattagctggggatgatagtgcaaacctgtgatcccagttacttaggagtttgaagtgggagaaccagttaagcccagttggtcagggctgcagtgagttgtcatcatgccactgccctccagcctgggcaacagcgtragaccctgtctcaaataataataataataataataataataataataataataataataataacaattatattggatcctcatatatttttatttaactaaagtatttacagcctttaggaataaaaattatagatatttcctcagagatcaaatttatagaaatgatatttgacagatttgctaatataaataggattgaatagtttagcaaataaaaatgtaggacaccagttaagtttgaatttcagaaaaacttcaaataatttttgtataagtatatttcaaatattgcatgggacatactgaaaagactgcaaagcagttgtgtttgcttaaaacaaaa

SEQ ID NO: 938607 - DNA, 705 bp, Homo sapiens
tttttgttatgcaaatcaagcaacactcaagtcaacttcccctccatcttggtcctaagaaatttataatctattagccatcaccataggtctgtggtcaaggctcactgattgccactcttgtcttactgcccattatagtaatcatgttccttttacctctgataactaatgctgmtaccagcctcagttgttatataataacgccatccccattgatattgggatccaagttctatgaccttcagaggacaaccacagccaaaggtctcaaagatattggaggttcccttcaccagtgcttactgctttagagaatggatttttccctcttgcctctcagggacatagtcaggggtctcaggtgctaattcagttctaagatttccaccacactaagccttctgaccttcttcaatactctgccaaaaaaagttctggcattactaccttacttactgtaggccactgcatatccaagtttcaaggagttatctcaacaaattattaagactagctatagacatactcgttagaacactgaactgggtgaaatccctatgaattctctcttacccaacccatatgcttcacctcaccccagttaaccccctcaagatcccatcctgcatgtaatcccatgttcctgctggtgtgtgtgtgtattcattaatatatatatattcatattcatatatatgtata

SEQ ID NO: 938608 - DNA, 765 bp, Homo sapiens
ggccacagtaagcttccataattttggatgtttaggaccagtaacaggactaactaactttggtcgaggtgatgaaattcccttttcaccccatttccagggatagggtgattctagccttctataaacctggtccagcctttcaattaaatcactatcataggccggattaatgggccagatggatggggcctgtaaacatgagtgagtctggcccatacaattatatataatataattgtatataatataatataatatataactattatataatattatagtagttccaaattcattgttttgtaataccaccgcagtattagccacacattcttcccaaactaaggcttctgggctttttgattctttgggaatttccttggggcaaggcttccccttaggcccagattttaatgatctttgataagaagsgtcctctaaattatttatctgtggcccgagtgacattccacttaccatgtgataagtaaatttactggtggcactgacggtaggtacttctaccaaccagttttgggttgtaggcattaaacatcctggtgccttccctaggcaaataggaggataatgatacccagtggaaacatttatcatcattccttcttctttaggttgggcagggcaacaatcgtctgtggggcctggtacccatgccctattattaacatatacttcaacaggattatccatccatgtgactgcccaaattaagggtgggaaaggcacataggcacagtaagt

SEQ ID NO: 938609 - DNA, 765 bp, Homo sapiens
ggccacagtaagcttccataattttggatgtttaggaccagtaacaggactaactaactttggtcgaggtgatgaaattcccttttcaccccatttccagggatagggtgattctagccttctataaacctggtccagcctttcaattaaatcactatcataggccggattaatgggccagatggatggggcctgtaaacatgagtgagtctggcccatacaattatatataatataattgtatataatataatataatatataactattatataatattatagtagttccaaattcattgttttgtaataccaccgcagtattagccacacattcttcccaaactaaggcttctgggctttttgattctttgggaatttccttggggcaaggcttccccttaggcccagattttaatgatctttgataagaagcgtcctctaaattatttatctgtggcccgagtgacattccacttaccatgtgataagtaaatttactggtggcactgacrgtaggtacttctaccaaccagttttgggttgtaggcattaaacatcctggtgccttccctaggcaaataggaggataatgatacccagtggaaacatttatcatcattccttcttctttaggttgggcagggcaacaatcgtctgtggggcctggtacccatgccctattattaacatatacttcaacaggattatccatccatgtgactgcccaaattaagggtgggaaaggcacataggcacagtaagt

SEQ ID NO: 938610 - DNA, 611 bp, Homo sapiens
gacagtccaacgctccaggtccctcttgctgtcagacagcaccaggtcaccagacctaaatgccccaacaatgcctgagtctgcagtgctgagagggtacccgtgtccagcttgggaggcccaccttttcactccaaggtcacactgcaggtccccaggcctttggccccrgatgtacctgtcccttaactttcccttaaaatcaaatcttaggttcttacaaaccaccccaataaactcaaaactcgtgttatgaaattcctttactagtaaatatgctgtcacttggagacattttgcttactccaggctgtacattggttaaaggccttccactcatccttgccgtctcttcttgaggaatcacctgctgcagacttggctaatcataaaccaaggggaaaaaagtcagaattcacaacagtgttcactttaaaagtttaaaaaaaaaatgtgagaggagaggtgggtattacaatttacctcatccgcgtgattattcacttgttgaattgaaattgaagggaaatttgcgacttgcacaaagacaggaacctctgctggagacttccatctggggagcagatttataagcctttggagatgcggaa

SEQ ID NO: 938611 - DNA, 611 bp, Homo sapiens
gacagtccaacgctccaggtccctcttgctgtcagacagcaccaggtcaccagacctaaatgccccaacaatgcctgagtctgcagtgctgagagggtacccgtgtccagcttgggaggcccaccttttcactccaaggtcacactgcaggtccccaggcctttggccccagatgtacctgtcccttaactttcccttaaaatyaaatcttaggttcttacaaaccaccccaataaactcaaaactcgtgttatgaaattcctttactagtaaatatgctgtcacttggagacattttgcttactccaggctgtacattggttaaaggccttccactcatccttgccgtctcttcttgaggaatcacctgctgcagacttggctaatcataaaccaaggggaaaaaagtcagaattcacaacagtgttcactttaaaagtttaaaaaaaaaatgtgagaggagaggtgggtattacaatttacctcatccgcgtgattattcacttgttgaattgaaattgaagggaaatttgcgacttgcacaaagacaggaacctctgctggagacttccatctggggagcagatttataagcctttggagatgcggaa

SEQ ID NO: 938612 - DNA, 611 bp, Homo sapiens
gacagtccaacgctccaggtccctcttgctgtcagacagcaccaggtcaccagacctaaatgccccaacaatgcctgagtctgcagtgctgagagggtacccgtgtccagcttgggaggcccaccttttcactccaaggtcacactgcaggtccccaggcctttggccccagatgtacctgtcccttaactttcccttaaaatcaaatctkaggttcttacaaaccaccccaataaactcaaaactcgtgttatgaaattcctttactagtaaatatgctgtcacttggagacattttgcttactccaggctgtacattggttaaaggccttccactcatccttgccgtctcttcttgaggaatcacctgctgcagacttggctaatcataaaccaaggggaaaaaagtcagaattcacaacagtgttcactttaaaagtttaaaaaaaaaatgtgagaggagaggtgggtattacaatttacctcatccgcgtgattattcacttgttgaattgaaattgaagggaaatttgcgacttgcacaaagacaggaacctctgctggagacttccatctggggagcagatttataagcctttggagatgcggaa

SEQ ID NO: 938613 - DNA, 611 bp, Homo sapiens
gacagtccaacgctccaggtccctcttgctgtcagacagcaccaggtcaccagacctaaatgccccaacaatgcctgagtctgcagtgctgagagggtacccgtgtccagcttgggaggcccaccttttcactccaaggtcacactgcaggtccccaggcctttggccccagatgtacctgtcccttaactttcccttaaaatcaaatcttaggttcttacaaaccaccccaataaactcaaaactcgtgttaygaaattcctttactagtaaatatgctgtcacttggagacattttgcttactccaggctgtacattggttaaaggccttccactcatccttgccgtctcttcttgaggaatcacctgctgcagacttggctaatcataaaccaaggggaaaaaagtcagaattcacaacagtgttcactttaaaagtttaaaaaaaaaatgtgagaggagaggtgggtattacaatttacctcatccgcgtgattattcacttgttgaattgaaattgaagggaaatttgcgacttgcacaaagacaggaacctctgctggagacttccatctggggagcagatttataagcctttggagatgcggaa

SEQ ID NO: 938614 - DNA, 667 bp, Homo sapiens
agggcttgacattcggaaggcagaatatgctgactcatctcagactccaggtcttcttggactggccacctgacatgaactcgaaaattcctgcctactggatggaggagaccaagagagagtgcctccacatggtcacaaagtcatgctctcaaggacataaaacaagatgagagggaaacctcatttggtttttgtttcagggacccacagccacgtttgtgaccagtctgctgggtgggtttgaacagtgggctgataagggtcctaggcccacgctgtatcattcagtatctctctttatgacagaacracacagaaagacaaattcatagcacaaattgcaccagatttgctacagcctaagactagcctcacaaatcctttttagagacaggaatttttacggtttaccagtttgcacagagagagagagagagagagagagagagagagagagagaccaaaagactttctggtaagaaattcttacccttttgccagcatgccaggttcctggagtccctttccctgagtggctctggtgaccctgcttgccgcaccataatcacaaagaaaaatcacctttttctgtttcatggaagcataggcaaaagcttctcaatcttgcaagatgccgcccaatgggctgcatgggggaactgag

SEQ ID NO: 938615 - DNA, 576 bp, Homo sapiens
tgaactggggtttcaggattgccccagcaccaggtcagttcccacagactcaggttccacgccttccccaggaccaacccagacccagtggccctgtactcagggcttgcccagtgtcaggctggtctccacagctccactatccaagctagactctgctggccttccagcagacccagggtgtaagcccatcycaagacctcactgctgaatcagtccctgtggagccaggctccaggccaatcctcacagcttcaggctccagaaaacccagcttcttaagagcaaaagactgaaatttccccctaatatagaaaacaaagcaaggatacccacctttatcactcttatccaacatagtcctgaaagttctagttagtgtgataatgtgagaatacaaaatgaaagtgatacagaacagaaaggaagaaataaaattgtccctatttgcagatgtcaaaattagctatctagaatatcccaaggaatccataaaaaatcccctacaacaaataagtgagttcggaaaaggtgacaggatacaagaccaatatccaaatatcaattgtatttatg

SEQ ID NO: 938616 - DNA, 446 bp, Homo sapiens
tcccgagatatgtaaagagataccatataatagagatgtaggcctcagttcaaatgtctttaacactctactttcagcattagacaaatctttcagacagaaaatcaagaaagaaacatcagagttaatcttcactatagaacaaatggatctaatagatatttacagaacatttcatccaggatctatagaatgcacatttttttttctgcagcacatagattattctcaattatagaccatatgttaagacacaaaacaagccttaaaamattcaagaacttgacataatatctagcattttctttgaccacaatgcaataaaatttgggattaataacaagaggaattttgaaaactatacaaatacatacaaattaaacaatatgctcctgaatgaccagtgggtcaatgaagaaactcagaagaaaggtaaaaaatttctt

SEQ ID NO: 938617 - DNA, 514 bp, Homo sapiens
ccgacgggacagaggcagccctgagcatcaggcaagtccctgagatggaacaaagggaaggtggagcctcgacccggctcaggggtgggtgtcactgggtagcggcccggtgctggggagctggggcccatggcttcatcaacggaggtagcatctctagagtgagggaggggatgagcttctctccacgccaggcagggcatgtagggccccgaagcccaagcacacttcccaccacaaggcgcagagagagggggctgcacggatctgttgctgaagacgracgccgggctccctgaagcggcaggagggggctgtgccgtgggagtggcaacaggcccatggtggacagaggcatgtcctggcatgggcctttcccccaactgttcccccaaagtctcccccctaccctggctgctgggagggctgggggctctgggagggggtccccaccagtcttgttctctgcgagaactcagggaccctgggtatccgctgtccagcaggcctggct

SEQ ID NO: 938618 - DNA, 583 bp, Homo sapiens
agtgacgcagaagacaaacgatttctgcatttccaactgaggtactgggttaatctcactggggattgttggacagtgggtgcaggacagtggatgcagcacaccaagcatgagccgaagcagggtgaggcattgcctcacctgggaagtgcaaggggtcagggaattccctttcctagccaaggaaaggggtgacagacggtacctggaaaatcgggtcactcccaccytaatactgcacttttccaatggtcttagcaaacggcacaccaggagattgtatcccacgcctggctcagagggtcccacacccacagagcctcgctcattgctagcacagcagtctgagatcaaactgcaaggcggcagcgaggctgggggaggggtgcctgccattgctgaagcttgagtaggtaaacaaagcagccaggaagcttgaactgggtggagcccaccgcacctcaaggaggcctgcctgcctctgtaaactccacctctgggggcagggcacagccaaacaaaaggcagcagaaacctctgcagacttaaatgtccctgtctgacagctttgaagagagtagtg

SEQ ID NO: 938619 - DNA, 580 bp, Homo sapiens
ccttgggtatcataaactgattgtgtgatgcttatgcaagggattttctcctccctgagactctgggtcatcatctgttaaatgggtataataagtactgaagtgagtcaaatagtgccccgccccaaaattcatgtccacccggaacctcagaatgtaacacttggaaataggatctttgcggatataatttgttaagatgagatcatactgggtgagagtgggccccaaatccagtgactggtgtctttataagggaaagagagggcatgcagatatacacacagaggaaactccatgtgaatctggaggcagaatttggaatgattcatttacaagtcaagaaatgttacacattgctagcaaccacgagaagctaggagaaaggcatggaacggattckccctcaaagcctccagaaggaaccaaccctgccatctgtaatttcagacttcaggactcctgaactgtgagagaacaaattgctattgttttcaaccacgtaatttgtgagaatttgttatagctgccctaggaaatcaatacacctaccttctgaggctgttatgaggatttccaa

SEQ ID NO: 938620 - DNA, 580 bp, Homo sapiens
ccttgggtatcataaactgattgtgtgatgcttatgcaagggattttctcctccctgagactctgggtcatcatctgttaaatgggtataataagtactgaagtgagtcaaatagtgccccgccccaaaattcatgtccacccggaacctcagaatgtaacacttggaaataggatctttgcggatataatttgttaagatgagatcatactgggtgagagtgggccccaaatccagtgactggtgtctttataagggaaagagagggcatgcagatatacacacagaggaaactccatgtgaatctggaggcagaatttggaatgattcatttacaagtcaagaaatgttacacattgctagcaaccacgagaagctaggagaaaggcatggaacggattctccctcaaagcctccagaakgaaccaaccctgccatctgtaatttcagacttcaggactcctgaactgtgagagaacaaattgctattgttttcaaccacgtaatttgtgagaatttgttatagctgccctaggaaatcaatacacctaccttctgaggctgttatgaggatttccaa

SEQ ID NO: 938621 - DNA, 592 bp, Homo sapiens
tgcacgtagttctagaagacatgtcaagctatggcagagctccctgagggcagggtttgccttcaagaactattcatcagtacttgtcagttgtgggctgtcattactgcccttcctaggggctaagaatgtcaccagggaggcttttgtgtttccgggarggctccaaataccgcaccctgaaacatgacctccgaaacatgacctctgaacctcagaaggcttctgaagtttttcttttttttttttttaaatgtttctttctttctggttttttttttttttttttggagacaaagattccctcttgttgcccaggctggagtacaatggcgagatctcggctcaccgcaacctccacttcccgggttcaagcaattctcctgcctcagccttctgactagctgggattacaggtatgtgccaccatgcccagctaattttctattttcagtagagacagggtttctccatgtcggtaaggttggtctcgaactcctgacctcaggtgatccacctgcctcggcctcccaaagtgctgggattacaggcatgagccaccgcgccggaccggtttctgaagttttaacaa

SEQ ID NO: 938622 - DNA, 544 bp, Homo sapiens
gatggctcacacctaagaccccacactctgggacaccaaggtgggaggatcgctggagctcaggagtttgagaccagcctggacaacatggtgtgaccctgtctacagaaaatttaaaaattagccaggcattgtggtgcacacctgtggtcccagcctctcaggaggctgaggtgggagtatcgcttgggcccaggagatcaaggttgtaataagccatgattgcaccactgcactctagcctggtgacagagtgagaccttgtctctaaataaataatgataaataaataaataataaataacagacaaaaaaggacaacaactagaacaaatgtctacagaaatgtcttaatgtctacagccatgcctccrtggggctgtcaggctgctgtcacggaagtgcaggaagctggccctccaccagaaagtcatccggctggtgtgacaccaaagcttactgatggggacaagccattcaacgctgtcactgctatgtttccacagccttgcaacctgcaggtcaccctcagaacaagcccttt

SEQ ID NO: 938623 - DNA, 636 bp, Homo sapiens
gacaagaggatcacttgagcccaggagatcaaggctgctgtgatctgtgttcataccactgaatgaacgagaccttgtttttttttttgttttttttttttaaaaaaaaaaaaaaggacgtgtgtgtgtgcgtttacatctatagaaagactatatatggaaggggaaatggtaagacaatcggggaaatgataaatgaaaaatggtgcaaatatgaactgggtaaaggatatacragttctttgtactcttcttataatctttctgtaactttatattaaaataaaattttaaaaaataataataaatcaatgaaattcaccacattagtacactaagaaaaaataaactgttaaaaagcaggccgggcacagtggctcatgcatgtaatcccagaactttgggaggccaaggtgggcacatcacttgagtccaggagttggagaccagcccaggcaacatggcgaaaccctgtttctacaaaatacacaaaaattagccaggtatggtggtgcatgcctgtattcccagctattcaggaggctgaagtgggaagactgcttgagctcaggaggtcaaggctgcagtgagctgaaattgtgccactgcactccagactgggtgacagcaagacac

SEQ ID NO: 938624 - DNA, 638 bp, Homo sapiens
gcccatttttaaattaggttatgattattattattttgctattgagttgtgtgggttccttatatattttggatattaactcatcagatatatggttcacacatattttctcctgatcaataggttaccttttcattytgttgattgtttcctttgctctgcagaagctttttgtttgatgtagtctcacaggaatgatgtattttttgacaattttttcctccctgctttgttttctttacttcatattaaattttttctaaaatatccagtagcctttggctatctgagcatatttaagatttgcacattaaaaagcaaattatttggaaggccagggtgggtggatcacttgaggccaggagttcgagaccagcctggccaacagtgcaaaaccccgtctctactaaaaatacaaaaaaaaaaaaaaattagcccggcgtggtggtgcattcctatagtcctagctactccggaggctgaggcacaagactcacctgaacctgggagacagaggttgcattaagctgagatcaccccactcaagcactccagcctgggcaacagagtgagtctgtgtcaaaaaagcaaaaacagaaaacaaaaaacaaaagctaattaatgctgtgtgcatgtgt

SEQ ID NO: 938625 - DNA, 638 bp, Homo sapiens
gcccatttttaaattaggttatgattattattattttgctattgagttgtgtgggttccttatatattttggatattaactcatcagatatatggttcacacatattttctcctgatcaataggttaccttttcattttgttgattgtttcctttgctctgcagaagctttttgtttgatgtagtctcacaggaatgatgtattttttgacaattttttcctccctgctttgttttctttacttcatattaaattttttctaaaatatccagtagcctttggctatctgagcatatttaagatttgcacattaaaaagcaaattatttggaaggccagggtgggtggatcacttgaggccaggagttcgagaccagcctggccaacagtgcaaaaccccgtctctactaaaaatacaaaaaaaaaaaaaaattagcccggcrtggtggtgcattcctatagtcctagctactccggaggctgaggcacaagactcacctgaacctgggagacagaggttgcattaagctgagatcaccccactcaagcactccagcctgggcaacagagtgagtctgtgtcaaaaaagcaaaaacagaaaacaaaaaacaaaagctaattaatgctgtgtgcatgtgt

SEQ ID NO: 938626 - DNA, 763 bp, Homo sapiens
atagtcccagctattcaggaggttgaggaaggaggattctttgagcccaggggtttggggctgtagtgtgctatgatggtgcctgtaaatagccattgcactcccgcctgggcaatatagctgactccatctctaaaaacaagcaaasaagcaaacaaagttgttcttctaaggatgacagagaaccatatgttatcttaaaaactggggaaatagtgcggtggctcacgcctgtaatcccagcactttgggaggccgaggcgggcggatcacgaggtcaggagaatgagaccatcctagctaacacggtgaaaccccgtctctacttaaaatacaaaaatattagccaggcgtggtggtgggcccctgtaatcccagctacttgggaggctgaggcaggagaatggcgtgaacccgggaggcagagcttgcagtgagctgagatcgtgccaccgcactccagcctgggagacagagcaagactccgtctcaaacaaacaaacaaacaaacaaaaaaccaggggaaataggctgggcgcagcttatgcctgtaatctcagcactttgggctgatcatgaggtcaggagttcaagaccagcctgaccaacatggtgaaatcccatctgtatacaaaaaattagccaggcatgatggtgcgcacctgtgatcccagctccttgggaggctgaggcaagagaatcgcttgaacccgggaggtggaggttgcagtgagccgagattgtgccattgcactccagcctg

SEQ ID NO: 938627 - DNA, 763 bp, Homo sapiens
atagtcccagctattcaggaggttgaggaaggaggattctttgagcccaggggtttggggctgtagtgtgctatgatggtgcctgtaaatagccattgcactcccgcctgggcaatatagctgactccatctctaaaaacaagcaaacaagcaaacaaagttgttcttctaaggatgacagagaaccatatgttatcttaaaaactggggaaatagtgcggtggctcacgcctgtaatcccagcactttgggaggccgaggcgggcggatcacgaggtcaggagaatgagaccatcctagctaacacggtgaaaccccgtctctactwaaaatacaaaaatattagccaggcgtggtggtgggcccctgtaatcccagctacttgggaggctgaggcaggagaatggcgtgaacccgggaggcagagcttgcagtgagctgagatcgtgccaccgcactccagcctgggagacagagcaagactccgtctcaaacaaacaaacaaacaaacaaaaaaccaggggaaataggctgggcgcagcttatgcctgtaatctcagcactttgggctgatcatgaggtcaggagttcaagaccagcctgaccaacatggtgaaatcccatctgtatacaaaaaattagccaggcatgatggtgcgcacctgtgatcccagctccttgggaggctgaggcaagagaatcgcttgaacccgggaggtggaggttgcagtgagccgagattgtgccattgcactccagcctg

SEQ ID NO: 938628 - DNA, 520 bp, Homo sapiens
ggcacttatgtcctatggagaaatacatcaggtattatagggattcagttgtaggggattaatgaaaagactgcttagttaagcaagtagtctgtttatctaacttattctttgatctatttgattttaggtggtttggtttgtggggaccctgggtaagaatcrtacttcaaactcttggtattatcctcccgatagtcataatagaagtctccctggtgcgctgtgttctcttaaatattttaaatgtttgcacacagccatctctgaatgccaaatgatctctcttcaactggaatgacaagagctgaaagaaatgtatgaccacgaggacactttaatctgtgaatgacatgctgagatcggaaaccccaaatgatggtaactgagagtggtgcccaggccctaagttttagtcacactctcacctaagtgagaacctgaccaaaaagggggaattttttttttgaacaaaattacggaaggccattgctttggactgagctcatgcactaggccc

SEQ ID NO: 938629 - DNA, 654 bp, Homo sapiens
gactgagggttgagggaaagcactgcagattttccaggtgtatttttttttttttttgctccctggattttgcctgaaccctcacttttctctttcagggaactttaagcacacttagtgaaagactaaaggtcagagagcacaccagccacattccctgagtccaagcagggagccagagaggagtggtttctggccagccttccctgttcagttacctcatggaacccttgggaccagggccttgatttacaaatagagtggccacyaggtaaaagttgcccatggccagtggtagcaggatcgaccctagtgtctctgaatcattaagtacttcctttctgccctcttccatttcttactcaaaaacaccagctacaattttgagtctggtctgcctggaaatttccaaagggactttggtgccttaataaatattttcaaattgctcaaggttttggaagatagcagagccataattgtgaaatcgggttaaagaatgattgctgcagtacttgcgtcggccctgtggccatgctgaagtggacagggttgtggacactcacaattgctcactgcagatggacagcctttgcttttctggtcatacatatgcttgatcctgaaattctctagatgggctacttctgagca

SEQ ID NO: 938630 - DNA, 601 bp, Homo sapiens
ttataaattacccagtctcaggtacgtctttattagcagtgtgtgaacaaactaatacagtaaattggtactggtagagtgaggtgctactgtaaagatacctgaaaatgtggaagcaactttggaactggtgaacagggagaggctggaacagtttggagkgctcagaagaagtcaggaagatgtgggaaagtttggaacttcctagagacttgttgaatggctttgaccaaaatgctgatagtgatatggacaataaagtccaggctgacgtggtctcagagggagatgaggagcaaaggagactcttgttatgttttagcaaagagactggtggcattttgctcctgccctagagatttgtggaactttgaacttgagagagacgattttggggcatctggcagaagaactttctaagcagcaaagtgttaaagaggtgacttgggtgctgttaaatgcattcagttttatatattcacaaatatatggtttggaattataacttatctttaaaagggaagcagagcataaaagttcaaaaaatttaaagcctgatgttgcgatagaaaagaaaatctcattttctgaagagaaattc

SEQ ID NO: 938631 - DNA, 636 bp, Homo sapiens
ggatgctaagacacaagaactgcttgaaccctggaggcggaggttgtggtgagccaagatctcgccactgcactccagcctgggtgacagaggagtgagactgtctccaaaaaaaacaaaaacaaaaacaaaataggaagaaataccctgtaatccatccccacccccagccccacccaggccaggccagcatcttgtgatgaaggatgctggtcagtcaccgctgtgtgctgagtgaagagaaacaatgtcttatcatattatatattatatattatatattatatattatatatatatatcttttccccccscctttgagaccgagtctcactccgttgccccggctgagtgcagtggcacaatctcggctcactgcaacctccaccttccaggttcacgcgattctcccaccttagcctcctgatgaataatatttttatatgatatgaacactgagagctatcgaaggtgaaaagttttctttccagccctgacccctagcactttcctgcccaagagacaacgagagataccaatttcctgtgaatcattccggaggtgtcctgtgcttacaccagcatgtgtgtataaatgttctcttttcccttttccgcacgctggtgtcagagcgta

SEQ ID NO: 938632 - DNA, 582 bp, Homo sapiens
ggctgacgcgtgtaatcccaacattttgggaagctgaggtgggcagatcacctaaggtcaggagttcgagaccagcctggccaacatggtgaaatcttgtcactactaaaaatacaaaacttagccaggtgtggtagtgcatgcctataatcccagctactcaccaggccgaggcaggagaatcacttgaacctgggaggyggagattgcagtgagtcaagatggcgccactgcactccagactaggtggcagagtgaaactccatctcaaacaaacaacaacaacaaaaaaatgaagcacacctacaaatctagaaaattgcctcaaaagggcaaatctaacagtcattggccttaaagaggaggtagagaaagagatagaagtagaaagtttattcaaagggataataacagagaatttcccaaacctagagaatatcaatatgcaactataagaaggttatagaataccaagcagatttaacccgaagaaaactacctcaaggcacttaataatccaactctcaaaggtcaaggacaaagaaaggatactaaaagcatcaagagaaaacaaacaaataa

SEQ ID NO: 938633 - DNA, 623 bp, Homo sapiens
gccaagattgcactgttgcactccagcctgggtgacagagcgagactccatctcaaaaaaaaaaaaaaaaaaaaaaaaaaggataactacaacaactttcaacaacttttcaagacatagatagtataataagatatcatggaaacagcacaaagtcgaaaagtggcaaagaatgaagttaaagtgtacagtttatattagttctctctttgttarctactttgtttttgcaatcaatgttaagatgccatcagtttaaaataatgagttataagatgttattaatatttgcaatcctcatggcacccttaaattaaaaaaatctacaacagatacacaaaaaataaaaagcaagacattaaaatacacaaccagagaaaaccaccttcacataaagaaaaatagtaaaaaaaaaaaagaaggaaggaagagaaaacaataaaaaaaaaaaacagaaaacaaagaagaaaatgtcaggagtaactccttacttatcaataatagcattgaatgtaaatggactaaaccctccaattaaaaaacataaagtggctggatggattaaaaaaacaagacccagtgatctgttctctacaagaaacacattttacctataaaggcac

SEQ ID NO: 938634 - DNA, 623 bp, Homo sapiens
gccaagattgcactgttgcactccagcctgggtgacagagcgagactccatctcaaaaaaaaaaaaaaaaaaaaaaaaaaggataactacaacaactttcaacaacttttcaagacatagatagtataataagatatcatggaaacagcacaaagtcgaaaagtggcaaagaatgaagttaaagtgtacagtttatattagttctctctttgttagctactttgtttttgcaatcaatgttaagatgccatcagtttaaaataatgagttataagatgttattaatatttgcaatcctcatggcacccttaaattwaaaaaatctacaacagatacacaaaaaataaaaagcaagacattaaaatacacaaccagagaaaaccaccttcacataaagaaaaatagtaaaaaaaaaaaagaaggaaggaagagaaaacaataaaaaaaaaaaacagaaaacaaagaagaaaatgtcaggagtaactccttacttatcaataatagcattgaatgtaaatggactaaaccctccaattaaaaaacataaagtggctggatggattaaaaaaacaagacccagtgatctgttctctacaagaaacacattttacctataaaggcac

SEQ ID NO: 938635 - DNA, 627 bp, Homo sapiens
attgagaaggctgagaagacttagagtaagggttctcagccctgactggacattaaaattatctagggacaattcaatcagaattcctgggggtggggaccaagcatcagtattttaaagttccctggggactttaacttgaagcccaggttgagaatcatttaaacarctctgttatttatttatttaaaattttaatgtattttttgagatggagtctcgctctgtcacccaggctggagtgcagtggcgcaatcttggctcactgcaactcctgcctcccaggtccaagctattctcctgcctcagcctccccagtagctaggaatacaggcgtgcaccaccacaactggctaatttttgtacttttagtagagacagggtttcaccatgttggccaggctggtcacaaactcctgacctcaagtgatccacccacctcggcctcccaaagtgctgggattacaggcatgagccactgggcccggcctagttttactttttttttttgtaatggaatttccctctgtcacccaggctggagtgcagtgatgtgatttctgctctctgcaacctctgcctcctgcgttcaagtgattctcctgacttagcatcctgagtagctgg

SEQ ID NO: 938636 - DNA, 627 bp, Homo sapiens
attgagaaggctgagaagacttagagtaagggttctcagccctgactggacattaaaattatctagggacaattcaatcagaattcctgggggtggggaccaagcatcagtattttaaagttccctggggactttaacttgaagcccaggttgagaatcatttaaacagctctgttatttatttatttaaaattttaatgtattttttgagatggagtctcgctctgtcacccaggctggagtgcagtggcgcaatcttggctcactgcaactcctgcctcccaggtccaagctattctcctgcctcagcctccccagtagctaggaatacaggcgtgcaccaccacaactggctaatttttgtrcttttagtagagacagggtttcaccatgttggccaggctggtcacaaactcctgacctcaagtgatccacccacctcggcctcccaaagtgctgggattacaggcatgagccactgggcccggcctagttttactttttttttttgtaatggaatttccctctgtcacccaggctggagtgcagtgatgtgatttctgctctctgcaacctctgcctcctgcgttcaagtgattctcctgacttagcatcctgagtagctgg

SEQ ID NO: 938637 - DNA, 627 bp, Homo sapiens
attgagaaggctgagaagacttagagtaagggttctcagccctgactggacattaaaattatctagggacaattcaatcagaattcctgggggtggggaccaagcatcagtattttaaagttccctggggactttaacttgaagcccaggttgagaatcatttaaacagctctgttatttatttatttaaaattttaatgtattttttgagatggagtctcgctctgtcacccaggctggagtgcagtggcgcaatcttggctcactgcaactcctgcctcccaggtccaagctattctcctgcctcagcctccccagtagctaggaatacaggcgtgcaccaccacaactggctaatttttgtacttttagtagagacagggtttcmccatgttggccaggctggtcacaaactcctgacctcaagtgatccacccacctcggcctcccaaagtgctgggattacaggcatgagccactgggcccggcctagttttactttttttttttgtaatggaatttccctctgtcacccaggctggagtgcagtgatgtgatttctgctctctgcaacctctgcctcctgcgttcaagtgattctcctgacttagcatcctgagtagctgg

SEQ ID NO: 938638 - DNA, 627 bp, Homo sapiens
attgagaaggctgagaagacttagagtaagggttctcagccctgactggacattaaaattatctagggacaattcaatcagaattcctgggggtggggaccaagcatcagtattttaaagttccctggggactttaacttgaagcccaggttgagaatcatttaaacagctctgttatttatttatttaaaattttaatgtattttttgagatggagtctcgctctgtcacccaggctggagtgcagtggcgcaatcttggctcactgcaactcctgcctcccaggtccaagctattctcctgcctcagcctccccagtagctaggaatacaggcgtgcaccaccacaactggctaatttttgtacttttagtagagacagggtttcaccatgttggccaggctggtcacraactcctgacctcaagtgatccacccacctcggcctcccaaagtgctgggattacaggcatgagccactgggcccggcctagttttactttttttttttgtaatggaatttccctctgtcacccaggctggagtgcagtgatgtgatttctgctctctgcaacctctgcctcctgcgttcaagtgattctcctgacttagcatcctgagtagctgg

SEQ ID NO: 938639 - DNA, 644 bp, Homo sapiens
aacatgggtttgaactgcctgggtctacttatttgtaaattatcttctgcctctgtcacctctcagatgacaagaccaacccctcctccccctcaatgtgaagatgacaaggataaagacctttatgatgatccacttacacttaatgattagtaaatgtattttctctcctttatgaatttcttttttttttgaaacagggttttgctttgctgtgaagcctggaatgcagtggcatgatcttggctcactgcagccttgaccttctgggctcctaccacctcagtctcctgagtagctgagactacaggcgctcaccaccacacccagtgaatttctgcattttttgtagagatgaggtttcaccatgttgcccaggctggtcctgaactcctgggctcaagcaatctgcccactttagcctcccaaagtgctgggattacaggcaygagccaccatgcctggctctataaatttcttaataacatgttctttttcctagcttattttaagaatgaagtacagaatacatataacatacaaaacatgtatgtttggactgtttatgttaatggactaatggactgtttatgttattggtaattctggtcaggagcagactattagtcaagtttttggggagt

SEQ ID NO: 938640 - DNA, 575 bp, Homo sapiens
agcatgcctggacactctgcgtctgctctgacccccggtggcttgagttctagaggagacaggcagcattctcatcagagagttaggaacatcatggccttccttgttcctggggagaacatgctcttggccagtttgctgccaggattctgggcatggactgaatgccagcaggatctcccaggaaggactttaattgggcccmgggtacctgctgcactggcccaaacacttgtaatcagggtcagcaagaagactgtatagatgtgggtaaaggggatccaatttcttttactccctcccatgcttctctgaagctggtcgataattttttagaccaagttccttaagtattaggtgtactttgattcatacttaataactcccacagtgcccagtacaaagtggatgctcagaagtgtttaccagccaggcgtagtggctcacgtctgtaaccccagcactttgggaggccaaggtgggcagatgacctgaggtcagcagttcaagaccaatctgaccaacatggtgaaacactgtccctacaaaaatacaaaattagccaagcgtggtgg

SEQ ID NO: 938641 - DNA, 664 bp, Homo sapiens
acatactaaaattaggatggctattatgcttccaagtgaagttgttgattagtaagtggtatggactctagaaggtctggggaaaagcaccagcctgaagatgtaaatttggaagtaatctgtagattatattggaaatcatgaaaataaatgagaccctgaagaagttgagtgtagatataaatataaaggataagtattgraccttagagaatttcagctttaaaaattcaagatgatgaaaataaatgagaaaagatgactaagaagcagccaaccagagatgtaaaaggaaaaccaaataattgttttgttctggaaacagattaagaaactatggaacggtgtattgtgtcaaatactgttaatttgtcaaagaagatgcagatcaagaatgaatcattggtatatttcagccatctcctgtgctccacctacacatcctgctctctcccaccacccctaccaacaaaacccaaccactgatcaaccactgatttttttattgtctctatagtgttgcctcttccagaatgtcatatgaccactttcaaacaggcttctttcaataagcaatgtatatttaagtttcctctatgtgtttttgtgacttggtagtacactcctttactcattgactaacattgtattgtatgaatgtagg

SEQ ID NO: 938642 - DNA, 633 bp, Homo sapiens
aaatacaaaatatataaagaactctacaactcgccaattaaaaaatggggaaaggacttgaatagacatgtttctaaagaagatctataaataggcaataagcatatgaaaagatgctcaacatcactaatcattagggaaatgcaaatcaaaaccacaatgagatatcacttcacacctgttaggatggctataattaaaaaattggaaactaacaactgttggggaagatgtgggaaaatttgaacacttgtgcactactaggaggaatgtaaaatggtggtgccactgtggaaactggtatgkcaattcctcaaaaatatttaaacataattatcatatgatccagcaattccacctagatatctgtacacccatatttatagcagcattattcacaatatccaaaaggtgggagtgaccacgtctgttgaagatgattgaagaaataaaatgtgatatatacatataatgaaacattatgtagccttaaaaaggaaggaaattctaacatatgctataatatgagtgaaacttgaaagacattatacaagtgaaatcagccagtcacaaaaggacaaatattgtatgatttcacttacattaggtatttagagtagtcaaattcagagt

SEQ ID NO: 938643 - DNA, 567 bp, Homo sapiens
ttaaagtgctttacattctacaagtattttgttgggggcagggcatggattatcagccccatttcagtgataaggagaagcacacaaagagaaagtggctgtcctgaggtcacaggcagccagagttagcgtgtgaatgccatgtgttttccaagtccttagggcaactggagtctttcctgtggccaggagacagcctcccagaaccttaccctccacgcatttgacactctctctcccttctctgaccttcccccgacctgtggcatccttgggacttcctggaacttgggtttatccagttgatgtagaggggagagccctagagtgagaattcaggggcccaaggtcttttcttccctctttcttcttatttttttaaatagagaagggagcggkggggaggggcggcgtgggggagtgaggagggcctcaggcttatctcgaatccctggcctcaagtgaccctctcacctcaggcttccaaagtgctaggattacaggcatgagccactgcgcccagccagaggcccaagttctaatcatatctctgccacccacaggtgt

SEQ ID NO: 938644 - DNA, 593 bp, Homo sapiens
ctcattcatttaatcactcgagaaatagtcagtgggcatttactacttgccagcctgtggggatatggcagaaagcgcagcagagttcccacacttatggagctttcattctagtggaaggagaataagtgataaataagtaaaactggaatatgtcagacaacgataaatactaaggaggaaaataagggtcaggctgttagggtttgcaattttaaataggtgagaaggttctagagggaacagcaagtgccaaggacttgagaggggcaagtggctggagtgttggcttcagcacagcagggagcctggtgtggctgcactggagtgagaggtagraggtgaggtcagagggctaacggcactcagagagtgtaaagtcctgtaggcccctgcaaagacgttggtgttcatccaggatgagctgcaagcattggagggttttgtgcaaacgactgacaagatctgaattgtcttttaaaaggatcaccctgggtgctgtgttgaggatggacttagcggagtgagggtggacacaggtagaccaatgagaacctgcttcagacttccacgcatgagaccgtggggacttg

SEQ ID NO: 938645 - DNA, 619 bp, Homo sapiens
tctggcctgcattttcactgtccactcattcatttaatcactcgagaaatagtcagtgggcatttactacttgccagcctgtggggatatggcagaaagcgcagcagagttcccacacttatggagctttcattctagtggaaggagaataagtgataaataagtaaaactggaatatgtcagacaacgataaatactaaggaggaaaataagggtcaggctgttagggtttgcaattttaaataggtgagaaggttctagagggaacagcaagtgccaaggacttgagaggggcaagtggctggagtgttggcttcagcacagcagggagcctggtgtggctgcactggagtgagaggtaggaggtgaggtcagagggctaacggcactcagagagtgtaaagtcctgtaggcccctgcaaagacgttggtgttcatcyaggatgagctgcaagcattggagggttttgtgcaaacgactgacaagatctgaattgtcttttaaaaggatcaccctgggtgctgtgttgaggatggacttagcggagtgagggtggacacaggtagaccaatgagaacctgcttcagacttccacgcatgagaccgtggggacttgga

SEQ ID NO: 938646 - DNA, 597 bp, Homo sapiens
cctagatcctggccaggtgccctgaggctggcctagcagcccaagtgatctcacccctcctcacccctaaagctatcaacctgctacagtcctgtctaagcccacctgagagtaacctttggatggggttgggcccagcctggaccactagccggtgagtgaagacaaagcctgaactgaatcgggggtgaggggcatggaggcatcaggcaggacatcagaggtggccaggctctatgttgycacaaaccagaaatatttcagagctacttgggggactctacagagagttcccaactttttatttgtctaagtgccaacagtttattaacaaaagaaaagtgcacacttgccatcacccactactgaaacatgttatctcagaaaaaagaacagtttttcccaagaaaagggagatggcaaccttctactaaaatattttctcatttttgtcaaggacaaagtgaaaactttgtctcaatccagccccagatttaagaattactgacgtaagagatgctgcaaatgtaatatcagtaagacttggcaaccaatgagcctgaggttaagagagacagagatactccctgcaggggt

SEQ ID NO: 938647 - DNA, 752 bp, Homo sapiens
tttctcctcaaaaaatgggtttttcttttctactgcaatattaggctgcaaattttctgaacttttgtgctctgcttcccgttcaaaacagaatgtttttaacagtacccaagtcacctcttgaatgctttgctgcttagaaatttcttccaccagataccctaaatcgtctctctcaagttcgacgttccrcaaatctcaagggcaggggcaaaatgttgccagtctctttgctaaaacataacaggagtcacctttgctccagttcccaacaagttcctcatctgccccctctgagaccacctcaccttgggccttattgttcatatcactatgagtatttttgtcaaagccattcaacaagtctctaggaagttccaaactttctcacattttcctgtcttcttctgagccctccaaactgttccaaattctgcctgttacccaatttcaaagtcatttccacattttcaggtatcttttaagcaacaccccactctcagtaccaatttactggattagtccatttttatgctgctgataaagacatacctgagactaggaagaaaaataggtttaattggacttatagttccacgtggctgcggaggtctcagaatcatgacgggaaacgaaaggcacttcttacatggcggaggcaagagaaaatgaggaggaagcaaaaatggaaacccctgataaacccatcagatctcctgagacttattcactaccatgagaatagcatggga

SEQ ID NO: 938648 - DNA, 601 bp, Homo sapiens
aaataagggaattattctggattattgggtgggcccaatatactcacaaaggtccttaaaagtgaacatggcttgaattcatttattttttttcagaattggaattaagaaaataaccaaagatagtatagaactcaatgagtgtttttgatgtcttagaaactgctatcttggctgaggttttaatttaccttttaattgactataagggacattgcagtaatatttcctataagttctatatatttattaaggtttaaagagatctgggccgggtgtagtggctcatgcctgtaatcccagcactttgggaagctgaggcaggtggatcgccgaagtcaggagttcgagaccagcctggccaacatagtgaaatcccatctctactaaaaatacaaaaacttagctgggtrtggtggtgggcacctgtaatcccagctactagggaggctgaggcaggagaatagcttgaacctgggacgcagaggttgcagtgagccaagatcacaccattgcactccagcctgggcaacaagagcgaaactccatctcaaaaaaaaaaaaaaaaaaaaaaaaaaccagatctggagatacagtagct

SEQ ID NO: 938649 - DNA, 564 bp, Homo sapiens
taaaatacctcttagtctaagtagacactttcactggataggtagaggcctttcctacagggtctgagaaggccaccgcagtcatttcttcccttctgtcagacataattcctcagtttagccttcccacctctatacagtctgataacagaccagcctttactagtcaaatcacccaagcagtttttcaggcactyagtattcagtgaaacctttatatcccttacagtcctcagtcttcaagaaaagtagaacggactaatagtcttttaaaaacacacctcaccaagctcagccaccaacttaaaaaagactggacaatacttttacctctttctcttctcagaattcaggcctgtcctcagaatgctacaaggtacagcccacttgagctcctgtatggacgctcctttttattaggccccagtctcattccagacaccagaccaacttggactgtgccccaaaaaaacttgtcatccctactatcttctgtctagtcatactcctattcactgttctcaactactcatacatgccctgctcttgtttacactgccggtt

SEQ ID NO: 938650 - DNA, 651 bp, Homo sapiens
acagtggaaggtcaagggacaaggaaatgtgcagtttaaacaactggccctggagttcaggctagggaggggtgttaggatgctggaagtttaagggcttgcaggagtggggagtgtcccagtaagatcaacaaagggtctctgttaggaccaagggacagatggggctctgaagcagcacatcatctcagagtggctacagcgaaatgtggaagtacagaaactgaggaagggtgaggccaggggcgggggttgcgtaatagtcctcagggtaacattgatatgattgacagggactccaacaaacatggttaaaaatagcttcctggctgggcrcggtgggtcatacctgtaatcccagcactttgggaggtcgaggtgggcggatcacctgaggtcaggagtttgagaccagcctggccaacatggtgaaaccccgtctctactaaaaataaaaaaaattagccaggcgtggtggtgcacacctgtaattgcagctactcgggaggctgaggcaggagaattgcttgaacccaggaggcagatgttacagtgaaccactgcactccagcctaggcgacagagggagacttcgtctcaaaaagaaaaaaaaaatagcttcctgatgacaaaagatccaggaacccctgt

SEQ ID NO: 938651 - DNA, 748 bp, Homo sapiens
cagctatcctaatagtgatatggtttggctgtgtcctcacccaaatctcaccttgaattatagctcccataattcccacgagttgtgggagggacctggtgggagataattgaatcatgggggcggtttcccccatactgttctcctggtagtgaataaggctcacgagatctgatggctttataaggggaaacccctttcgcttgtctgtcattctctgtctgccatcattaagacgtgcctttcgccttccaccgtaattatgaggcctcaccagccacatagaactgtgagtccattaaacctctttwtatatatatatatatatataaattatccagtctctggtatgtcttttttttttttttttttgagacagagtctcactctgttgcccaggcgaaatgctgtggtgcagtctcggctctctgcaacctccgcctcccgggttcaagtgattctcctgcctcagcctcccaagtagctgggattacaggtgcctgccaccacaccggctaattttttgtatttttagtagagacaggtttcaccatgttggccaggctggtcttgaactcctgaccttgtgattcgcccatctcagcctcccaaagtgctgggattacaagcatgagccactgtacccggcccgggtatgtctttatcagcagctcgaaaatggactaatacaaacaggtaatctcctgaaatctcaatggattgacaaggaattccatttctcacttac

SEQ ID NO: 938652 - DNA, 619 bp, Homo sapiens
gtgctgggcctaaaggactgtatggataaggtgctgcaagccctgctcaacatgccctggcaggaactggagagtaacatgtgggacgggattctgcgggtacttgatcaagagcaccaaaatataaaattgggcaggtaagtatatttaggaatcttctcctgaaatatagaataaagaagtttaatcctggcaaagatcccaataaatggttcaaaattgctactaggatgcctccaagkgcatggaaaaaatgatggcccatactgagtgacattgaaatgctagaatcactgatgcagacattgccaagaagaaaaggactaagaggccccaggaagtgagcaaccagaatggatattctgcacgtggttaggcatctggccagatgttatgtgctataaccatcctaggtgatgcaccatttatcaaagccacacaggatgtcccatagagccaatgggagggctatcagcatcactaacattccatggtggttctctgcagatgagagctgacagtaagagaggctgtaatagaacttcgtttgatgattgcagtgagggtgatagtaccccctagaagggaggccaggtgttgccaccctaataaatatgtt

SEQ ID NO: 938653 - DNA, 601 bp, Homo sapiens
tcagccagctggaactgtgattgcaataccaacataatcctctacttgtatttcatcccaaatccatatgaatgtgattatttttcattcattcctcacattctagaataatatgtaaaggaaagtgctttttctgacatgtaaaatgtcctgaaaatgcaatacaactattgctcattctaattttatagtttaaattgtacatagcattgaaagcgagttccattgtaaygaatgtctaaataacatgccttctaatgaaaaatcattccaaaatgttttcttgctaatataatcttgatgtttatggagtttttaatccaaatcagcatgtagggtacttctcggttgtggtatgaacattaacatggaaaataggttgaactgaaaacaagcaaaggaagagcgggattcaccaggaagctctggtacactgaatgacatgagccccgcgccgactccaagattagcaaataaattgaacagagagaaagtgaaaccatataaactatttcaagtttctataatttctcatgaaaatagaagtttctaactaaaggcattgcaatgttttgacattcctaatatattctgaaagaaa

SEQ ID NO: 938654 - DNA, 650 bp, Homo sapiens
gaacccgaaagaaccaggtgactatcaggaaactctaccagttagagaggtaccagtatgcttagctgtgtgtggccttgccagcgatagggaaaagtgggcatttaatcagagtgacagcggaagccactagagggttttgagcaaaaagactgatgtgatctgattgacattttcgtaggatcactttgtttggctggcycattgaaaacagactacagggttcgaggtggaagcagaggcaccaatgaggagagtttgtaacatacaaggtgagaggtggtggtgaagtcagccagggcaataccagcagaggcggtgaaaggtgattagaatccaggtctgttttgaaggtagagagtttaaggttggatgaagtgtgagatatgaaagaagcatccaggtgagtcccacgttttggcttgagtgactggaatgatggactggagatttactcagatgtggcagaagcaggggtttttcttgaagaagagcaataatttgttttgcaaatgttaaatttgaggaggttattgaaaattcacgtacagatacatagtagacaattgaatctatgagtggagcttaggtgagagttctgggctggagacacaaatccaacagttgtcccaaatttagatggtatttaa

SEQ ID NO: 938655 - DNA, 552 bp, Homo sapiens
gaagaaattaataaattcctagacacatccaatataccaagactaaaccatgaagaaatagaaaatatgaacagaccaataatgaacaagaagattgaatcaaatataagcagtctcccaaaaaataaaagcccagaacctgatggcttcactgctgaattctaccaaacatttaaagaggaactaataccaatctgtttcaaactcttccaaagaaaytgaagaggagagaaaactgacaaacttattttacaaggccagcattaccctgataccaaagccagacaaggacatgacaagaaaagaaaattacaggccagtatccctgatgaatatagatgcaaaaatcctcaacaaaatactggtaaactgaattcaatagcacattaaaagaattgttcaccattagtaacatagtactggaagtcctagccagagcaattaggcaagagaaagaaacaaaaggtacccaaatcagaaattaagatattaaatagtctctgtttgtaggcaacattgttttatatttagaaagccctaaatactctatca

SEQ ID NO: 938656 - DNA, 552 bp, Homo sapiens
gaagaaattaataaattcctagacacatccaatataccaagactaaaccatgaagaaatagaaaatatgaacagaccaataatgaacaagaagattgaatcaaatataagcagtctcccaaaaaataaaagcccagaacctgatggcttcactgctgaattctaccaaacatttaaagaggaactaataccaatctgtttcaaactcttccaaagaaactgaagaggagagaaaactgacaaacttattttacaaggccagcattaccctgataccaaagccagacaaggacaygacaagaaaagaaaattacaggccagtatccctgatgaatatagatgcaaaaatcctcaacaaaatactggtaaactgaattcaatagcacattaaaagaattgttcaccattagtaacatagtactggaagtcctagccagagcaattaggcaagagaaagaaacaaaaggtacccaaatcagaaattaagatattaaatagtctctgtttgtaggcaacattgttttatatttagaaagccctaaatactctatca

SEQ ID NO: 938657 - DNA, 580 bp, Homo sapiens
ctcgcagccctcagaaggaaccagccctatcagcaatttgatttaggacctcctgactccagaactgggagacaataaagttctgttgtctaagccactcaatttgtggtactttgttacagcaggcctaaaaatcacacacagctcttaaatttgaatttattcataatttttaaatctggatatggaaaaagtggaccgttatcttactatatgtgattattatgmtggagctgctttgaaggatccaaaatcaaaacccatcttagacttttttttacatttcctactttgcattttgaaactaagggaggagaccacccctcatactgtcttatgcccaatttctgcctccaaagaaagaaaaagtaaaaactaaaaggcagaaatgaaatccacaagcagacagcccggcgccacaccctgggcctggtagttaaagatcgacccctgacctaatcggttatgttatctatagattacagacattgtatagaaaagcactgtgaaaatccctatcctgttttgttccaatctaattaccggtgcatgcagcccccagtcacgtaccccctgcttg

SEQ ID NO: 938658 - DNA, 581 bp, Homo sapiens
tttattggagttcactagtatatgatgtttttctcctattactgcccaaaattacactttttctgtttcttcattaagcaaacactttattctttccaactttattgagttataatagaaaagtattatacatatttatggtatataatgtgatgttttgatatatgtatacattgtgaaatgattaccataattaagctaatatatccaacacctcacatagtcactgtatttgtccattttatgctgctataaaagaatgcctgaggctgggtaatttataargaaaagaggtttattttggctcacagttctgtagatggttcaagaagcatcgtgccagcatctgcttctggtgagagcctggggaagcttccaatcatggtggaagctgaaggggagcagccatgtcacatggcaagagaggaagaaacagagagatgccaggctcttttaaacaaccatctctcgcgtgaactaatagtgtgagaactcactctttaccgaaaggacagcaccaagccactcatgagggacttgccccatgacaaacacctcccaccaggccccacctccaacac

SEQ ID NO: 938659 - DNA, 294 bp, Homo sapiens
gaaagtgaaacccgaagccaagtacctacatcccagtttaacttgttttccaccaatccctcttcctaaggagccaggaggcaccaattaagctaaaagggcccttttcaatcccggcatcgaggcagtgggacaaaacrggtccttcagatggggcgattgatgtgcacagttcagcgtcacaagtatgtccatgttacatagaaaagaattaactgaacaaaacgcagacaaaaccagaataataaatttgagtgtctctgaaatgtgtacgagacgtgcatttatgtattt

SEQ ID NO: 938660 - DNA, 599 bp, Homo sapiens
tctgggtagacccaaactaacataaagaatttggtcgaaatgtgtatattattaaggtaatgctagctgctgtaaaaataacttctcagttcaacaacatgtacatcattcagacagaaaattagtaagaaatgcaggacttgaattgcatttttggccaaatggacccaatagacatgtacagaattttccatccaacagcagcagaatgtaaagtttttctagagtayacatagaacattctccaggatagaccatatgttaggccacaaaatttaagattgaaattatgtctagtatcatttcagatataacttcaaaccacagtggtataaactagacatcagtgacaggaggaatcttgaaaaattcacaaatatctggaacataaacaacatgccccagaacaaccaatgggtcaaagaagaaattaaaagataaatttaaaaaatgccttgagacaaatgacaacggaaacacaatataccagaactgatgggatataggagaagcagttctgagaggaaagtttatagcaatatatgcctacattagaaaagaagaaagatctcaaatgaatagtgtgacattacacctca

SEQ ID NO: 938661 - DNA, 593 bp, Homo sapiens
gacataatttatctaagctacattcttgtttacagttgaccaccagaacaatatagacttgaatcctgcagctatttgatttcaggctttgaattcatctggtaacccttgtggtactccaatagcatctatataaacatgaggatcaaaggatccttgagagacatctctctttttatracattctgttttcaactttcttggttgatgaagtgccaagatgaaagggatagccagttgaattagagcgtaagtgccactccagtgaattggcagagtacccaacaatagtcctccgcaataccaccacacattcgttcagggatgaacaagggcagactgattggtaagctcttgaaaaggcttggtatcactgcaccctgttaagtctccaaggaatgcaaacgtttccccctgctgtgaaaggcacgaggtgaagttaatattaggagctggaggccggatggccctcaggggctgacctgcagggctcttgacctcagggaacagcagtgaaagagtcttgcatgactcatcgcctcaggctatggggttctggaagagggctatcatacagctcatgcctcctcggt

SEQ ID NO: 938662 - DNA, 614 bp, Homo sapiens
ggcatgtggtggctccatgatttggggacattttctcaaggggcgggtcaatttggctgtttctccagccaggggcacagtggtcaactgattttgacaaaggtccaaaggcaaagaaatggacgaaggatagtttcccaacaaaaatgttgaamcaattggacatccacttttttcagaaatccctttttttcttaccacacctctccctcaagcctctttgcaggtcccacatgaataattttttgcttataaatagcatgtccctagagaggagcaatggtagcaacctgcctcagatgcaggcaataagggagtaccttgtctggagaatttaaaaaataataatgacattaagagataatctgttttttaaatcactgttacagcaactctaagcaatgccactgatgatacacacctctctcaagactatctttttatgggagtctaacttctaatcacttctgttgagtttagtaatgtatgtgtgagctttaaattagcacatttctattacttatccttgaatagacattttattgtacgttgaagttaatttggagaactcttggttattatagtcagcccccagcagacacaaatttagctac

SEQ ID NO: 938663 - DNA, 614 bp, Homo sapiens
ggcatgtggtggctccatgatttggggacattttctcaaggggcgggtcaatttggctgtttctccagccaggggcacagtggtcaactgattttgacaaaggtccaaaggcaaagaaatggacgaaggatagtttcccaacaaaaatgttgaaacaattggacatccacttttttcagaaatccctttttttmttaccacacctctccctcaagcctctttgcaggtcccacatgaataattttttgcttataaatagcatgtccctagagaggagcaatggtagcaacctgcctcagatgcaggcaataagggagtaccttgtctggagaatttaaaaaataataatgacattaagagataatctgttttttaaatcactgttacagcaactctaagcaatgccactgatgatacacacctctctcaagactatctttttatgggagtctaacttctaatcacttctgttgagtttagtaatgtatgtgtgagctttaaattagcacatttctattacttatccttgaatagacattttattgtacgttgaagttaatttggagaactcttggttattatagtcagcccccagcagacacaaatttagctac

SEQ ID NO: 938664 - DNA, 596 bp, Homo sapiens
caggtagagcacagagggcttttagggcagtgaaaacactctgtatgatactaaaatggtggatacttgtcatcatatatttatccaaacccacagaatgaacaccaagaatgaaccctaagataagctataaactttgtgtgatgagggtatgccaatgtagggtcatcaatggtaacaaatgtgccactctggtggaggatgttgatatggaggaggctgtgcatgtgtcagggaaggggcatatgggaaatctctgtgtcttcctcttaattttgctgtgaacccaaaactgatctaaaacatacagtaaattatatgtaacatatatataattgtatatgtatamaattcatcagttgatgataagtgttatgaaaacaaatgatacatggaaggcaataacgagtgatgggaatgctttttgagctggtccagaaggtctctctaaagaagtgcatttgagcagagctaaaggaagccagtgagtgagctatgatgagaatatcaagggaagagccttcaggcagaaggaacagcacgtgcaaagacacagaggcaagagcaagccttgtgcgtgttgcaggaacagcaag

SEQ ID NO: 938665 - DNA, 718 bp, Homo sapiens
caaaccatcaggggagtctgaagacaccctcccaacactgccaccagcacatatgtgtgttgtctggggacctggaaatggacgtgctccatccaccactgccagcacccatgtgcactatccaggggcctgagaacgggctcactccacccactacaaccagcacccaagtgcactatccactctcctagagattgatccaccccacctgccaccactggtgctcatgcatacaatctggggacttgaagacaggcctactctacccaccatcaccaacaagggtacccgaggattagctcacctggcacctttgtccctagcacagcctcaccatagtatcaataaataattgcagtctagaccactgaggaactsataggaccactgatgctgattacagccagagaaatacagagactgctgtgtccactcagagtcaaagccaaagcacccaaccaaaccaacactatatatatatagtgttgactttatatatatatatatatatatatatatatatatatatatatgaaaaactctctccctgcaaaagactgccacaccagatacatagatttcatgtaataacacacacacacaaacacacaaaacatgtaaaaagcaaggaaacataaaacctccaaaagaactcactaagtctccagtaacagatctgaaagaaaaggaaatttgtgaaatgcccagaaaagaactc

SEQ ID NO: 938666 - DNA, 634 bp, Homo sapiens
gatccttgccacagtcttcctactacctgggatgtggaattaatgataaaagctccatagtccctacttactggaccatgggtaaccttaagggtggcagacacatgctgaggatgataaagctaaaagacaagtgcctgcttccttgycaatactgggacccccccccccaccccatatcagcccctacttgcctagctccagattttcattaagtggaaaagaagaaaaacctgggcttatgtaaatcactgatatttaggattgtttgttatgtgtagccatctgtattaatctgttttcaccctgctgataaagacataactgagactgggaagaaaaagaggtttaattggacttacagttccacttggctggggaggcctcagaatcatggtgggaggcaaaaggcacttcttgcatggcagtggcaagagaaaatgaggaagcaaaagcagaaagccctgataaacccttcagacctcatgagacttattcactatcgtgagaatagcatgggaaagaccggcctccacaatttaatttgctcctcctgggtccctactaaaacacgtgagaatttagagatacactacaattcaagttgagatttgggtagggacacaaccaaacc

SEQ ID NO: 938667 - DNA, 778 bp, Homo sapiens
gcagctgggtactagtgtagactgaggattgagcatctactaaattaagctctgggctgtcgtccatgtgctgagcaatgctgttcaattagcagatctttcctttgtaaaccatgtggttgactgcacagtttgtttgagtctctgccaacaaaataatttttatacgggctgtcactgctcagtgttctgcaagtcattcctcttgcttaagaccatacaaggttagagttttgtctacttcttttcaaggttcagctaacttactgctgcaggatttcacagacaattcaaaggaacccagagttctgatgttcccaggagaagaaacgtggggaaataaaacccctggttgacgtgcagaagagacaaacagtgagaatctctgtgagtttactcaggtgggctttacaacatactttgctccaaaatcctgtgttcaggccaagccctgatattttaaacagacagaaagttggctgggagcctccctgaatgactgtgctgctgatgtcattttacacctgccacaaccatctatcttctgagggtgcaaaaacaagtctgagatggctttgaagataagcacattcagggcgtgctgacttgcaagcagtgtgtgtgygtgtgatcatgatgccacagaggtggggagggatgtgtggaaacctagggagaaaacagcacctagaaaagttccctgggtgggggtaggatgaatttcgagcatcactcgagcagttttgtttctgcgacctgtatctgtctcttttctcct

SEQ ID NO: 938668 - DNA, 848 bp, Homo sapiens
aagtagtgagggttaggacctcaacatatgaattgggattgggggagcggggagggtgcacaattcagtccataactgtgagctccattgctcctaagatgctagaataaaaattggacttcagggccgggcgcggtggctcacgtctgtaatcccagcactttgggaggctgaggcgggtggatcacgaggtcaggagatcgagaccatcctggctaacatggtgaaaccctgtctctactaaaaatacaaaaaattagccggtcgaggtggcgggcgcctgaagtcccagctactcgggaggctgaggcaagagaatggcgtgaacccggaaggtggagcttgcagtgagcagagatcgcgccactgcactcgagcctgggcgacagagtgagactccttctcaaaaaaaaaaaaaaaaagaaaagaaaagaaaagttggacttcagcctcccctatcccctactccatctcatsccctccacgacaagctgacctgtggactcacacattgtcaagtgctgtgaagggaagctgggaggattgaaaatgcagtaaggaaacagccctctcaactcgatttgtggtcacagcagtagcagcgacactccagtgtggaaaagaatataggggatctatcaggaatttgagaccctttaccagcaaacatttcagaaccggcctcttagcctttgttagcgattcaatccagagtcacccttgcccagtctgccctctgcctactccccatgtcattgtcatcccccatgggctccataattagagactgtggtgaataaatatgcctaagacgcctcattccgcctgccatctatgggagctctgac

SEQ ID NO: 938669 - DNA, 559 bp, Homo sapiens
acctgaggacaggagtttgagaccagcctggccaacatggtgaaacgccgtctctactaaaaatacaaaaattagctgggcgtggtggcgggcgcctgtagtcccagctacttgggaggctgaggcaagagaattgcttgaacctgggaggtgaaggttgcagtaagccaagatcgcgccactgcactgcagcctgggcaacaagagtgagactccatctcaaaaaaaaaaaaaaaaaaaaaaaagaatgttatagaatgtggcagaagtaatgccatgtggcttccaagcccgtcattaaaaagttacagtttccacctggctctctctaacatttgaaatgcacactygggaaggccagctaccatggcataaggacactcaagcagccctgtggagaagtgcgtgaggagaggaactgaggcctcttgccgacaaccagcatcaacttgcaaaccacatgagtgagctaccttggaactggattctccaaccttcgtacagcctttggatgttgcagccccagccaacatttgactgtagcctcatgagagacccc

SEQ ID NO: 938670 - DNA, 761 bp, Homo sapiens
catgcctataatcccaacactttgggaggccaaggcgggcagatcacctgaggtcaggagttcgagaccagcctggctaacatggtgaaaccccgtttctactaaaaatacaaaaaattagcagggcatggtggcgcatgcctgtaaactcagctacttgggaggctgaggcaggagaatcgcttgaacccgggaggtggaggttgcagtgagctgagatcgtgccattgcattccagcttgggcaacaagagcgaaactcttgtctcaaaaaaaaaagaaaaagaaaaatwgattatttaaggaatcctaatgacttcttacatattaacctaatgtttttaaattttcaaacaatcttaaaacacaaaacttcacaattaagtgcaattcagcctctgcttactttttttttttttctttaaagaggctatgctgggaagaactctgctttactttttaaaaataacttttcattaaagtataatatacatacagaaaagtggacaaataagtgtgcagcttgttgaatttcactagcagaacacacctgtgtgagcacccagctcaagaagcagctcattgccagcacccagaagccccataccctgtgccccctgccccttgcatccccgctttcctttggcttcctccttctgcagtcagtcccactgcccgggccacacaccgccaatacagttcccagcaaccaccccatcccctggcctttgagaccctagacttccccttgtggaggtcagc

SEQ ID NO: 938671 - DNA, 757 bp, Homo sapiens
ccaggcccagacaattaaaaaaatttttttgtagagatggtgggggtggagtcttgctatattaattgcccaagctggtcttgaactcctggcctcaagagatcctcccaccttagcctgccaaagagctgggtccacaggtatgcaccaccatgccaggctaactttttttactttttgtggagacggggtcttgccatgctgcccatgctggtcttgaactcctgggctcaagcagtcttcccacttcagcctcccaaagtgctgagattacaggcatgagccaccatgcccagccccgtcttaattattttcaactgttcaatccagtggcattaactgcagtcaacacagttgtgtcatcatcaccaccatccatttccagatcttttttcatcttcccaaactgtaactttgtacccattaaacactaactccccttttctccctcccamccagcccctgccagccaccattccactttctgtctctatgaatttgtgatccattttaaagtctctcacaatctttccttacctagaggcaatgaatcacatttaccatcttttcgaccctgcccaagttattagcctccttgagccttcatttcctgtctgtaaaatcagcataacagcacttacctcaaggatatgtggtgaggattatatgaggtaatccatgcaaagtgcttagaacagtgtaattaaggatgtagaaagagctcaacggatgggagttgctattatcatgaagacca

SEQ ID NO: 938672 - DNA, 763 bp, Homo sapiens
tcgcctaggccaacatccaagagttcttcctaagttttcttctaggacttttatagtttaaggtcttatgttcaagtctttaatccatccgtcctgagttaattttcatacatggtgagacacaagggtccagtttcmttcttttgcatatggctagccaatatcccagcaccatctattgaatagagtgttaatgtcctttctccactgtttattttcatcaactttgtcaaagatcagttggttgtaggtatgtggctttatttctaggctctctattctgttccactgatctctatgcatatttttgtaccactatcatgctgctttagttactatagccttgtagtataatttgaagtcaggcaatctgatgcctctgaatttgttccttttgcttaggatcgctctggctgagtgcttttttgattccatatgcactccagtgctgtttttctaattctgtgaaaactgatgttagtaatttgaaaggaatttcattgaatctgtagattgctttgaatagtatggtcatttttgtgatattgattcttccaatccaacagcacaaaatgttttgccatttgtttgtgtcatctgcaatttcttccattggtgttatatagttctcctcgtaaagatctttcacctccttggttaaatgtattcctaggggtgtgcgggtgtgggtgtgtgtgtgtgtctactgtaaatgggattgggttcttgatttggttatcagcttcaaagttatttatagaaa

SEQ ID NO: 938673 - DNA, 763 bp, Homo sapiens
tcgcctaggccaacatccaagagttcttcctaagttttcttctaggacttttatagtttaaggtcttatgttcaagtctttaatccatccgtcctgagttaattttcatacatggtgagacacaagggtccagtttccttcttttgcatatggctagccaatatcccagcaccatctattgaatagagtgttaatgtcctttctccactgtttattttcatcarctttgtcaaagatcagttggttgtaggtatgtggctttatttctaggctctctattctgttccactgatctctatgcatatttttgtaccactatcatgctgctttagttactatagccttgtagtataatttgaagtcaggcaatctgatgcctctgaatttgttccttttgcttaggatcgctctggctgagtgcttttttgattccatatgcactccagtgctgtttttctaattctgtgaaaactgatgttagtaatttgaaaggaatttcattgaatctgtagattgctttgaatagtatggtcatttttgtgatattgattcttccaatccaacagcacaaaatgttttgccatttgtttgtgtcatctgcaatttcttccattggtgttatatagttctcctcgtaaagatctttcacctccttggttaaatgtattcctaggggtgtgcgggtgtgggtgtgtgtgtgtgtctactgtaaatgggattgggttcttgatttggttatcagcttcaaagttatttatagaaa

SEQ ID NO: 938674 - DNA, 710 bp, Homo sapiens
ataatcatacagttttggggtttggttctatttatgtggtgaatcatgtttattgatttgcatatgcttaaacattcttgcatccctggaataaaacccacttgatcatgatttattatctttttgatgtgctgtcggattcagcatttgttgaggatttttgcacctatgttcattagggatattggcctgtggttttcttttctggttgtgtccttgcctgactttggtatctggtgtcctcacctgactttgatactggtgtcctcacctgactttgatactggttttgtagaatgagttagaaaggaattactcctcctcaattttctgaaatagtttcagtattctttcctaaataccagcttttctttatatgtctggcaaaattcagctacaaatctatctggtcctggccttttttrttgttagaaggtaataaggtttggctgtgtccctacccaaatctcacctcgtagttcccctaactcccatgtgtcatgggagggttcagtggcaggtaattgaatcatgggggcagttaccctcatactgttctcttgatagtaagttctcacgagatctgatggttttacaaggggcttccctccactttgctcagcacttctccttcctgccgccatgtgaagaacatgtctgcttccccttctgccatgattataagcttcctgaggcttccccagccctgt

SEQ ID NO: 938675 - DNA, 598 bp, Homo sapiens
cccaatctcttccagctgacttgcagggtttctgctgagaagtttggtgttagtttgatgggatttcccttataggtaatcccttctctcttgctactcttagaatttcttctttttccttcacactgactttgaacagtctgatgactatatgcttagatgaggttcttcttgcaatttatctttcaggagttctctgagcttgtttctggatgtctaaatctcttcccagactagggaagttttccctawttacttcctgaaatagcttttctacactttttactttttcttctgtagaatatctataacctgtaagtttggatgctttatacaatcccatatttctccaagactttttcactttttttttcttttgagatggagtttcactctgtcacccagtctggagtacagtggcaccatcttggctcgccacaacctccacctcctggaatcaagcgattctcctgcctcagcctccaaagcagctgcaattacagtcacacgccacaatgccctgctaattttttttttgtatttttagtagagatggggttttcaccatgttggccaggctggtctcgaactcctgacc

SEQ ID NO: 938676 - DNA, 622 bp, Homo sapiens
cccaaaatgctgggattacaggcatgaaccaccatgcctggtggttttaatattttaataatctctttatagatttggtaaagagaggggaaaataggccaaataatagcaattttttgtttgtttgttttttgagagggagtctaactttgtcacccaggctagagtgcagtggtgccatctctgctcactgcaacctctgcctcccaggttcaactgattctcctgcctcagcctcctgagtagctggattacaggcacctgccaccacgcctggctaatttttgaatttttagtagagacggggtttcaccatgttggtcaggctggtctcgaactccttacctcaagtgatcccctgcctcrgcctcccagagtgctggcctgggattacaggtgtgagccaccgctcccggcctaatagtaatgttttaaaataacaggtgtggaaaaatctctatttactcaggcctgagaatatttcttgcaagtcatattcccttttttttgccttagagatataagaaattaggagaaatcagggggtatcaaataccctcatactcttttcctaggaaaaaaaaatttaaagaatgtattgcaactttgctcacttatattt

SEQ ID NO: 938677 - DNA, 635 bp, Homo sapiens
ggggctttttccaggtcctcccatgaaccaatcagtacacacttcctcctgctcatggaccaatcggcatgcacttcctctgagcctataaaaaccccaaactcagactcagacacttgtccagacgacctgcctgccaatgggagctacctacttcagstttcttctagactgagaactgttttgtcactcagtaaagctcatttctgttttgctcaccctccagttgtccacataacctcattttccctggatgtgagataagaacttgagactcccccaaacaaggagctgtaacacatccacggccagctctccatgctgacaggagccaaaggggttataacaccaaagccctccatctttgctagtgccacctgaccagcacacatgatgcaaagcagaggcagggctaggccagcccaagagatgaaggcagcagaagaggagaaagagagaagagctgtggcccttctgggagcctagaccttggggctccctgagccagggctctgatatgctgtaacaccctctttggggatctgtggctcttggtgtctctgagcttttgggaaccaacacgttcccctcatccagacactggtgcccacagtggaagacacttgtggtacttc

SEQ ID NO: 938678 - DNA, 635 bp, Homo sapiens
ggggctttttccaggtcctcccatgaaccaatcagtacacacttcctcctgctcatggaccaatcggcatgcacttcctctgagcctataaaaaccccaaactcagactcagacacttgtccagacgacctgcctgccaatgggagctacctacttcagctttcttctagactgagaactgttttgtcactcagtaaagctcatttctgttttgctcaccctccagttgtccacataacctcattttccctggatgtgagataagaacttgagactcccccaaacaaggagctgtaacacatccacggccagctctccatgctgacaggagccaaaggggttataacaccaaagccctccatctttgctagtgccacctgaccagcacacatgatgcaaagcagaggcagggctaggccagcccaagagatgaaggcagcagragaggagaaagagagaagagctgtggcccttctgggagcctagaccttggggctccctgagccagggctctgatatgctgtaacaccctctttggggatctgtggctcttggtgtctctgagcttttgggaaccaacacgttcccctcatccagacactggtgcccacagtggaagacacttgtggtacttc

SEQ ID NO: 938679 - DNA, 635 bp, Homo sapiens
ggggctttttccaggtcctcccatgaaccaatcagtacacacttcctcctgctcatggaccaatcggcatgcacttcctctgagcctataaaaaccccaaactcagactcagacacttgtccagacgacctgcctgccaatgggagctacctacttcagctttcttctagactgagaactgttttgtcactcagtaaagctcatttctgttttgctcaccctccagttgtccacataacctcattttccctggatgtgagataagaacttgagactcccccaaacaaggagctgtaacacatccacggccagctctccatgctgacaggagccaaaggggttataacaccaaagccctccatctttgctagtgccacctgaccagcacacatgatgcaaagcagaggcagggctaggccagcccaagagatgaaggcagcagamgaggagaaagagagaagagctgtggcccttctgggagcctagaccttggggctccctgagccagggctctgatatgctgtaacaccctctttggggatctgtggctcttggtgtctctgagcttttgggaaccaacacgttcccctcatccagacactggtgcccacagtggaagacacttgtggtacttc

SEQ ID NO: 938680 - DNA, 593 bp, Homo sapiens
tattatttatttttatgggacagagatttatttttccttttaacaaaaaaaagaaagaaagcaaataccatgaaagcaaacaaattattaatatggtgacaaacttcatacatttttatataaaataagtccatattaacaatataaaaagaaaaaatagaaaagatatgtttaatatttggtctcttgagatttgataacaaatacaaagggcactaggaaaacagaaaagatgaaaacttatttttattacttcagattcgagggtacgtgtgcaggggtgttacatggatatattacataatagtaagatctgggcttccagaaacaaacaaacaaacaaagaaacaacattctgggtacccagtatacaaatagtgaacattgtacctgataggtaatttttcaaccctcagtcgctcttctaccatccctgcttttggagcccccratgtctattatttccatcttttatgtccatgtgtatctattgtttagctcccacttataagtgagaacatgtattttatattctgtttttgagttatttcacttaggataatgcctccagtaacatctatgttgctgcaaaa

SEQ ID NO: 938681 - DNA, 679 bp, Homo sapiens
gcatcagcatcatctgagatcttgttaaaaatgcagacctggccagggcgcggtggcttacgcctgtaatccagcactttgggaggctgaggtgggcggatcacgaggtcgggagatcgagaccatcctggctaacacagtgaaaccccgtctctactaaaaaatacaaaaaattagccgggtgtggtggcaggcgcctgtagtcccagctactygggaggctgaggcaggagaatggcgtgaacccgggaggcggagcttgcagcgagccaagattgtgccactgcactccagcctgggcgacagagcgagactccgtctcaaaaaaaaaaaaaaaaaaaaaatgcagacttgcccaagaccctccaaatctgaaatactggggatggggcccagcactctatttaacaagctctctgagtgaataagatgcatgctcaattttgagaaccactggtctacgtctttagccttctctgatacttgaggctcagttgcagagctcacattctctgaagccccatatctgtagttccatcttcctcttgggcagctccatctggatgtcctgcagattaggttttataagtggggagataattaaattggaacctccgaactttgagtaatgtgtgtgtgtgctgattacatgtctgccttgaaatgcaggtcctgagca

SEQ ID NO: 938682 - DNA, 753 bp, Homo sapiens
gggcagctgctgggctggggattggcctgactcagaacagtcagaattaataagggatcgcttggcctgactcagaacagtcagaattgataattgattgtccactaggctgtagttaaactagctagatgccctcttatgccttagccctcaacactgagtcacagttaattcccagacttgagtgaaataacaaatcctgatgaaacccttggttccatgaacagtgggtgggaagataagaggctttagtcataatgcaccaccaactcttcaccaggcagtctcaggccattgacatgggtgggccatcaccttcatgctgtcactccaacccctgtgctgattgtcacccggcagaggagggatgggagttcaacagaccacatgggataaaacaaggcratgtctcagaggcagatcatggacagcttacccacccaggtgcttcacttctccattcctctccttcttatccacctttagacctcaccaccactgtctagtgcattttctaaaagggaggagggaaaacatttattttctatgtcctatgaagtgctcagaaaaagatgaaactcaaaagttgcctaaaatgagggcttggaatgttctcttcctgctgattaccgaaagcatttccagaggaatggacctgcagcctttggctgcagccatttgcgagcatacaaccctgggtgaacagaccactgcctggcagaagcctcaggaacccccagctcaggcaacatc

SEQ ID NO: 938683 - DNA, 585 bp, Homo sapiens
atgatcctgtctggcagagttgctggagcagcttctagaggtaatagccccaggactccctgagggatgtgcttgatgtccacccaatgccacaccctggcatccataccctccaggtgaacctgacttctcacagtgcacttcccactcaggtctggagcagtttcactttagctggaaactggcatcagaactggtctaacaggggccaaccacatgccctttcacagacatcggcagggtggacccacagaccagatgtccagcattgttatgagaacagcctccctcacctcctccataacayacacccgtgccccacccggaaccttccacatagctgtcctggtggcactgggcctgccattgagctggcgcaatgagagttgtgagcacagggcagatcgggggttatttttaaacgtccttgctgggaggcagtggtgaccttaaagtaggttgtctctttttctggcatttcagttttattgtaaaagcatttgtttatagaaacagagaattctaagtggcaaaagcacacacattatgcaaacgacagatgttggctatttcccctctcagcca

SEQ ID NO: 938684 - DNA, 630 bp, Homo sapiens
attggagaaaaggcatacacgtttatgtaacgtatgtacacaggagccttcagcataaagaacgaacgtacaggggaacttgtccacttttatgcttctgtccaacaaagtatggacggccgggtagaatatgatcagacaagaaggrtgtgatctaacgctgagaccgagtgaggacacccagcaaggcctgtccggctagattctgcctggcctctctgagcacacattccttccttctggaatgagggggtcttatgaccagcagtcaaacaaggtaggtcagatcatttctttatgaccagtttttacacagagagtctgagaaagaaaaagagtaacaggttttatggctggctttggagagaagagggtgtggtttctatgacccatcttggggaagagggattctggtttctatgggtagccttgggggaaaatgggactaagagacaggagggcgggaggaggtcagggaaaaccttttgcttctgaggctgcttccaagactttcattttggggtacaattttctgagccccaacactttcaaagacagatttccaaatggttttagttttaaatgttcaaatacctaggcctgcactccagccctgggagaagcaggaac

SEQ ID NO: 938685 - DNA, 594 bp, Homo sapiens
attggagaaaaggcatacacgtttatgtaacgtatgtacacaggagccttcagcataaagaacgaacgtacaggggaacttgtccacttttatgcttctgtccaacaaagtatggacggccgggtagaatatgatcagacaagaagggtgtgatctaacgctgagaccgagtgaggacacccagcaaggcctgtccggctagattctgcctggcctctctgagcacacattccttccttctggaatgagggggtcttatgaccagcagtcaaacaaggtaggtcagatcatttctttatgaccagtttttacacagaragtctgagaaagaaaaagagtaacaggttttatggctggctttggagagaagagggtgtggtttctatgacccatcttggggaagagggattctggtttctatgggtagccttgggggaaaatgggactaagagacaggagggcgggaggaggtcagggaaaaccttttgcttctgaggctgcttccaagactttcattttggggtacaattttctgagccccaacactttcaaagacagatttccaaatggttttagttttaaatgttcaaatac

SEQ ID NO: 938686 - DNA, 510 bp, Homo sapiens
cattcccaacatgctttgtttgccttcaatgttccaggacccttgctaggcactgaggacccagtgaagaatacaatagtcccccttattcgagggctagtgggaagagttccaaaacccctggtggatgcctgaaaccaacatgatagtgccagaccctatatatatgatttttcctatatatacatacctataataaagtttaatttttaaawtaggcagcataagtgattatggtattataacatatattggtatatggtatatacgtttatatggtattgtaacaaatacgtggtattataacaatatactatcatgaaagttatcacacactgtggccatacgtttctggtttgagatgtggaagcagaactaccatgtatttctttttccttcttcacaatttcacagatagatttgttcttaacacagctcttagcaacctcagcatataatttttttttctttccttaagaagtgaagagctttcaccctttcacttaaaga

SEQ ID NO: 938687 - DNA, 583 bp, Homo sapiens
tgggacatgtctaaaatcagctgctaactattcatttggctcaactgctgaggccaatgatcaattccttgtgctatattgtattgcctggaacctagttgtgctcatgtgtattgtattgtattgtattgtattgtattgtattgtattgtattgtattgtattgtattgtattgatctatttgcttatttctktagagctggagtcttaccactttgcccaagcttgtctcaaactcctgggctcaagcaatcctcccacctcagcctctgaaagttctgaggttacaggcatgagtcactgcaccgggccatgtctattttattcttgacacatggccatatttgcagtgagattaagtatgggagtagccatgtgactcagcagagtgaggagaccagagcagcaagacctacccaaggtggacagagcaagtggtcccctgcaggtgcagcgttgtcttggtggcttctaagactttctttccctgggctgaacggtcacatcactggcattattctccggcatgacagtgttatatcttgatggctactgttcaaatgctttcttttaaactagaag

SEQ ID NO: 938688 - DNA, 583 bp, Homo sapiens
tgggacatgtctaaaatcagctgctaactattcatttggctcaactgctgaggccaatgatcaattccttgtgctatattgtattgcctggaacctagttgtgctcatgtgtattgtattgtattgtattgtattgtattgtattgtattgtattgtattgtattgtattgtattgatctatttgcttatttctgtagagctggagtcttaccactttgcccaagcttgtctcaaactcctgggctcaagcaatcctcccacctcagcctctgaaagttctgaggttacaggcatgagtcactgcaccgggccatgtctattttattcttgacacatggccatatttgcagtgagattaagtatgggagtarccatgtgactcagcagagtgaggagaccagagcagcaagacctacccaaggtggacagagcaagtggtcccctgcaggtgcagcgttgtcttggtggcttctaagactttctttccctgggctgaacggtcacatcactggcattattctccggcatgacagtgttatatcttgatggctactgttcaaatgctttcttttaaactagaag

SEQ ID NO: 938689 - DNA, 730 bp, Homo sapiens
ctgttatgggcaaccagatagaaatatccatgctaaggagcagagaggcttagaaagcctggaagaagagatacttgcactctttgatctgatgccaaatgtcgtatcctcagcaaaaagccagaggcagaacccttatgggcccaaaggkaaaataatgaagtggcctctagaaaaccaaagcagtactattttgaggccagaagtatcctaaataccatggtaacattaaataaagattatagagaaggaaaaggaaattattttcctacgggttatggtagacagaaaaatacctgcacaaagatttctgcattctcatgcacagaatctatgattgtgttaggttaggttacatggcaaaggagaagtaaagatgcagatgaacttaagattgctaatcagatgaccttgagatggggaggctgtccttattatcagggtgggcccgaggtaatcacaaaggtctttaaaagtgcaagagggagccaagcatgctggcaagtaactgcagtctcagctactcaggaggctgaggtgggaggattacttgagcccaggagttcgaggctgcagtgggccatgattgtgccactgcattccagcctgggcaacacagcaagaccccatctcttaaaaaataagtgcaagagggaagcagaagagaaggtcagagtgatgtgatataataagtaacatggttggctttgaagacagagggagtggacag

SEQ ID NO: 938690 - DNA, 730 bp, Homo sapiens
ctgttatgggcaaccagatagaaatatccatgctaaggagcagagaggcttagaaagcctggaagaagagatacttgcactctttgatctgatgccaaatgtcgtatcctcagcaaaaagccagaggcagaacccttatgggcccaaagggaaaataatgaagtggcctctagaaaaccaaagcagtactattttgaggccakaagtatcctaaataccatggtaacattaaataaagattatagagaaggaaaaggaaattattttcctacgggttatggtagacagaaaaatacctgcacaaagatttctgcattctcatgcacagaatctatgattgtgttaggttaggttacatggcaaaggagaagtaaagatgcagatgaacttaagattgctaatcagatgaccttgagatggggaggctgtccttattatcagggtgggcccgaggtaatcacaaaggtctttaaaagtgcaagagggagccaagcatgctggcaagtaactgcagtctcagctactcaggaggctgaggtgggaggattacttgagcccaggagttcgaggctgcagtgggccatgattgtgccactgcattccagcctgggcaacacagcaagaccccatctcttaaaaaataagtgcaagagggaagcagaagagaaggtcagagtgatgtgatataataagtaacatggttggctttgaagacagagggagtggacag

SEQ ID NO: 938691 - DNA, 597 bp, Homo sapiens
gagattcattatatcacagagctttggggtggggcagctggcaagcaggtaccaactatgaaatggcctcatagtgggaagggctgtgactttattttttatttttagatttttatgttttattttgacataattttagatgtaaaaattgcgaaaatagtatagagagcctacatatacctttgactcagcttcctctaatgttaaaaaattataaaactatataataatgatcaaaaccatgaaatcattaaatcaacattgatactatacctttttttttctttttgagacaaggtttcactctgttgtccaggctggaggctgatgcaagcataactcactgtaacctcaaastcctgggttcaagtgatcctccaagcgtagcctcctgagtagctgggactacaggcatgcatcaccatgcctggctatttttaaaaactttgtagagatggggtctcactttgttgcctaggctggtctcaaactctcggcctcagagagcagtccttcagcctcagcctcccaaagcactgggattacaagcatgagtcactgcactcagcctatactattaacttaaaaatagacctt

SEQ ID NO: 938692 - DNA, 596 bp, Homo sapiens
tagttatctcattagcacacacaaaatactcttatgactccagagattcaaaggattttaggagctgtacataaggaaactgggaaaaagatcaaatatatatatatattttacatcatcacatacacatataaaaagatatttgttataagaaatcagctcacatctcacatgattatggagattgagaagtcccgaagtctgcagttggcaagccgcagacccagaagaccggatggtgcaattccagtctgggtctaaaggcctgagaatcagaagagctgacagtgtgagctccagcctgaaagccagcargcttgagatccgggaagagccaatgtttcagtttgagtccaaaggcaagaaaaaatccaatgtcccagctcacaggcagtcagacaggatgagttcctgctgtctcaatctttctgttccattcaggtcttcagccgattgcatgaggcccattcacatgaatctgctgtactcaggctactgatccaaatgttaatctcatcacagaaacacccagaataatgtttggcaaaatgtctgggcatcccgtggcccagtcaaattgacacatacaattcacc

SEQ ID NO: 938693 - DNA, 586 bp, Homo sapiens
atacattctattcaacagctcatggaactttttccaagatagaccatatgagaggccacaaaatgagccttaataaatttatgaaaatacaaattatatcaagcactctctcagaccacagtggaataaaactggaaatcaactccaaaaggaaccttcaaaaccatgcaaatacatggaaattaaattacctgttactgatcattggttcaagaataaaatcaaratggaaattaaaaatttatttgaactgaatgacaatagtgacacaacttatcaaaacctctgttacacagcaaaggcagtgctaagaggaaagttcatagccctaaatacctacatcagaaagtatgaaagagcacaaacagacaatctaagatcacacctcaaggaactagagaaacaagagcaaaccaaacccaaacccagcagaagaaaggaaataaccaagatcagagctgtattattctgttttcatgctgctgataaagacatacctgagactgggcaattgataacagaaagagattcaatggactcacagttccgtgtggctggggagggctcacaatccaggcggaaggtg

SEQ ID NO: 938694 - DNA, 733 bp, Homo sapiens
cagaccacagtgcaatcaaattagaactcaggattaagaaactcactcaaaactgcacacaactacatggaaactgaacaatctgctcctgaatgactactgggtaaataacgaaatgaaggctgaaataaagacattctttgaaaccaatgagaacaaagacacaatgtaccagaatcttggggacacatttaaagcagtgtgtagagggaaatttatagcacttaatgcccwcaagagaaagcaggaaagatctaaaattgacaccctaacatcacaattaaaagaactagagaagtaagagcaaacaaattcaaaagctagaagaaggcaagaaataactaagagcagaactgaaggagaaagagacacaaaaaacccttcaaacaatcaatgaatccaggagctggttttttgaaaacatcaagaaaacagactaccagcaagactaataaagaagaaaagagagaagaatcaaatagatgcaataaaaaatgataaaggggatatcaccaatgatcccacagaaatacaaactaccatcagagaatactacaaacacctctatgcaaataaactagaaaatctagaagaaatagataaattcccagacacatacacccacccaagactaaacaggaagaagttgaatccctgaatagaccaataaaaggctctgaaattgaggcaataattaatagcctaccaaccaaaaaaaggccaggaccagatg

SEQ ID NO: 938695 - DNA, 733 bp, Homo sapiens
cagaccacagtgcaatcaaattagaactcaggattaagaaactcactcaaaactgcacacaactacatggaaactgaacaatctgctcctgaatgactactgggtaaataacgaaatgaaggctgaaataaagacattctttgaaaccaatgagaacaaagacacaatgtaccagaatcttggggacacatttaaagcagtgtgtagagggaaatttatagcacttaatgcccayaagagaaagcaggaaagatctaaaattgacaccctaacatcacaattaaaagaactagagaagtaagagcaaacaaattcaaaagctagaagaaggcaagaaataactaagagcagaactgaaggagaaagagacacaaaaaacccttcaaacaatcaatgaatccaggagctggttttttgaaaacatcaagaaaacagactaccagcaagactaataaagaagaaaagagagaagaatcaaatagatgcaataaaaaatgataaaggggatatcaccaatgatcccacagaaatacaaactaccatcagagaatactacaaacacctctatgcaaataaactagaaaatctagaagaaatagataaattcccagacacatacacccacccaagactaaacaggaagaagttgaatccctgaatagaccaataaaaggctctgaaattgaggcaataattaatagcctaccaaccaaaaaaaggccaggaccagatg

SEQ ID NO: 938696 - DNA, 569 bp, Homo sapiens
aaagaaaactcaggactggtttacagatagttctgcatgatacgcaggtgccatctggaagtggacaactgcaatactacagcagccctgtaagaaagtggtaactttctttacagaaagaaagttatgggacagccctgaaagaaagtggtaaagggaaatcctcccaatgggcagaactttgaccacctggttgttcactttactaggaagaagaaatggytagatgtacaattagttatcaattcatgagctatggccactggtttgctggatggtcagggacttggaaggaacatgactggaaaattggtgacaaaacggtctgtggaagaggtatatacacagatctttctgaatgggtgaaaaatgtgaggatatttgtgtctcatatgaatgccaccaaagaatgacttcagcagaagaggattttaataaccaagtagataggatgacctgttcagcccctttctccaaccatgcaggtaactgcccaatgagctcatgaataaagtggccatggtggcagggttgttatatatgggctcagcatcatggacttccactca

SEQ ID NO: 938697 - DNA, 677 bp, Homo sapiens
gtgctggaggtagggcctggcgggaggtgattggatcgtgagggtggggttctcatgaatggcttagcaccctccccacttgataccacatggtgagtgagttctcatgagatctggctgtttaaaagtgtgtggcacctcccccagcaatctctcttgctcctgctccagccatggaagacrtgcctccttctttgccttctgccatgattataagtttcctgaggcctcccaagaagccacgcagatgccagcaccatgcttcctgtacaggctgcagaaccacgagccaattaaaccacttttcttcataaattctccagtcttggccgggtgcagtggctcacgcctgtcatcccagcactttgggaggccgaggcaggcggatcacgaggtcaggagatcaagaccatcctgactaacacagtgaaaccccatctctaccaaaaatacaaaaaaattagccgggtgtggtggtgggtgcctgtagtcacagctactcaggaggctgaggcaggagaatggcgtgaaccccggaggtggagcttgcagtgagccgagatcacgccactgcactccagcctgggcgacagagagagactccgtctcaaaataaataaataaataaaaataaaataaattctccagtctcaggtcattctttatagcagcacaag

SEQ ID NO: 938698 - DNA, 568 bp, Homo sapiens
ttttagtagagatggggttttgccatgttgaccaggctggtctcgaaacccttacctcaggtgatccacccaccttggcctcccaaagtgctgggattacaggtgtgagccaccatgcctggcttaatttttgaatttttagtagagacagggtttcaccatgttggccaggctggtctcaaacttctggcctaaagctatccacmcaccttggcctcccaaagtgctaggattacaggcatgagccactgcgcctggccagtcatggacatttgagctgtcctttttagtatgtaaaaagccattactaggtggagctgcagggacaagagaatcttgaagaggcattataaatactcacaagcaaaagcagaggattcccccttcctcccaggagtttagaatattctaggacaaacaattctaaaccacttgagcaacagtgtttcttctcttagggtctgtttgagcctatattgttcaaaaactccattattaatatatttttctttaaataaattattttctgataatttaaataattcatttctattttgcaaggccccag

SEQ ID NO: 938699 - DNA, 681 bp, Homo sapiens
tatcaaaattatgcatatttttcttaaatttttttttctttttttacttttgatcatagaaacatgtttatgttttctcctaataaacataatcttgcttttacttttacattttctaatctatctagaatttatttttgcaaacgccatgatgtaaaggtacagctttatctttttcccacatggatagacaattacccttacatcattccccgttgtttgaaaacgtcagtggtaagactttcttttctgctccattaatctatttgtcttgtctattcccttaccaataccacacagtttcagttactagagctttaaaagatgtctttgtttctgtgtgagcatgygttttcttatttacactagcttctaagaaacccagtagtctaattattgttgacattttgaaccagataatttatagtgggggctgtcctgtgcattctaggatgtttagcggcacccctgtcccctaatcactagaggccaggatctccccgcctcctgaccaccaaaaatatctccggtcattgccaaatgttttctagggggcaaagttgctgctggttgagaaccactggctcaatataatgaacaaattacagtgtaagtggaatgatagactcctacaaatcctactgtgtttgattttctgttccagcattaatttgcttagga

SEQ ID NO: 938700 - DNA, 681 bp, Homo sapiens
tatcaaaattatgcatatttttcttaaatttttttttctttttttacttttgatcatagaaacatgtttatgttttctcctaataaacataatcttgcttttacttttacattttctaatctatctagaatttatttttgcaaacgccatgatgtaaaggtacagctttatctttttcccacatggatagacaattacccttacatcattccccgttgtttgaaaacgtcagtggtaagactttcttttctgctccattaatctatttgtcttgtctattcccttaccaataccacacagtttcagttactagagctttaaaagatgtctttgtttctgtgtgagcatgcgttttcttatttacactagcttctaagaaacccagtagtctaattattgttgacattttgaaccagataatttatagtgggggctgtcctgtgcattctaggatgtttagcggcacccctgtcccctaatcactagaggccaggatctccccscctcctgaccaccaaaaatatctccggtcattgccaaatgttttctagggggcaaagttgctgctggttgagaaccactggctcaatataatgaacaaattacagtgtaagtggaatgatagactcctacaaatcctactgtgtttgattttctgttccagcattaatttgcttagga

SEQ ID NO: 938701 - DNA, 600 bp, Homo sapiens
agacatatttaaattacccacaaggtttgtttttacatgttacctgaaatacattatacatacagaacaaaatgcatgtctcattaaatggagtttaaatttttttctagttagtcaccaacatttaatagttgagaatggtgttataaaagtcttattttgccaggcacggtagctcacgcctgtaatcccagcactttgggaggccgaggcaggagaatcccttgagctcaggagttcaagaccagcctgggccacatagcaagacccccacctctacagaaaaaaaaaaaaaaattagctaggcttcgtggtgcatgcctatagtccctgctactcaggaagctgaggtgggaggatcacttgagctcgaaaggtcaaaggattgaagctacagtgagctacgatcgtaccattccactccagcctgggtgacagagtggagaccctgtstcaataaaaaataaaaactacaattaagaaccaaaaaataggctgggcacagtggctcatgcctgtaatcccaacactttaggagactgaggtgggtggatcacttgaagtcaggagttcaagaccagcctggccaacatggtgaaa

SEQ ID NO: 938702 - DNA, 613 bp, Homo sapiens
cacttaaggcaaggaccggccattttcacttcttttgtggtggaatgtcatcagttaaggtagggcagggcattttgacttcttttgtgattcttcagttacttcaggccatctgggtgtatatgtgcaagtcaccgggggtgtgatggcttrgcttgggctcagaggcctgacattcctgccttcttatattaataagaaaaataaagcaaaatagtgttgaagtgttagggcggcgaaaatttttggggggtggtatggagagagaatgggcgatgtttctcagggctgcttcaagtgggattaggggcggcgtgggaacctagagtgggagagattaagctgaaggaagattttgtggtaaggggtgacattgtggggttgttagaagaaacatttgtcatttagaattattggtgatggcctggatacagttttgtatgaattgaaaaactaaacagaataagagaaggagaaaaacaggtattaaaggtctaagaattgggaggacccaggacatctaattagagagtgcctaaggaggttcagcatagtcctgccagcaaagattatttactttaagacttaagagtggcagtttggggatagcatc

SEQ ID NO: 938703 - DNA, 613 bp, Homo sapiens
cacttaaggcaaggaccggccattttcacttcttttgtggtggaatgtcatcagttaaggtagggcagggcattttgacttcttttgtgattcttcagttacttcaggccatctgggtgtatatgtgcaagtcaccgggggtgtgatggcttggcttgggctcagaggcctgacattcctgccttcttatattaataagaaaaataaagcaaaatagtgttgaagtgttrgggcggcgaaaatttttggggggtggtatggagagagaatgggcgatgtttctcagggctgcttcaagtgggattaggggcggcgtgggaacctagagtgggagagattaagctgaaggaagattttgtggtaaggggtgacattgtggggttgttagaagaaacatttgtcatttagaattattggtgatggcctggatacagttttgtatgaattgaaaaactaaacagaataagagaaggagaaaaacaggtattaaaggtctaagaattgggaggacccaggacatctaattagagagtgcctaaggaggttcagcatagtcctgccagcaaagattatttactttaagacttaagagtggcagtttggggatagcatc

SEQ ID NO: 938704 - DNA, 620 bp, Homo sapiens; identical to SEQ ID NO: 925197

SEQ ID NO: 938705 - DNA, 768 bp, Homo sapiens
ggcacagtgccaggcatttattaaatgctttacaaaagttagatgctgctgctgctgttatttggtacatgggtacattaggagcatctcaagttactccccaatctaagtggccactgcctccctgtataaaagcagtgggtagcagccattaaatttttttataattttatttagacataattcacataccatagcattcacccattacaaatgtacaatgaatgttttttagtatattcagagctgtacaatcaattttagaaccaatttagtatttagaaaccagtttagaaccaaacttagaatcaattttgggagatgtttttatcacccaaaaaagaaaccccatagccattactccccatttgccccaagctctcctcycatccacgcccctggcaatcactaatctattttctgtgtgtcctgaacatttcatataagtggaaccatacgatatgtggtctttgtgagtgacttgttttacttagcatgatggtttcaaagttcatctaagcttagcatgtgccaatacttcatttctcattattgctgaataatattccatggtacggatagccttattttattttgccttttattagttggtggatatttgagttgtttctcctttttggctattattaataattctgcatgcgtataatcccagtgccttgggaggccaaggcaggaggatcacatgaggccaagagttagagaccagcctgggcaacatagcaacaccccatctccacaaaaaaa

SEQ ID NO: 938706 - DNA, 628 bp, Homo sapiens
ggagataaatgatgttttgcacatcggccacaaaaccagattaaggaacttctggttccagacaacatgaagtaggtccatttctctctattcccctcactaagaacagctagaactgtatgtattatacatcaaacactcaagaaaaagctgtgaaaattcgagaaggcagacggactagagacagcaggacctgaggaaacatgtagcattttctttatcctcactgaggcctggagagtccagccacgcagraacactaacagacacagacccaacaaaaggccaaagaaaagccagttctctctctaggtcaaaggaatggagcaacttagcaggaaggaaaatttttcaacaacaatggcctcctccagccaagcaccagaggagaggttgtggccccgcccacactcctgatgggtggatcagcagagacctgatggagagtctgacctccaccccctgcactcagaaggcacctcccaacaccccaggtgtcagggcacctgtggaggaacccagacttctatggctaattgacagtaatgaggcaacagcctcctctcctgatggtgtgctgtcagaggagacctgctgaagcagaaggtgaacataagaacgtggtgtg

SEQ ID NO: 938707 - DNA, 757 bp, Homo sapiens
agcgacaaatgacacagcagctagaagcaacctgggccctgaaatgggtctgggaccagaaaagaggcaatcacagggaaattggtagcattcacacaaggcctgtagaccggctggtaatagtgtcatctgctatgtgactgtaagtttaacacaatgaattacgtaaccgcagccttcagggaagctgggtggagggtagggcagacactttatactagttttgctatttttgcaactcttttgtaagcatgagattatttccaaggtgtattagtctgttttcacactgctatgaagaaatacccaagactgggtactttataaaggaaagaggtttaattgactcacagttcctcatgggtggggaggcctcaggaaacttacaatsacagtggaaggcaaagggtaagaaagcaccttcttcacaaggtggcaggagagagaagcgcaaaggaggaacttccagacacttataaaaccatcagctctcatgagaactcactatgatgagaacagcatgggggaactgcctgtgcgatccaatcacctccctccctggacacatagggattacaggtcaagatgagatttgggtggggacacagagccaaaccatatcgcaagggaaaagctaagagacaaaggaaggccactgactaatgggcgttcttcaccatccttgctctggatttgtctcaccaagggcgttgcccaagccaaacccccaagttgagaagcaggactttctgtggtt

SEQ ID NO: 938708 - DNA, 757 bp, Homo sapiens
agcgacaaatgacacagcagctagaagcaacctgggccctgaaatgggtctgggaccagaaaagaggcaatcacagggaaattggtagcattcacacaaggcctgtagaccggctggtaatagtgtcatctgctatgtgactgtaagtttaacacaatgaattacgtaaccgcagccttcagggaagctgggtggagggtagggcagacactttatactagttttgctatttttgcaactcttttgtaagcatgagattatttccaaggtgtattagtctgttttcacactgctatgaagaaatacccaagactgggtactttataaaggaaagaggtttaattgactcacagttcctcatgggtggggaggcctcaggaaacttacaatgacagtggaaggcaaagggtaagaaagcaccttcttcacaaggtggcaggagasagaagcgcaaaggaggaacttccagacacttataaaaccatcagctctcatgagaactcactatgatgagaacagcatgggggaactgcctgtgcgatccaatcacctccctccctggacacatagggattacaggtcaagatgagatttgggtggggacacagagccaaaccatatcgcaagggaaaagctaagagacaaaggaaggccactgactaatgggcgttcttcaccatccttgctctggatttgtctcaccaagggcgttgcccaagccaaacccccaagttgagaagcaggactttctgtggtt

SEQ ID NO: 938709 - DNA, 750 bp, Homo sapiens
agactctcctccctcgaacacttccttcccaaaagtaaaccatgttagaattcttagaatggcaacttcctacctgggctttgccctgggagcccttgtatccttccatttcttagccaggaagccctggggcaacgctgcctgttggagagaagcccccctctatgatccamggggagagcttggcaaagaggcagcaagatggtgaattaataaagcactgtaggccatgtgtgtggcctttagaaggaagagaacagagcctctcaggggcagagtctgggttcctttgttaaagattcttggttctgctccaatctgagcagattctagtctcagtctgagctgaatgtttgggatccagccacagacatcttcttgagtatttttaaatgttctaacccatcacagtgaccagatatgttgccaacatagcgatagacgacacacggtggttactttcttttgctctctgaaagcagaatctaggaagaaaggctaatctggtcagtggaggtttgggggtcagaaggctggggtctgtctgcccattgccacctcagttctacccatggcagctcaactacagtttccaaggagggagcagcagcctcctgaggaaccacagaccctccaaagttggcaggggttaggtgggcaggcctcccaacaggggtgggaagtggaatgatttctaaaaggagatcactttgaaattttactagagtagaaatatcgataataaatacc

SEQ ID NO: 938710 - DNA, 606 bp, Homo sapiens
atctgttctctatctctgcatttttgttatttcaagcaggttatatcaatggaatcatagcatatgtaaccttcttagattagctgttttcactgagtgtaattccctggagattcatccaggctgttttgtgcatcagtagttctttccacagtgtggatatgccacagggagwttaattgctccctgttgaaggacatctaggtagtttccagttttcagctattaggaataaagctactgctatgaatgtctgtgtccctgttattcatcacataagtttttatttctctgaaataaatgcccaagaatgcaattgctgggtcatatggtaagtcccatttttagttttaaaagacactaccaaactgtttccagaatgaatgccattttacgtccccactagctacatatgagagatccagtctctcagcatcctcaccagtatttggttttgtcgctattttttattttaaccattctgataagtgtgcagtgctatctcgttgtggttttaatttgcatcttcctaatgaccagtgatgttgaaaatcttttcacatgcttatttataaatcttaattttttaaatggtgaaaatagcaa

SEQ ID NO: 938711 - DNA, 506 bp, Homo sapiens
tcatttctccaaaagccctggttcctaggtgaggaacaatattacacttactatacaaaatcgctgacattcagccatctttgacatacaaaaatagtaatctttgtagtaatgtttcaacctaaaacaagaaaccaaggcccagattctaagcatgctccttaccacagtcatgtcactatgtctagctctttcagtggatsgagctaggaaatacaagttttctatttttatttatttttgagatagagtctcactctgttgcccaggctgaagtgcagtggtgtgatctcggctcacttcaacctccacctcctgggttgagtgattctcatgcctcagtctcccaagtagctgggactataggccactacacctggctaattttttaattttttgtagagccaggatctcactgtgttgtccaggctggtcttgaactcctgaactcaagtgatccaccagccttggtctcccaaagtgctgggattataggtatgagccac

SEQ ID NO: 938712 - DNA, 588 bp, Homo sapiens
ccattgatctctgatagcttccttgctttttggcccatgaaaccagaatcattttatactttctctggctagatctggagacagtcatttctccaaaagccctggttcctaggtgaggaacaatattacacttactatacaaaatcgctgacattcagccatctttgacatacaaaaatagtaatctttgtagtaatgtttcaacctaaaacaagaaaccaaggcccagattctaagcatgctccttaccacagtcatgtcactatgtctagctctttcagtggatggagctaggaaatacaagttttctatttttatttatttttgagatagagtctcactctgttgcccaggctgragtgcagtggtgtgatctcggctcacttcaacctccacctcctgggttgagtgattctcatgcctcagtctcccaagtagctgggactataggccactacacctggctaattttttaattttttgtagagccaggatctcactgtgttgtccaggctggtcttgaactcctgaactcaagtgatccaccagccttggtctcccaaagtgctgggattataggtatgagcc

SEQ ID NO: 938713 - DNA, 642 bp, Homo sapiens
ccaggccagcttgacactgcacagccccagacacacgcacacatacatagaaagggaagcttctcttgaccttgtttgcactgttacaacacacaatagctcaggtacacagcaacaacatctgagcactcagtggatattgtttggagaaagaagtaatggaacaaaatgtaagagacagaagatgctgacttgtcttcttcactcaggctaaagttttgccatttaataattcaacagcagttgtgcagatagctctagtttctatgaatttcttcaaagttctttgtaaatgccatttctcagtctgagaaaaatctctctctctctytttttttttttttttttttgacagagtctcactctgttgcccaggctggagtgcagtgatgcaatcttggctcactgcaagctccgcctcccgggttcatgccattctcctgtctcagcctcccaagtagctggaattacaggtgcccgccaccatacctggctaattttttgtatttttagtagagatggggtttcactgtgttagccaggatggtcttgatctcctgaccttgtgatctgcctgcctcggcctcccaaagtgctgggattacaggcgtgagccactgcgcccgtcctgagaaaaatctc

SEQ ID NO: 938714 - DNA, 574 bp, Homo sapiens
ccttgtactcatctcgctacatttgtgagtgcttgattttttttttttttttttttactgataaggtctcactctgtcgcccaagctggagtgcattggtgtgatcccagcccactgcagccttgaacttctgggctcaagcaatgctcccacctcagtctctgcagcagctaagactacaggcgtayaccaccatacctggctaattaaaaaatttattgtagagacaggggtgtggctgctttccaactcctgacgtcaagcaatcctcacacctcagcttctaaaagtgctgggattacaggcatgagccactgtgctcagccaatgcttgaatttttaacgatgaaaaaaatccaaaagataaaacgggtgttggtggatccgggagctgacaggatttgtttgctggtcacataatatgggtgaagattatacctggcattttacatgccttatttaattaccaccagggacccagtgaccacgacctcagagggctccctgccctgcacaattacctggaacattctttcccttctcatcctgacagactcttcattgaaggcccagc

SEQ ID NO: 938715 - DNA, 491 bp, Homo sapiens
ccaccaatcctccgcactggcctccctgtgtccctgtccctgtcccctcccaccacaccctcacacgcccgtcactccaccttctgtgcagggccatgggcagcactcctggccaccctcaccacatgccatcacattttcctgctcacattttccatgactccaatgttctgttttgttgttttgtttttttttttttaagacggagtctctctctgccacccaggctggagtgcagtggcgcaatctcggctcactgcaagctccgcctcccgggttcacgccattctcctgtctcagcctcccgagtagccgggactacaggggcccgccaccatacccggctaattttttktgtgtttttagtagagacggggtttcaccgtgttagccaggatggtctcgatctcctgacctcgtgatccacccacctcagcctcccaaagtgctgagattacaggcgtgagtcaccgcgcccggccaactccaaa

SEQ ID NO: 938716 - DNA, 717 bp, Homo sapiens
ggcaggagaattgcttgaacccaggagttggaggttgcagtgagccgaaacagcctgcactccagcctggcgacagagtgagactccgtctcaaaaaaataaaaataaaaatttaccttcagctacaggtacatattttcagcttcctacttgacatctccaattagctgttcaaaaagtatctcatatatagtatgtcccaaatagaatcattgagttccccctttccctccctaaggcttcaccatcagctttgtgactttctatttctacccatttgttctgaactctacctgtcagcctcaatctctcttgttctttcactgtccaaatctgccttccctccctcatccaagacatgtttgattcttgtctggactcttgaaacaggcttgtacttcacacttctaccttcactgttgcttctgcagtcaatcgatcccctattcagtatccagaagagttttctaaatggaaatcagattggtatctaaggtgtcaaatcctctgatagcttcacattgtacccagaataaggttcatggtccataargtcctacatggtctgccttctgtctctgtctcctaatcttactttagtctctcctttgttctcttccctccagccactggtgcttttcttgcttttccctagaacttgtccaggctcccatctcagctcttgttccttcaccttggaatattctccaccaactt

SEQ ID NO: 938717 - DNA, 588 bp, Homo sapiens
ttgtcaaactcattttccatccagttttgtttccttgctggcgaggagttgtgatcatttggagaagagggattctggtttttggaattttcagcctttttgagctggtttttcctcatcttagtggatttgtctaccttttgtttttgctgtcggtgaccttcggatggagtttttgcatgcttgttctttttgttgatttygatactgttgctttctgtttgttagttttccttctaacagtcaggtccctcttctgcaggtctcctggagtttgctgggattccactccagaccctgtttgcctaggtatcaccaacagaggctgcagaacagcaaagattgctgcctgctccttcctctggaagcttcgtcccagagggacacctgccagataccagccggagctcttgtatatgaggcgtctgtcaacccctgctgggagttgtctccctgtcaggatgcatgggggtcagggacccccttgaggaggcagtctgtcccttagcagagctcgagtgctgtgctgggagatctgctgctctcttcagagctgacaggcaggaacgtttaagtctgctgaagctg

SEQ ID NO: 938718 - DNA, 588 bp, Homo sapiens
ttgtcaaactcattttccatccagttttgtttccttgctggcgaggagttgtgatcatttggagaagagggattctggtttttggaattttcagcctttttgagctggtttttcctcatcttagtggatttgtctaccttttgtttttgctgtcggtgaccttcggatggagtttttgcatgcttgttctttttgttgatttcgatactgttgctttctgtttgttagttttccttctaacagtcaggtccctcttctgcaggtctcctggagtttgctgggattccactccagaccctgtttgcctaggtatcaccaacagaggctgcagaacagcaaagattgctgcctgctccttcctctggaagcttcgtcccagagggacacctgccagataccagccggagckcttgtatatgaggcgtctgtcaacccctgctgggagttgtctccctgtcaggatgcatgggggtcagggacccccttgaggaggcagtctgtcccttagcagagctcgagtgctgtgctgggagatctgctgctctcttcagagctgacaggcaggaacgtttaagtctgctgaagctg

SEQ ID NO: 938719 - DNA, 685 bp, Homo sapiens
acaaatggcaggctttcagtcaccacctatgaagctatgatgctgtgttttgattaaaaggctactgtacactgtattttgtttttttagattagaagaaacatcagaaacccttgagggaccaggaagtgagtcctcaagggatgactagccattatgctgcacrgctttttaaaatatttcctccagaatcatttgtctcattattaacagttttggtcttagaagtttctgtttcatttggaaaaggcagttccaagatggccgaataggaacagctccagtctacagttcccagtttgagtgacgcagaagacgggtgatttctccatttccaactgaggtaccaggttcatctcactggggcttgtcggacagtgggggtaggacagtgggtgcagcacacccaccgagcatgagccaacgcagggcgaggcatcgcctcacccaggaagcacaagggctcagggaattccctttcctagccaagggaagctgtgacagatggcacgtggaaaatcgggtcactcccaccctaatactgcacttttccaatggtcttagcaaacagcacactaggagattatatcccgcgcctggctcagagggtcccaagcccatggagcctcactcattgctagcacagcagtctgagatcgaagtgcaaagcggcagcagtgctggg

SEQ ID NO: 938720 - DNA, 685 bp, Homo sapiens
acaaatggcaggctttcagtcaccacctatgaagctatgatgctgtgttttgattaaaaggctactgtacactgtattttgtttttttagattagaagaaacatcagaaacccttgagggaccaggaagtgagtcctcaagggatgactagccattatgctgcacggctttttaaaatatttcctccagaatcatttgtctcattattaacagttttggtcttagaagtttctgtttcatttggaaaaggcagttccaagatggccgaataggaacagctccagtctacagttcccagtttgagtgacgcagaagacgggtgatttctccatttccaactgaggtaccaggttcatctcactggggcttgtcggacagtgggggtaggacagtgggtgcagcacacccaccgagcatgagccaacgcagggcgaggcatcgcctcacccrggaagcacaagggctcagggaattccctttcctagccaagggaagctgtgacagatggcacgtggaaaatcgggtcactcccaccctaatactgcacttttccaatggtcttagcaaacagcacactaggagattatatcccgcgcctggctcagagggtcccaagcccatggagcctcactcattgctagcacagcagtctgagatcgaagtgcaaagcggcagcagtgctggg

SEQ ID NO: 938721 - DNA, 609 bp, Homo sapiens
  misc_feature 479, 480, 481, 482, 483, 484, 485, 486, 487, 488, 489, 490,491, 492, 493, 494, 495, 496, 497, 498, 499, 500, 501, 502,503, 504, 505, 506, 507, 508, 509, 510, 511, 512, 513, 514,515, 516, 517, 518, 519, 520, 521, 522, 523, 524, 525: n = A,T,C or G
  misc_feature 526, 527, 528, 529, 530, 531, 532, 533, 534, 535, 536, 537,538, 539, 540, 541, 542, 543, 544, 545, 546, 547, 548, 549,550, 551, 552, 553, 554, 555, 556, 557, 558, 559, 560, 561,562, 563, 564, 565, 566, 567, 568, 569, 570, 571, 572: n = A,T,C or G
  misc_feature 573, 574, 575, 576, 577, 578: n = A,T,C or G
acttctggtcttttaatattgacccaagtttaaaaacatgttcatataaaaaagttactggaagaaatttataaatgtaactggtggttatttttagatgacagaattaaaagtgatctttttggtattttttccacaacgagcacgtgtcatttttatgttaatttcattttatgcgaaatgctccagygcagtacaggctagtgggttcagggtggctgtgactaagtaatgtagatggggtaccttagacaaagtttccagactagaggctggaagtaagaggtccgggtgcccttttccacactgcagaccacggacttttccggtttctgaacaagtgagacaggccggctaaggacatttataatctccatgggtgagggccccaccctcatgaccatctaatcttgattacctcccgaaggccccacctcctaacttcctaatacaatcacttcttgggggaagagggtgtnnnnnnnnnnnnnnnnnnnnnnnnnnnnnnnnnnnnnnnnnnnnnnnnnnnnnnnnnnnnnnnnnnnnnnnnnnnnnnnnnnnnnnnnnnnnnnnnnnnncctcccagttcaagccattctgcctcagcct

SEQ ID NO: 938722 - DNA, 611 bp, Homo sapiens
atgtcatgccctaaaaaggggcatcttcagagtcgtgatggaggaggacaaagatagaagctgataggaaagcttcgaagaagacaagatttggagctcactcaggaacaccaaaaacaaaaataggccgggtgcggtggctcacgcctgtaatctcagcactttgagaggctgaggtgggggcggatcatgaggtcaagaaatcgagaccatcctggccaacatggtgaaacccygtctctactaaaaatacaaaaattagccgagcgtggtggtgtgcgcttgtaatctcagctacctgggaggctgaggcaggagaattgcttgaacccaggaggcagaggttgcagtgagccaagatcgcgccactacactccaggctggcgacggtcagacccgcctcaaaaaaaaaaatgtcccccaaaactccaaaaattaacaacctccccccgccctgccaaaaaaaagaaaagaaaaaacaaaaacaagaaggtaggttgttcaagttgtgcccataaggcttggccaacagagtagtgagggacagctttcttctacagcatgggaaatacctgttgagatactcatttttctgcaatatttgatttttg

SEQ ID NO: 938723 - DNA, 709 bp, Homo sapiens
ggtacttttcgaggcatccactagggatcttggaatgtatcctccttggataagggggcaactactgtaatgctggcttcaaagagtgagttagaaagtgctctctcctcttcatgtcttgggaagaggtttaattcttaactctgctggaattctgggargtttttgattactgattcaatctccttactagttataggtctatttatattttctgtttcttcatgattcatttttagtaggttatgtgtttctaggagtttgtccattttgtttcatttatccagtttgttggctaattgtctatgagactcccttataatcctgtttctgtaaggttgaccattattatcttctgtttcatttctggtattagtaattcaggtcttctgttttcttggtttgtccattagtttgatattttcattaaatcaattttggttttgttgattttctcttccctttcctttttctgtttttttttttttttgttttttgagacggagtctcgctctgtcacccaggctggattgcagtggcacgatctctgctcactgcaagctcccctgcctcctgggttcaagcgattctcctgcctcagtctcccaagtagctgggactacaggcatccgccaccacgcctggctaattttttttatttttaatttttagtagagatggggttttaccatgttagccaggatggtct

SEQ ID NO: 938724 - DNA, 783 bp, Homo sapiens
accaaatttcacacctatataagtgtagtttattataccttaaaaaacatatcttataatataccttaattgctgtatcttaataacatttttatcattattttactttatttttttttgagacagagtctcactctgtagcccaggctggagtacagtggtgtgatctcagttcattgcaaccttcgcctcccaggttcaagcgattctcactcctcagccatccgagtagctggtatttcaggcatgcaccaccaggctcggctaatttgtgtatttttagtagagacgggattttgccatgttggccaggctggtctcaaactcctggcctcaagtgatccacccacctcagcctctcaaagtctgggattacaggcgtgagccactgtgcccaccccatttttatataacgaaatgcttttaaaaagacaaaagcactcagttgctacatagtgtaataccagctatatagttayatttaaaagcaaaaaataaaacaaaaataaaatgccaggaaaccatgaaaataaacaagtaagaagataaagcaggcaaaaatttatttctatctcccagcattcatataaaattaattccagttaaagacctaaatgtttccataatttatatgggatttctacaaatcaataacaaaaagaatagacccattgaaaagtaggcaaacaccttgaatggtcaaatcacagatggggaaacaggaagggccaagcaacatatgaaaagatgctcatgctcactagtaagcaacttaaaaacccc

SEQ ID NO: 938725 - DNA, 783 bp, Homo sapiens
accaaatttcacacctatataagtgtagtttattataccttaaaaaacatatcttataatataccttaattgctgtatcttaataacatttttatcattattttactttatttttttttgagacagagtctcactctgtagcccaggctggagtacagtggtgtgatctcagttcattgcaaccttcgcctcccaggttcaagcgattctcactcctcagccatccgagtagctggtatttcaggcatgcaccaccaggctcggctaatttgtgtatttttagtagagacgggattttgccatgttggccaggctggtctcaaactcctggcctcaagtgatccacccacctcagcctctcaaagtctgggattacaggcgtgagccactgtgcccaccccatttttatataacgaaatgcttttaaaaagacaaaagcactcagttgctacatagtgtaataccagctatatagttacatttaaaagcaaaaaataaaacaaaaataaaatgccaggaaaccatgaaaataaacaagtaagaagataaagcaggcaaaaatttatttctatctcccagcattcatawaaaattaattccagttaaagacctaaatgtttccataatttatatgggatttctacaaatcaataacaaaaagaatagacccattgaaaagtaggcaaacaccttgaatggtcaaatcacagatggggaaacaggaagggccaagcaacatatgaaaagatgctcatgctcactagtaagcaacttaaaaacccc

SEQ ID NO: 938726 - DNA, 824 bp, Homo sapiens
tagaaatgaggaaatagttgggaactggagcaaaggtgagcctcgttatgtttcagcaaggaaactggtggcattttgcccctgccctagagatttgtagaactttgaacttgagagaaatgatttatggtacctggaggaagaaatttctaagcagcaaagcattcaaggggtgacttttggtgctgttaaaggcattcagttttatgagggaagaagagcatataagtttggaaaatttgcagcctgactgtgatagaaaagaaaaacgcagggccgggcgtggtggctcacgcctgtaatcccagcactttgggaggccgaggccggtggatcacaaggtcaggagatcgagaccatcctggctaacatggtgaaaccctgtctctactaaaaatacaaaaaattagccaggcatggtggcgggcgcctgtagtcccagctactctggaggctgaggcagtagaatggcgtgaacctgggaggcggagcttgcagtgagycgagatcgcgccactgcactccagcctgggtgacagagcgagactcagtctcaaaaaaaaaagaaaagaaaagaaaagaaaaacccgttctctgaggagaaattcaagcctgctgcagaaattggcataagtaacaaagagccaaatgttagtcccccagacaatggggaaaatgtctccagggcgtgtcagaggtcttcaaggcagcccttcccatcatcataagccccgagacctaggagaaaatggtttcatggactgggcctagggtccacgtactgtgtgtagcatagggacttggtgctctgggtcccagccgct

SEQ ID NO: 938727 - DNA, 776 bp, Homo sapiens
taaaccaacaatattagtcatcttttttaaagagctacacaaacaaaatctattttgctattaagctgaatatattttattttattttacctattttttgagatggagtttcactctttcacccaggctagagtgaagtggcatgatctcagctcactgcaacctctgccccctggcttccagtgattctcctgacacagcctcccaagtagctgggattataggaggccaccaccatgcttggctaatttttgtatttttagtagagacaggttttcaccatgttggtcaggctggtctcgaactcttgacctcaggtgatccacccaccttggcctcccaaagtgctaggattacaggcatgagcaactgcacctggcctaagctgaatttatagttttatgactgtaaaacatctaacagagatcaatgtaatcctgtctaaccagcaaacccaggcaacaaaatgtaagctaacaattctgaaacaaatttttattttaccaacaaatttaaaaccaatttatttatcaaagattcatatgaatcccatgagctaaaaggcatttgggktttttttttttttacacttttaagtgtcatttgcatatcttatctctaagccaacttgaaaagaattccttaaaggatttctggccaactatgccagattgtattatgtatatacaacatacaacataacacatgcatatgtgtctaaacacacataaacacatatacacacaaagatcttatagctttcatttaaaaatttt

SEQ ID NO: 938728 - DNA, 576 bp, Homo sapiens
caccaaaggcatgattcagggaagaaataattaataaactggacttcactaaaattaaaaatttctgctttgcaaatgactgtcaacattatgtgaagagaarccacagactgggaggaaggttttttttgcaatagaaatatctgattttaaatatacaaatatctcttaaagcccagtaataaaaaacaatgcaagttgatttaaaaatggaccaaagaccttaacagataagttgccaaagaagatatacagatggcacataaacatatgaaaagatgttccacattatatgtcatcagggaaatgcacatcaaaacaaccactgcacgcctatttggaatgctcaaatccagaaaacttacacaatcaaatactgacaagaaagtattagacaacagaaactctcattcactgctggtgggaataaaaaaaaaatggtacaaccactttagaagacagtttgatggtttctcataacaactaaacattgtcttactacatgatccaccagtcatactccttgatatgtaccctaaaatgctaaaaacttctgtctacacgaaaacctgcatg

SEQ ID NO: 938729 - DNA, 576 bp, Homo sapiens
caccaaaggcatgattcagggaagaaataattaataaactggacttcactaaaattaaaaatttctgctttgcaaatgactgtcaacattatgtgaagagaaaccacagactgrgaggaaggttttttttgcaatagaaatatctgattttaaatatacaaatatctcttaaagcccagtaataaaaaacaatgcaagttgatttaaaaatggaccaaagaccttaacagataagttgccaaagaagatatacagatggcacataaacatatgaaaagatgttccacattatatgtcatcagggaaatgcacatcaaaacaaccactgcacgcctatttggaatgctcaaatccagaaaacttacacaatcaaatactgacaagaaagtattagacaacagaaactctcattcactgctggtgggaataaaaaaaaaatggtacaaccactttagaagacagtttgatggtttctcataacaactaaacattgtcttactacatgatccaccagtcatactccttgatatgtaccctaaaatgctaaaaacttctgtctacacgaaaacctgcatg

SEQ ID NO: 938730 - DNA, 734 bp, Homo sapiens
gacctggccccgtgaaggcgagcgttcattcatgcacttatttattcctgcattatgccccctcgccccctctcctctggtaggtgtcaggaagccattgttatcattggtgggtctatgtcattttaatgtcagggctgtactttcaaatggaaatcaggcaattacgctccacatggagaaatctgacagatgcagaggttttacaccactggccgtgtggcagggacaaaggcgaccagggctcccaggggacggttaaataaatagaatatgtttcaagagtgcagaaaaattcaagaataattaactgcctgatgagagttcatagatcctgtggctgtttatcttcagaatgtgataatgatatgtcaacgaaccacttaactcatccttgtaaaggcagcgttagaaaactgattacaatgtgcatttacacagaggcagactgctctgtgcatctgttttccggtttctaaatgcaaagctttgcagtattttaacttgctctgtttccccctcgcaggggttctggttggagaaagatggaggcatgttccaagtctgatgtctacctgatgaagcactgtcrtgtctacattcactgttagctaaccacagtggtatctacagataccagtggtgtgtaatatcagtgttatctaatatcagtggtatccacctgggaactcaaactgaaaaacatggtaactatatcattgtggctattgttg

SEQ ID NO: 938731 - DNA, 665 bp, Homo sapiens
ggatttggagagtcagaaaaacattgttttgagtcccggagttgttacttagagagctttgtgagtttaccttggaaaagtcacataaatcccagagacttgattttctgatttgtaacagctcacacagtaagtgattataaggtagtcctgaatgtatttaaaaagaatgactattttatcctaaattattatttttccacactatagagatgatataatagttgtaactaataattatttaccttttactatatttcaagggcttttctaagtattttataagcattttctcacttaatcctcacaataaccctgagatcagtattatcattatcctcattttcaaatgaagaaagcatggtagaagcaggttgaggaacttagctgaggccrcacactcggtgggagcactgctctatccaacagctatttcctgagtctatgttatgtgccaggcactgttgtaggccaaaagataccacagtgaatgaagagacacaaatgcctgttctcagaaatgacatcctggtgataatgctaatcttatcagcaactgaaacttattaaacatttaccaggagctaggtgctacagtaatctcatatattttgtaaactacttctttgaggtaggtaattgtttttattccactttacgggaaa

SEQ ID NO: 938732 - DNA, 805 bp, Homo sapiens
atagatttgtgagggcagcacctgcatctttgaagagccttgtaattgctcttctctgtacatcaaatctaacagcgggaaccacagtcactcaaataccaaatttaaatacaatggaaataactggatcccaaggtggcaggggccaagtggtggtactcaacggtcaaaggcaaagtgggtgtagatactataatggacagcagagacaaaacagcaatcagaatattcttactcgtgtagagctctggcattggctaactaatcatggtgttcctagaagtgaaaytgataggaagtctactgtattcctacttaatttttctaaggagaaaacttctaggtcaaatggacaaaagagtaatttaaattataaaaacagacaattatggcccctcaattaatttccagactttagccagtttacagacccagaaccccttgaatgaaggggaggacgggtccccttgaagaaggaccccactatattaccaacagtttatgcggtgaatctttctctcatccttccccaaggagacctccggccttttaccaaggtaactgtgtactggggaaaggaaatgatcagaccttttgggtactagtggacactggctctgagctgatgttgattccaggggactcaaacatcattgtggttctccagttaaagtaggggcttatggaggtcaggtaattaatggagcttcagctcaggtctaacttacattgggtctagtgggtccctggactcatcctgtggtcatttccccagtgtcagaatgcacaattggcatagatgtac

SEQ ID NO: 938733 - DNA, 650 bp, Homo sapiens
aacagccgatttggatgccatcaagacacctaaaaccttatcatgagccagatgccgaggaagagattctgggaggatcccgaggaccccctagttgcagccatgtcgagactgacgctgaggaggtccccaactgtcacgagcaacacccgtcaaacacagccacccacatggggacagatcaagaagctgtcacagatggcagaagaaaacctgaggaaagcagtacaaccagtcacaatgagtaatttaatggtagctatgatagcagtgatcaccactgccatgagtattccttcagcaagggctgacacagagaacaattatacttattgggcatatttatcaatcttggctggcaataatgcctagatgcaatcactctataacacagttacacatgctttctgatctcagtatttaccataataaatctgctactataattgaggcataccaccctcaaaaacctttttgtaaamaggattggacccagttagaaaaaatgaacatacttgtttagtaagattgcattgcagaacaggcagaggtgctgcacaacgattcctatggaatcattactaattggtcccctaaggggatgtttagcttgaattgcacctctcagtctgcgagccacagccacacta

SEQ ID NO: 938734 - DNA, 596 bp, Homo sapiens
aactttttggtctcctctgacttcactgatttctccttctttctctcctctgctgactttccacatcttctccaccactcaacaagtggagtgtccagtttagtgcttgggtcttgactcttttctccacagacaagctctctaagaagtgtcacctactcccacggccttaaacatcatttatacaccacgaactcccaaatgcatatctctacctacgaacttttcttttaatttgaccatatatgcacttgctttctaaaaatctccaattccgtatctgattccttaaacttactaattttccaatctcaatcaaccccattcctcctatagttttctgcataacagtaaggagaaattttattctatcaagtgctcagatcaaaaaagttgggagtcattactsattcctctcttctcacccaccatatacaactacaaaccaaaaataaaacagtacattccccaactgactgaaagactgtcctcttagccaagggcattccaaagtagacctgaaaatctagttcaggcaatgatgggggggagggggttggacatgtctcattacaaccttctccctttgaaattca

SEQ ID NO: 938735 - DNA, 621 bp, Homo sapiens
tggcttccttcattattggaatcacttacagaggaaagagcaccagctttgaaatcggacagagccagttctcccactagctctgcttaccagcagtgccatcctgggcgattacttcctctatcaaagctcagtttccccacttggagtgggagttgtagattatacaagacaatacatatgaagttcctaacccatgtagcagctgtgcgatggttatggttattcarattttatcaagcacctacaagggcccgatgcaggcagtttcaaccttacagagagtgtgctttcctggttgcaaacccctgaagccctatttacttttatcacagtggctcccaaatgtctggaaagcaggcaggcatgtaggggacgtgctggctcctacacaccatcctatctaaacttctgtagggcctgtattctcagtaacttctgcacagagtacttgcattgaaactgggcttgaagccataagcagtgtttcttaacaaggggtgagcattggaatcaccaggggaccctattgacaaattttaactcagtaggtctggagtagggcccagctgtctgtgtgcttttacaagctccttaagtgattctgatgtgcacccccag

SEQ ID NO: 938736 - DNA, 555 bp, Homo sapiens
aagcagtgttaagagggaaattgatagcactaaatgcccacatcaaaaagctagaaagatctcaaagtgataccctaacatcacaactaaaagaactagagagccatgagcaaacaaaccccaaagatagcagaggccaagaaataatcaaaagcagagatgaactgaaggagataaggacatgaaaacccgttcaaaaaatcagtgaatccaggagctggtttttttgaaaaaataaaataaaatagaccattagctagactaataaagaagaaaagagagaaaaatcaagtagacacaacaaaaaataataaagggaatatcaccactraccccaagaaaatacaaacaaccatcagagaacactataaacatctctatgtaaataaactaaaaaatcaagaagaaatggataaattcctggacacatacaccctcccaggactgaaccaggaagaagttgaatctctgaataggccaataataaggtctgaaattgaagcagtaatgtataaccttccaaccaaaaaaaacaaaaaaagcccaggatcagat

SEQ ID NO: 938737 - DNA, 608 bp, Homo sapiens
ccgtcatgactatggaattccccagccatatggaactgtgagtcaattaaaactctttcctttataaatcacccagtctcaggcatgtctttatcagcagcgtgaacatggactaatacagtatatataccacattttctttatcctttcatctgctcatggacacttcagttgattccataacttggctattgtgaatagcgctgcaatgaatgtgggcgtgcagatatctcttcaatgtagtttctggattatatggtaattctattgttagttttttgaagaacctccatgctgttttctacaatggctatgtttacattctcaccaacagtgtgtgtaatctttgtctttttaataagacatttaatcaccatttcgatgggtatgagatgatatttcactgtggttttaatctgcatttccctaatgattagtgatattgaacattttttcttgcttggtakaaatgcgtggttgaggtttgcctcttcatctgggaagagctttagggtgagctttgagggtgcactgagccattgtttgaaagcctggatggtacaagtctagtgcctgagctttgctaaaaggggccttgaggctgagga

SEQ ID NO: 938738 - DNA, 717 bp, Homo sapiens
tgcgcgccttgcgtggctttttcaggcgcaccgggggactgtccctggagctggagatctcgcggtcgccctcctccttcactgcggacacagcggcatgtcagggcccggcctcgcagccgccgccggtgccctcccgctcctgcccgtggcgtttgtgtaacctcggcttccgacagcggtggttccgcgacacccaagctcgcgggggccgctctcagacgggacctctggggccccgggaacaggacatgaaccctgaggggaacaggacggcggcgggagcgcccgaggccgagaccccccgggcagctccggggagaaagaacccgaagctggcgagaactccagtccctgcgccgcgctcggcgctctgcccgcgctccctggagggataaacggagccgcgacgatggaaccggacccagcctgccagcgtaggggaagggacccagggtttctggcggagtgagctccgcgtctgggccccagtttctccggctgcgtccgtgacaggaagggaggaagccgaaggctggggtstggggagagaaacctgcgtggagggacaaaaacctgctctctccggaatcactctttgtcctcaaggacagatcattgtgccccgcctggcgttgcccctatatggaaacgaattcgtagtgatgatttctcccgacactcgctacctacacagggcgctgggcggaaggctcc

SEQ ID NO: 938739 - DNA, 567 bp, Homo sapiens
tcatcaggcaccagtgaggagcttctggcgactgggcagaagcaaagctcagcgaacagcatgggcaaagtgagagagagagaagcaaggccacgggagaagctggcctcgaaggagaaagagattgtggctcagggactcatagttgttttaagttcacacattttctagaagcaagtggcactggaaaaactggatatatgatgtgtcctttgggtaacagttgcaggaaacccagcctaggcaagagaagaggtgtatatattcatacatacatgaatatatacatattcatgtgcctgaggctggctacaggcacagcttgaaccagggccccaracaatgtctctcaccatctttctgctctcgtggcgtgaacttcattctcagttacgctctctttgggtgcaggccccagggaaccccgggcttccacttcattgccttttcagcttcatcagaaatgaggctcatttctctccggcaagccctggggtggcttctcatagacccggcttggatcagccttgcattctaaacaaattcctgtggcctggaggagccagc

SEQ ID NO: 938740 - DNA, 696 bp, Homo sapiens
tgaggaaacacagaggagccacatgactgagtaaaagcctatctactggctattagacttaagcaccatctaccggatcacagtccaaaactttaacaccaaaaatattttgctaatatgcccccctgtgaaaccaaggacaagaattatgctacagataaagacactacacaaagtcttggctctctgaaaacttccagaaaagaaggctactgactgtactcgatttacaatgcagttaaaggaaaaccagcccacacagattagaaagaacaagcasaaaaactttggcaactcaaaaaaacagagtgtctttttttccccaaacagttgcactagttccccagcaagggttcttaactgggctgaaatggctgaaatgacagaaatagaattcataatatggataggaatgaagatcattgagattcagaaacatgttaaaacccaatctaaggaatctaagaatcataataaaacaatacaggagctgacagatgaaacagccattataaaaaagaatcaaactgagctgatagggctgaaaaaacacaagaatttcataatgcaattgcaaatattaacggaagaagagaccaagctgaggaaagaatttcagagcttgaagatgggtgccctgaaataaatcagtcagacaaaaataaagcaaaaggaagagacaaacctccaagaaat

SEQ ID NO: 938741 - DNA, 618 bp, Homo sapiens
tgaattccttctctgagttatcttgagtttctttgaatttcctcaatgctgatattttgaattctctatctgaaaggccgttatatctccgtctctccaggattggtccatggtggcttctttagttcatttggtgagatcatgttttcctgaatggtgttgatcctagtagatgttccttgttgtctaggctttgaagagttagatatttgttgtagttttcactgtctgggcttatttggagctattmttgagaaggctttccagatattttaaaggacttgagtgttacaatataagctgtatctgctttagggggcagcccaagcccagtaacactgtggttcttgcagactcatagagattacttgacagagactcttattctcttcccctactttctcccaaacaaacatattttctctctctgttctgaaccacctaaagctggagacggaatgacacaagcacccctatggctaccaccactatgactgtgctgtgtcagagctgaagcaagcacagtgctgggtctcatccaaggcctgctataaccactccatggctattgcctgtgttactcaaggccctggggctctaccatcagcaggtggcaat

SEQ ID NO: 938742 - DNA, 598 bp, Homo sapiens
actgagataatgacttaccacctttcaacttttaaagtttacagtgaattacattaattgatgttctaatgttaaaataacattaatattgctgagataaagtgaacttggttagaatatattatcttatttacacaccgwtggatttggcttgctgatattttatttagaatttttttatttaggtgcatgaatggcatttatctagaattttattgccttctatggttcttgtcaaatttcactatccactttatgtcagcttcataaaatgagttaggtaatatgctttcttttacctactctgagttttttaaagaataattaaaatttcttgattgttttgtataagccatgggcaaatttgtctgatgctgatgttttctttgtggtaagagtttaaggtactgtttcaattacttttaatggctatagggttgctcaggttttttgttcatttcttcttcaatcagttttggtatggtatattttcttggaatttctctgtctcttcaaaatttttgtatttattgacataagttgttcatattattcttttaatgtcttttaaatctgtgtagcatctgtagttttttat

SEQ ID NO: 938743 - DNA, 445 bp, Homo sapiens
actaatgtcaattctactcaaactattctgaagagtagagaagaagggaatacttccaaactaattgtaggaggccagtattactctaatgccaaaaccagaaaaagatacattgaaaaaagaaaactacaggcctctatctctgatgaatattaatgcaaaattcctcaactaaatactagcaaactgaattaaacaatacattagaaagatcattcatcatgaccaagtgggatttatmcctgggacacaaacatggtacaacatgtgcaaatcaatatgtgttacatcatatcaacagaatgaaagataaaaccatatgaccatttcaattgatgctgagaaaaacattttataaaattcaacatcccttcatgataaaaaccctcaaaaaattaagtatagaaggaacgcatctcaacatgatagaagccagagcggaacg

SEQ ID NO: 938744 - DNA, 445 bp, Homo sapiens
actaatgtcaattctactcaaactattctgaagagtagagaagaagggaatacttccaaactaattgtaggaggccagtattactctaatgccaaaaccagaaaaagatacattgaaaaaagaaaactacaggcctctatctctgatgaatattaatgcaaaattcctcaactaaatactagcaaactgaattaaacaatacattagaaagatcattcatcatgaccaagtgggatttatacctgggacacaaacatggtacaacatgtgcaaatcaatmtgtgttacatcatatcaacagaatgaaagataaaaccatatgaccatttcaattgatgctgagaaaaacattttataaaattcaacatcccttcatgataaaaaccctcaaaaaattaagtatagaaggaacgcatctcaacatgatagaagccagagcggaacg

SEQ ID NO: 938745 - DNA, 671 bp, Homo sapiens
gctagaatataaagcaggcagaaaaatgtgaaaagactacactggcctagccctccagcctacatctttctcccatgctggatgcttcctgccctcaaacatcgaactccaagttcttcagttttgggactcaggctgggtctccttgctcctcagcttgcagacagcctattatgggaccctgtgatcgtgtgagttaatacttaataractcccttttgtatatatatcctatatatagataaaattagttctgtctctctagagaaccctaatacaccaatgttttttaaaaagtaaaccacatctgtaatcccagcactttgggaggcagaggcaggaggactgcttgagcccaagagtttgaaaccagcctggcaatatagtgcaaccctgtcgctacagaaaattagaaaaaaaacaaaaaacacttagccaggcatggtgtgcttgcctgcagtcctagctactcaggaggctgaggcaggaggattgcttgagcccaggagttcaaggctgcagtgagccatgatcataccactacactccagcctggatgacagaacaaagactgtctcaaaaaaaaaaaaatgaaagaaaagatttgttcatacactttaccaggaggatgcgtggatggcaagtaaacacaggggaaggtgctctatgtc

SEQ ID NO: 938746 - DNA, 671 bp, Homo sapiens
gctagaatataaagcaggcagaaaaatgtgaaaagactacactggcctagccctccagcctacatctttctcccatgctggatgcttcctgccctcaaacatcgaactccaagttcttcagttttgggactcaggctgggtctccttgctcctcagcttgcagacagcctattatgggaccctgtgatcgtgtgagttaatacttaataaactcccttttgtatatatatcctatatatagayaaaattagttctgtctctctagagaaccctaatacaccaatgttttttaaaaagtaaaccacatctgtaatcccagcactttgggaggcagaggcaggaggactgcttgagcccaagagtttgaaaccagcctggcaatatagtgcaaccctgtcgctacagaaaattagaaaaaaaacaaaaaacacttagccaggcatggtgtgcttgcctgcagtcctagctactcaggaggctgaggcaggaggattgcttgagcccaggagttcaaggctgcagtgagccatgatcataccactacactccagcctggatgacagaacaaagactgtctcaaaaaaaaaaaaatgaaagaaaagatttgttcatacactttaccaggaggatgcgtggatggcaagtaaacacaggggaaggtgctctatgtc

SEQ ID NO: 938747 - DNA, 565 bp, Homo sapiens
atgtccatgggaaaaacaccctggggacagagatataccactttgttagatccagaaaggagattaagatatatctttatagaaaactatctgtgagctgtatttactagtaacccatgaggatgctcaatttggccaaagagttaaatcattttaaatctagggcatctacccctctcatctctaaagaagtactcatgttcaaaagataccaaattttctacttttaattagttgtcattttgaagtcaacctctaaacagcatraaagggatcagctcacaggaaactgagtgtgacaaaaatcaaggcatctgaaacacaaaatgccaccttctttactcttgaaattcccagtccttgctgtcatatttggaatggtagcctggggagatgaaagacaattacaaattccctttccattctcaataaagcatctccattttcacagcttcagtaagctggccacaagaggtttaacttgggagaattaagacctgctatacatactaagtaaatcttccaagttctttaaggggtgctcaagagacttggatatgttata

SEQ ID NO: 938748 - DNA, 629 bp, Homo sapiens
tcctgacagcatggctgccctggagctgagactcactggtgctgcccagcattgagatagagtatctcactgcatacccctagcccagaaaaggatcaaaattcaaaaccggaggtatagttgctactgaacgcatgtcgcttttgcaccagcataaaggcaaaccattgtaagttggggactgtctgtatttggagacatagggcctttaaagaggtaatggaggttgaaggaggtcattagggtggacactaatccaatctgactggtgtccttataagaagagggattaggacacccacacaggagacaccaggtgaagacacagggacaagatggctgtctacaagccaaagagagaggcctcagaagaaaccaacaacactgccaataccttgctcttggctttctagcctctaggactctacagacttacattctgtygcttaagcctcccagattgtggtgctttgctgtgacgttggagcggactcatacaccacccaacccccgtgtgatcttggctaactcaacatctctgagccttggagacattatctgtacaatgaggagtttggatccttctagctccaatatcttatgcctctgaggatctaccccaaagagca

SEQ ID NO: 938749 - DNA, 740 bp, Homo sapiens
gggccagctggctacaaagggagccagtggcaggactcccggatcccttctggctgtgcaggggacacaggggaccctgaagttcccaaagccctagtagataatgccttagagatatggggagagagtcagttggtcaataaaagcctggagttgaaaatggcaaaaataataaataaataaataaataaatagaaagaaagaaaagaaaatctggggtcagagagtttagcaaggcaaagacatatcagcagataccagaccggggacagacctgggggtctctctgcagcagggagtaggacaggctgcacagttaccccaccttgacgtgctcacacacaggctgacccctcaaccccatgaagtatagaagggagaagccaggatttcaaaattatgagcatttcccacaaagatcctgagtcatcccaccgaggaagaattctgtggggacaagcttatgttttcctcctcactgcccagcagggaagactctcaccatagaaaaagaaaggtgtygggcacatgtttcccatctctcagcctcatacaggcagccctgattcaactgtcggaactgctagcaagctcgtggatgggccccagccacctgaaaacgtgcagtctgcggatggcaccctgacctgggtcctatgagtagtgactgctgatgggatgctctgaagttggctgaatgtctccccatcatgagcaggagctccatgctgggtgttacc

SEQ ID NO: 938750 - DNA, 586 bp, Homo sapiens
cacagagacatacacacacagaaacacagagacacagacacagacacacacacacacacacacacacacacacgtagtatacggagaaagtgagaatcactgagcaggcagaaacaaggaaatccacaaagccagagagaaaggagatactgagagacacaggtgcaaacacaaggagtgaaaggaatgaatagagagagagagagagagagagagagagagagrggagagagaggcagggcctgagcccagtccccctagagtgagagaagccccaggggcttctctaatccctacctctactcctgcttttccctcttctcccaggcctgtggtctactgccttctcctgcggtgcagaggccttggggccacaccactcctaccccatcctcctagctctggggtgtctgcagggaggggcacctaggatggtaaggagagcccatgaaattcagttctgctgcatccctgtcgccccctagtgactggtgtgggaaggacagctatctggggagagacattctccctcccaagaggcacctcaagaccttggctgagcctcagtttccccatctctaacatg

SEQ ID NO: 938751 - DNA, 740 bp, Homo sapiens
agagaagtcaagggacaagggatagtttttaaaatagatggtgctaaaacaatacatcaaccatgtgtggaaaagcgaaccttgatccacaccttgggtcataagcgctatttggctcaaaaggaatcacagacttaaatgtaaaacataacattataaaacttccagaagtaaacctgggaaaagaccttcgcgaccttgagttatgcaaaagatttcttagataatgacatcaaaagaatgattcattggttgggcgtggtggctcacgcctgtaatcccagcactttgggaggccaaggtgggtggatcacaaggtcaggagattgagaccatcctggctaacatggtgaaaccctgtctctactaaaaatacaaaaaattagccgggygcggtggcgggcgcctgtagtcccagctactcgggaggctgaggtaggagaatggcgtgaacctgggaagcggagcttgcagtgagctgagatcatgccactgcactccagcctgggcgacagagcgagactctgtctcaaaaaaaaaaaaaaaaaaaaaaaaaaaggaatgattcatcaaagaaaaccggcagataaattagacttcatcaaaattgaaaaaaaaatttgctgtttgaaagacaccattacatgaatgaaaagacaagacacagactggaagaaaatatttacaaaacatatgtctgataaagaacttgtgtccagaatacatgaataactctcaaa

SEQ ID NO: 938752 - DNA, 679 bp, Homo sapiens
aaaaatgtacagaaaggaaagctttggttctgagtttgcaggcttccctgtctttcattcctattgtagaaagcagcttatataaaaagatgtgctgtgtggccctttgagctgctgtgattgtgttaggaccccactggatggtattcgcatgaattaatctactgtagcatctctacaaatcaagaggctggcttctgtttgaaatgtcccaaggctttgtgcacagggcaagctaaatgtctccctacagtgagactgaaaatgccttgggtgcccttgtcgataggatctgatrtatagatgcatgtctacaattgcacagtggctgctggcaacatttattacaatctgaatgtgaaatggctattctgttcaaggattctgataaaaagtatcagccacagtagatgtataaggagcctggtttcactgcaactgactacagttatctgattttttttttctagttcatttttagtctgtggagcaaacagagatttcctccccaaatgatgtcctttctcagtcaccagggtgtggttatttggttttatgtagaggagatagaaaccaatcagtctaaatcatattctgttgaaatcagaaccaaaggatccacaatctagctccaatctaactttccagcctcaactcctacctgttctttgttactctt

SEQ ID NO: 938753 - DNA, 601 bp, Homo sapiens
gtatacacccaaaggattataaatcattctagtataaaggcacatgcatacgtatgttttttgtggcactattcacaaaagcaaagacttggaaccaacccaaatgtccatcaatgatagagtgcataaagaaaatgtggcacatatacaccatggaatactatgcagccataaaaaaggatgagtacatgtcctttgcagggacatggatgaagctggaaaccatcattytcagcaaactaacacaggaacagaaaacaaaatactgcatgttctcactcacaagtgggagttgaacaacgagaacacctggacacagggaggggaacatcacatactgggtctgttgggtgatggagggctaggggaaggatttcattgcgagaaatacctaatgtaggtgacaggttgatgggtgcagcaaactactatggcacgtgtataccaatgtaagaaaactgcacattctgcacatgtacccccagaacttaaagtatatataaaagaaaccattgaagttgattatagtaatatttgtcagcctattgttctgttatatttgctgagttttgtatttctgcttgagattacattgaaataa

SEQ ID NO: 938754 - DNA, 741 bp, Homo sapiens
taatattaaatattaaatctccagcagctagaatggaatgtgacacacatttggcactcaataaatttgagaatgcatccaggcagaaatgatcttcaaagaacctacaactgtgatgggcacatagtaagtactcgaccaatactttcgttcatgaatcaatgaacagcatcatgctttcttgtagccactctagattaccttgaagttaatctcaatattttgggttttttacacataattcttatccttctagctagcattttttcttaggagcaatatgttccatgggttcattttatcctgtgtgaaactgcggtcatttgaaacagatctgagatgtctgactccataaccwttaggcagtgttcataagtccccaaaccctttgcttacacttagatactgatctcatatacctttctgtgtgtcactcccgagggggaaccagacctgcttcatcagtgcatcttcagagcttatcacagtctggtctattgaatccacaaatggttattcccttgactagactgaggaacactctaaggccttgattgggttccatttgtcccacagttacaggaagtcctaaagctaagaagatatctaagttggatggttttgtgttgattccttcagctttcatttcttggggcctggagatctcaggatcgggatgaactttgcagggccagtggaggaaggggcctgatgtggtatggtccttgctaggcctcttca

SEQ ID NO: 938755 - DNA, 724 bp, Homo sapiens
acttttaagttaatgctggaataagttaagactttgggggattgttgggaaggcatgattagttgtgaaatgtgaaaaggtatgagatttgagaggggctgaggtggaatgatatggtttggctctgtgtcagctcatctcgaattgtaatccccaacatgttgagggagggacctgataggagatgatgggatcatgggggcagtttccctcatgctgttctcatgatagtgagttctcatgacatctcatggtttaaaaagtgtttggcagtacctctcaaccacctccatataagatgtgcyttgcttccccttctgctatgattgtaagtttcctgaggcttccccagccatgtggaactgtgagtcaattaaacctttatttctttataaattacccagtcttatgtagttccttatagcagtgtgaaaacagactaatacactatttttatgtctaaatgaactgagatcagatattaaagccaatctcacggggttaacaagaattcttgacagaaatttagttatgattaagcattaatgaggctttactttgacccacttccttggaactgaaagtcaggtaacgttagatactagccatttgcatccccattgttcccatagataagatttctgatgttagatagatagatctctggtgttagaatcgtacagcttttgttttagaattgcttcagtggatcttgaattccagc

SEQ ID NO: 938756 - DNA, 637 bp, Homo sapiens
cgggtccagaccccaagagagagttcttggatcttggacaagaaagaattcagggcgaatccatacagtaaagtgaaagcaagtttattaggaaagtaaaggaataaaagaatggctactccatagacagaacagccctgagggcttctggttgcccatttttatggctttttttttattacatgcttaacaaggggtggattatttatgcctcccttttttagrccacctagtgtagcttcctgacattgccatggcatttgtaaactgtcatattgctggtgggagtgaggcagtgaggacggccagaggtcactgttattgccatcttgaattggtgggttttagctggcttctttactgcaacctgtttttatcagcaaggtctttatgacctgtatcttgtgccagcctcctatctcatcctgtgagtaataatgccttaacttactgggaatgcagcctggcaggtcttagccttattttacctaccccctattcaagatggagttgttctagttaaaatgcctctgacaatgggatatacttatagtaaaaaatttattcattgttaatatgaaattcagatttcacaaatgtattcaacttcatcttgctaccctacattcaaatcaca

SEQ ID NO: 938757 - DNA, 811 bp, Homo sapiens
taccatgcttctgtacagcctgcagaaccacgagccagctaaacaatttttcacatagatcgccctgtttcagatatttatttatagtaatgcaagaatggcctaaatcaacagattactcatcagaacatgtacagttcaaacccctgccagtagtacatgtagattctcattagcatgttattgtatgtgatgttccattctttaacaatctgatatttacaaagagtaactcattgtagtttctagtttsttaacaattccggtttacccaaattgcattattttcatttttattgtattttctgcttatgttcttactgaattttaagtatgtttccctcatagacgttgataaggtctgatcagtttaaactatgaaaaccatgactattctgctccttcaaaaatgtttggccgggcgtggtggctaatgcctgtagtctcagcattttgggaggccgaggtgggtggatcacctgaggtggggagttcgagaccagcctgaccaacatggagaaaccccatctctactgaaaatacaaaattagccaggcgtggtggcacatgcctgtaatcccagctactcgggagtctgaggcaggagaatcacttgaacccgggaggtagaggttgcgatgagccaagattgcgccattaaactccagcctgggaacaagagtgaaactccatctcaaaaaaaaagataaagaaaaaaactttgtctatggagtccatcgatgaaataaattatttatttcttgcccttttaaattggtgctttttgtatcctgcttaagaaatgcttgac

SEQ ID NO: 938758 - DNA, 656 bp, Homo sapiens
tatggggagagacttcttccacttgagaataagagagggaagagtaatggggactgtgtcttgcagcttgggtaccagctcagccactgtggggtagagcaccaagtggactcttggtttccccaattccaggacttggctcttggatggcatttctggacctgccctgggccacagaggagcccacttccctgaagggacagtcctgggcctggcagcattcaccacaagctaactgaagagcccttgggccttgaatgaacatcaatggtagccaggatgtactcaccataggcctcaggtggtggtggctatacagagagactcttctgtttggggaaaaggggagggaagaggggaaagagtttgtcttgtggcttgggtgccagcacagccayagcagaatagagcaccaagtagattcctaaggttgtcaactctaggccctggctttcagatatatctctggaaccacttgggaccaggggaactcattgccctgaagggaaagactgaaacctggcaggctttgctccctgctgactggagagctctagggccttgagtgaacataggtggtagccaagtagtggtaactgaagaccttgggtgtgacccagtgctatgctgtcttcaggtctgacccagcagagttt

SEQ ID NO: 938759 - DNA, 599 bp, Homo sapiens
gaggtccactgttagtctgatgggctttcctttgtaggtgacctgttctttctctctggctgcccttaacattttttcctttatttcgtccttggagaaactgatgattatgtgtcttggggctgatcttctcatggagtatcttactggggttttctggagttcctgaatttgaatgtgggcctatcttgctaggttggggaatgttctcctggatgatatcctgaagtatgttttccaacttggtcccattctcctcayatctttcaggtacccgaatcagtcataggtttggtgtttttacataatcccctagttctcagagattttgtttattccttttcattcctttttctctaatcctgtctgcctgtcttatttcagcaagatagtcttcaaactctgaagttatttcctctgcttggtctgtttggttattgatacttgtggttgcattgtgaagttcctgggttgcgcttttcagctccatcaggtgatttgtgttcctctctaaactggctattctggttaacagatcctgtaatgatttatcatggttctttgcttctttgaattgggttagaatgtgctcctttagc

SEQ ID NO: 938760 - DNA, 599 bp, Homo sapiens
gaggtccactgttagtctgatgggctttcctttgtaggtgacctgttctttctctctggctgcccttaacattttttcctttatttcgtccttggagaaactgatgattatgtgtcttggggctgatcttctcatggagtatcttactggggttttctggagttcctgaatttgaatgtgggcctatcttgctaggttggggaatgttctcctggatgatatcctgaagtatgttttccaacttggtcccattctcctcacatctttcaggtacccgaatcagtcataggtttggtgtttttacataatcccctagttctcrgagattttgtttattccttttcattcctttttctctaatcctgtctgcctgtcttatttcagcaagatagtcttcaaactctgaagttatttcctctgcttggtctgtttggttattgatacttgtggttgcattgtgaagttcctgggttgcgcttttcagctccatcaggtgatttgtgttcctctctaaactggctattctggttaacagatcctgtaatgatttatcatggttctttgcttctttgaattgggttagaatgtgctcctttagc

SEQ ID NO: 938761 - DNA, 729 bp, Homo sapiens
ttgccttaagaggctgagtgtctaggctgctcagttccttccacctagcacgatttaagtactcctttcttctctctcgctctttttttttttgtttttggtttgagatggagtcttgctgtgttgcccaggatggagtgcaatggcacgattttggctcactgcaagctccacctccctggttcaagcaattctcctgcctcagcctcctggagtagctgggattacaggtgcacaccacaacgcccagctagtttttgtatttttagtagagatggggtttcaccatgttggccaggctggtcttgaactgctaacctcaggtgatccacctgccttggcctcccaaagtgctgggattacaggtgtgagccactgcacccagccctttcttctcttttgatgtagtttttaggtactttacctgccagtaacatctctgctgttacsgcccttactaatctttacgctatcaagctaaacgtgtgctcatgaatagctgggaagggtcttaagaaagacacagcctttttcgactaatcggcattaatcatttcctttggttaaactggctgagacaaaacccagaggggtgcttgttcttttttataatcagtgagactccatgaggaagtgcaggtgatgtgacttccaggcctattctccatggtgcagaaccaggctgagagcagagaggagctgagagcacacatttccctctgctgatgt

SEQ ID NO: 938762 - DNA, 572 bp, Homo sapiens
tgctgggtgctttttgaaagcagaatgacaatccgtcttcttcctctgaacaatgtgtctcaatatgatgcctatgactgctgctactgccatcttgctactacccagaagatgaagccaaacctgatgctcgcakgactgagacggagaaagaatgtcagtctttgatgagataatatagcctctaaaacaaccagccctcaaaccacattattccaatatttcagttctgtgagacaatcagtgttctaattgtatatataataggctaaatattaaattatttatattaatataattatatattacatataattagatataatacactaagtataaaatataatatataacatatatatatatatatattttttggtagagatggggtttcaccatgttgcccaggctgatccacctgcctcagcctcccaaagttctaattctttaagtccgcatcagtgggattcccattacttgcagctaagagcattctattcaatgccacctgagagatcattagctaagccaggtagactaactccctccaggacctgttgaggacaggcagc

SEQ ID NO: 938763 - DNA, 477 bp, Homo sapiens
ggtcctgactgttagaaggaaaactaacaaacagaaaggacatccacaccaaaagcccatctatatgtcaccatcctcaaagaccaaaggtagataaaaccacaaaggtggggagaaaccagagcagaaaagctgaaaattctaaaaatcagagtgcctcttctcctccaaaagaacgcagctccttgccagcaacagaacaaagctggatggagaaaggctttgatgagttgagagaagaaggcttcagatgatcggtaataacaaactactccgagctaaaggaggatgttcgaacccatcgcaaagaagctaaaaacttgaaaaaagattagaygaaaggctaactagaataaacagcataggaagaccttaaatgacctgatggtgctgaaaaccatggcacgagaactacgtgatgcatgcacaagcttcagtagctgattcgatcaaggggaagaaagggtatcagtgacg

SEQ ID NO: 938764 - DNA, 734 bp, Homo sapiens
aattatatccataatctgaccactttcttatgaactatactgctaccatgctgggacaagccactaccatcttagcaggactactgcaaattttcttgcattcacgctgccccttgccaccattgcccaccatctactctctgatgacagacctttctagatgaaagtaatattatggcaacttctgttcaaaattctcctatgacttcgcatctccttcaaagtaaaaacccaagtcttgaccatggtctataaagacctgtatcatcaactaggtctagcctgcccccttacataaaaacctgctacctctctgaacctattctcctaccattccctatatttactcctgctccagacattctgcactccttcctcttccttattcatattcccactggtgcatttacagttcctgctgactctcccaaggatatcaaatgactcatttctttgctaattcaggtatttgctaaaataccatcttacaaaagatttcaatcaccaaaaatagcacactactccaatcactatccatccttttatcctttatttgtcttcaaagtactaattatcatatrgaattttatgtgtcaacttgactgggctaaaggatctcctgatggctggtaaaacattatttctgggtgcgtctgtgaaggtgtttccagaaaagattggcatttgaatcaaaagtcttagtacaaaatatacaccctcaccaatgtggatgg

SEQ ID NO: 938765 - DNA, 700 bp, Homo sapiens
agcttttggctatcttggctttccacaagccttccttaggaagcttaatcgtttctagcttttgatttaaagtcagacatatgtgactgttctcttcacttgaacacttagaggacactgtagggttgttaattggcctattttaaatattgttgtgtctaaaggaatagggaggcctgaggagaaggagagagawgagagatggggcaattggtggagtagaacacacgcaacatttatcgattaagtttcctatcttatatgggtgtggttcctggcagcctaaaacaattacaatggtaacatcaaagatcattgatcatatttcagcacaacagatatgataataataaaaaagttggggggaggggccaagatggctgaacaggaacagctacagtctgcatctctcagtgagaccaacgcagaaggaaggtaatttctgcatttccaactgaggtacccagttcatctcactgggactggttaggcagtgggtccaacccatggagggtgaacagaagcaagggtggggcatcgctccacccaggaagtgcaaggagctgggggacctccctcccgcagccaagggaagctgtgagagactgtgctatccagcccagatactacacttttcccacggtttttgcaatgtgcaaatcaggagattccttcatgtgcctacaccaccagggccctg

SEQ ID NO: 938766 - DNA, 700 bp, Homo sapiens
agcttttggctatcttggctttccacaagccttccttaggaagcttaatcgtttctagcttttgatttaaagtcagacatatgtgactgttctcttcacttgaacacttagaggacactgtagggttgttaattggcctattttaaatattgttgtgtctaaaggaatagggaggcctgaggagaaggagagagatgagagatggggcaattggtggagtagaacacacgcaacatttatcgattaagtttcctatcttatatgggtgtggttcctgrcagcctaaaacaattacaatggtaacatcaaagatcattgatcatatttcagcacaacagatatgataataataaaaaagttggggggaggggccaagatggctgaacaggaacagctacagtctgcatctctcagtgagaccaacgcagaaggaaggtaatttctgcatttccaactgaggtacccagttcatctcactgggactggttaggcagtgggtccaacccatggagggtgaacagaagcaagggtggggcatcgctccacccaggaagtgcaaggagctgggggacctccctcccgcagccaagggaagctgtgagagactgtgctatccagcccagatactacacttttcccacggtttttgcaatgtgcaaatcaggagattccttcatgtgcctacaccaccagggccctg

SEQ ID NO: 938767 - DNA, 754 bp, Homo sapiens
agatcataccaaatacactcttggaccacagcacaataaaaatacaaatgaagactaaacaaattgctcaaaaccatgcaattacatggaaatcaaacaatccaatcctgaataacctttttgtgttaataatgaaattaaggcagaaatcaagaagttctttgaaattaatgagaacaaagatacaacataccagaatctctgggacacagctaaggcagtgttaagagggaaatttatagcagtaaacacccacatcgaaggttagaaagatctcaaattagaaacctaacatcacaattaaaagaaatagagaagcaagagcaaaccaatcccaaagctagtagaagacaagaaataacccaaatcagagctgaactgaagattaaggcatgataaactattcaaaagatcaataaatccaggastttttttttaaagtaagtttttttaattagtctagatgctagctggattaataaagaagaaaagagagaagacacaaataaatacaattagaaatgacaaaggggatgttaccactgacccctcagaaatacaaccaccaaagactgctatgaacacctctaagcaaacaatctagaaaatctagaagagatggataaattcctggacacatacaccatcccaaaactaaaccaggaagaaattgaatccctgaacagaccaacaatgagctccaaaattggatcagtaataaatagcctaccaaccaaaaaaagtccaggaccag

SEQ ID NO: 938768 - DNA, 754 bp, Homo sapiens
agatcataccaaatacactcttggaccacagcacaataaaaatacaaatgaagactaaacaaattgctcaaaaccatgcaattacatggaaatcaaacaatccaatcctgaataacctttttgtgttaataatgaaattaaggcagaaatcaagaagttctttgaaattaatgagaacaaagatacaacataccagaatctctgggacacagctaaggcagtgttaagagggaaatttatagcagtaaacacccacatcgaaggttagaaagatctcaaattagaaacctaacatcacaattaaaagaaatagagaagcaagagcaaaccaatcccaaagctagtagaagacaagaaataacccaaatcagagctgaactgaagattaaggcatgataaactattcaaaagatcaataaatccaggactttttttttaaagtaagtttttttaattagtctagatgctagctggattaataaagaagaaaagagagaagacacaaataaatacaattagaaatgacaaaggggatgttaccactgacccctcagaaatacaaccaccaaagactgctatgaacacctctawgcaaacaatctagaaaatctagaagagatggataaattcctggacacatacaccatcccaaaactaaaccaggaagaaattgaatccctgaacagaccaacaatgagctccaaaattggatcagtaataaatagcctaccaaccaaaaaaagtccaggaccag

SEQ ID NO: 938769 - DNA, 547 bp, Homo sapiens
gtgagccaagatcatgccactgcactccagcctgggtgacagagtgagactctgtctcaaaaaaaaaaaaaaaaaaaaaaagaactctagcaggtgttcttgaacgcaggtttttaaaatgactttggagatggtgacatcagaattgagaaaaaaaaaactttcaggactctcatggagaactgaattgttcatgaatatcaagccaaacaggagttaactaaattaactgagtcaataaaaaattgaagtaatctttttaacttttgcttaaaatgtggctgatyctttgttttgtttttcagactcaaggaaacttttctttttgagctatttacagcttttagcaattgagtaaagtatactcctattaacaaaatttggagcatatttgtttcactgtagctgatttctccagaatttggaaaatatttttgagtattcgtcagagcttgtttggaggttctagcaggggagagcggctactcatatacccttgaccgaagacctgtcctcctctactggggatggtcatcctcttcaactg

SEQ ID NO: 938770 - DNA, 816 bp, Homo sapiens
atccgctgatgacatcaccaccagtgtgacacctgatggcctcaccatcacctgcttaaaaccattccatgctttcccatgggcttaaagatagattttaaaacaacagcttcactgaatatcttcattaatatataattcaaatatcacagagtccactcttgaaaagtacaattcaggccgggtatggtggctcacgcctgtaatcccagcactttgggaagcctaggtgggtggattgcgtgagtccaggaattcgagaccagccttggcaacatggggaaaccccgtctctacaaaaaatacaaaagttagccgggcgtggtcatgcacgcatgtagtcccagctactcaggtggctgaggtgggaggatggcatgaacttgggagtctaggccattgtaagctgagatcacaccactgtactccagcctgggtgacagagagagagagaccctgtctcaaaaagaaaagtatacaattctgttgtctttagtgtagtcacttggttgtataatcgtcatcactagctaactccacgttttcaccacgtcaaaaaagaaacccttcatccattagcactcactccccaatctgccttccccccagccccagacaaccacgaatctacttctccctctacgggtttgcytattctgcatattttatattagtggaatcacacaatatgcagtcttttgtgtctggtttctttcatttagcacaatgttttcaaggctggtctgggctataacatgtatccgtattttattccttttcatggctaattggcatttgatggtgttgctatgccac

SEQ ID NO: 938771 - DNA, 545 bp, Homo sapiens
aatcccaacactttaagaggccaaggcaggaggatggcttgaggccaggagtttgagaccagcctggttaacataccgagaacctgtaacctgtagtcccagctactcagaaagcctaggtgggaggatcacttggggccagaagttcaagactgcagtgagctatgattgcaccactgcactctagcctgggcaacagagcaagacctgtcttaaataaataaataaatagatggtgaacttaatcaggaaatgtgtgtgttctgactgctccactgactagctttctctctctcctcatgcctctctattccctgagacacaacaatattgaaattaggccaattaayaaccctacaatggcctctaaatgttcaagtgaaagacagagtcacacatctctcacctgaaatacaaagctagaaatgattaagttgagtgataaggaaggcatgttgaaagctgagataggcagaaagctaggcctcttacgccatttagccaagctgtgaatgcaaaggaaaagttctggaaggaaactgaaa

SEQ ID NO: 938772 - DNA, 463 bp, Homo sapiens
aatgtgataccaaagggaggaagacaatgtaacacagatccgggagagacagccctgctaaaacattcttagtgtgattgtgtacatgcccaaggctatgtcttctgtggagcaacattagtgaattcacagtgcaagggaaataggcttcattaaagtagatcaaccaagttgttaaacaaataaataagcaaacaacaagccccasagaggaagagagataattagtagtcaaggatgctacataattatctaaaagtttcattacaacaaaaataaaatgagacacacaaaagaaaaaaatacagaaaagggtgattcagatactagaaaaaagcaggcaacagaaactgcctatgaaaagacccagcagtcaaaaacttcaaaagagctattataaatataataaaataactaaggaaactatgcttaaagaagtaaaggagctatgacgacaatattt

SEQ ID NO: 938773 - DNA, 377 bp, Homo sapiens
gcttatcaacgatcttcctgatcattcctatttcagtaacaggccccaccaacaccaccacagagctccccgtgctcctctgacattttttcttctgtagcacttaactccccaggcatactacatattttacctacatattttattgtaaatgctcaccctccacctataagccctgagagggtgaggttttcaactattttgttattttrttttaccctcggcccctagagcagcagccagcatgtagtatgtgcttaataaacatttgctgaattaactacatacaaatgttgaaaggaaaaattcccagtttttttgtttgtttgtttgttttttgaaacagattcttgctctgttgccaggctggactgcag

SEQ ID NO: 938774 - DNA, 617 bp, Homo sapiens
ccccaccctaccagccagaagcagaagtcttacgaaaaggttttgaggaaaatatcctgtcctggtttactccatgccaacgaattcttcaaacacatccttgacccgggacatagagttcaaatctagttcatgtgttttgtcaggctactggtctcctttcttaggaagactcctgactgtgccttttctgtttaaagatggtagaggtgacaggtgttctcctgcaagatggccaaggtgtgggaaagcaacagatctttgattctggcaatctctcgcaccgtatgcagggccaggcctgggtgggcatactggcaacggcttttggaaacctagtgagggaggaagaagggagcattggtttctacaataattctctctaatgggatctttttcacagtttctcgggcttgctcagcagaagagtaagtcagaattgccatgaagcccacatacaggttgggaaagtrgctcaacaggggctcgatgactgggtaactgccagtgaagcaatgctggtacatcttgtggtcagagggcacatattttttcaagatgcccagtaggtcttcatcggcttctcggcagtggatcatcatgggcttctttaagag

SEQ ID NO: 938775 - DNA, 621 bp, Homo sapiens
taatagagttagggcttggcccagtcattaaatggtgaaatttgtttggggcatccaaaatatttcctttttgcatcagccaaaataccactggctgctcttttttacttctctgcaaaaacttgctttcagaaatggctctgacatctgtcatctataccatagcataagtgtgtcaatgtgatggattctgaggaaatttacatcctaaggcataattctaattgtttcatgaaaactttagccaaccaaataagcaatttagttgggagawttcagggagaggttctgttttttgtttgtttttgttttgttttgttttgttttttgagacagagtcccactctgtcgcccaggctgaagtgcactggcacaatcttggctcactgcaaactccgcctcccaggttcaagttattccccagcctcagccttccgagtagctgggattacaggcatgtgccaccacaccctgctaatttttgtatttttagtagagacagtgtttcaccatgttggccaggatgatctcgatctcctgacctcgtgatcccccacctcggcctcccaaagtgctgggattacaggcgtgagccccatggctggtcctgtttgttatatc

SEQ ID NO: 938776 - DNA, 614 bp, Homo sapiens
tcccatgtttactgcagcactattcacaataacccaatttagatgcaatctaagtgtccatcgacagataaatggataaagaaaatgtggtacatatacacaacagagtactattcagccataaaaaacaatttgcaacmacatagatggaaccggaggacattattttcagtgaaataagccaggcacaggaagacaaactttgcatgttctcacttatttgtgggagatacaaattaaaacaaaagaactcatgaaaatagagtagaatgatggttaccagaggctgggaagggtagtggggatggggggagtgggaaatggggatttttagcgggtacaaaagtatagtcagataaaatgaataagatctagtatttgatagcacaacacggtgactacagtcagcaatagttgattgtacatttaaaaataactaagggtataattggaatgtttgtaacataaatgataaatcctcgatgtggtggataccccatttaccctgatgtgattattattcattgtatgcttgtaccaaaatatctcatgtaccccataaatacatacacataaatattaaaaatttttaaaaattaaacctcaaatcaaat

SEQ ID NO: 938777 - DNA, 530 bp, Homo sapiens
ccccatgactcatttacgtcccaccaagtccctcccacgacatgtggaaattatgggagctacaattcaagataagatttgggtggagacacagacaagccatatcattccaccactggcccccccaaatctcatgtcttcacatttcaaaaccaaccatgcyttccacacagtcccccaaagtcttaactcatttcagcattaactcaaaagtccacaatccagtctcatctgagacaaagcaagtcccttccagttatgagcctgtaaaattaaaagcaagctagctacttcctaaatacaatgggggtacaggcattgggtaaatacacccattccaaatgggacaaattggcccgagtgaagggtctacaggcctgatgcaagttcaacattcaatagggcagtcattaaactttaaagttccaaaataatctcctttgactccatgtctcacatgcaggtcatgctgatgcaagaggtaggctcccacagtcttggtcacctctgcccctgtggctttgcagggt

SEQ ID NO: 938778 - DNA, 580 bp, Homo sapiens
gatttggtcttttcacatagtcccatatttcttggaggctttgttcatttctttttattcttttttatctaaacttcccttctcgcttcatttcattcatttcatcttccatcactgatatcctttcttccagttgatcraattggctgctgaggcttctgcattattcatgtagttctcaagccttggctttcagctccatcagcccttttaaggacttctctgcattggttattctagttatccatttgtctaattttttttttcacagtttttaacttctttgccattggtttgaatttcctcctgtagctcggagtagtttgattgtctgaagccttcttctctcagcttgtcaaagtcattctctgtccagctttgttccattgctggtgaggagctgcgttcctttggaggaggagaggcactctgctttttagagtttccagtttttctgctctgttttttccccatctttgtggttttatctacttttggtctttgatgatggtgacatacagaagggattttgatgtggatgtcctttcttattgttagttttccttctgacactcaggac

SEQ ID NO: 938779 - DNA, 580 bp, Homo sapiens
gatttggtcttttcacatagtcccatatttcttggaggctttgttcatttctttttattcttttttatctaaacttcccttctcgcttcatttcattcatttcatcttccatcactgatatcctttcttccagttgatcgaattggctgctgaggcttctgcattattcatgtagttctcaagccttggctttcagctccatcagcccytttaaggacttctctgcattggttattctagttatccatttgtctaattttttttttcacagtttttaacttctttgccattggtttgaatttcctcctgtagctcggagtagtttgattgtctgaagccttcttctctcagcttgtcaaagtcattctctgtccagctttgttccattgctggtgaggagctgcgttcctttggaggaggagaggcactctgctttttagagtttccagtttttctgctctgttttttccccatctttgtggttttatctacttttggtctttgatgatggtgacatacagaagggattttgatgtggatgtcctttcttattgttagttttccttctgacactcaggac

SEQ ID NO: 938780 - DNA, 548 bp, Homo sapiens
tgtttacctaatcaagcctgggcaatggcaggcgcccctcccctagccttgctgctgccttgcagtttgatctcagactgctgtgctagcaatcagtgagactctgtgggcgtaggaccctccaagacatgtgcgggatataatctcctgggktgccgttttttaagcccattggaaaagcgcagtattagggtggaagtgacccgattttccaggagctgtctgtcacccctttctttgactaggaaagggaactccctgaccccttgcacttcccgagtgaggcaatgcctcgccctgcttcggctcgcgcacggtgcactgtacccactgtcttgcacccactgtctggcactccctagttagatgaacctggtacctcagatggaaatgcagaaatcacccatcttctgcgtcgctcatgctgggagctgtaggctggagctgttcctatttggccatcttgtctccctactttttgattttttaataatggccattcttgcagtaataaggtgatatcttgttgtggttttgatttgcatttc

SEQ ID NO: 938781 - DNA, 548 bp, Homo sapiens
tgtttacctaatcaagcctgggcaatggcaggcgcccctcccctagccttgctgctgccttgcagtttgatctcagactgctgtgctagcaatcagtgagactctgtgggcgtaggaccctccaagacatgtgcgggatataatctcctgggttgccgttttttaagcccattggaaaagcgcagtattagggtggaagtgacscgattttccaggagctgtctgtcacccctttctttgactaggaaagggaactccctgaccccttgcacttcccgagtgaggcaatgcctcgccctgcttcggctcgcgcacggtgcactgtacccactgtcttgcacccactgtctggcactccctagttagatgaacctggtacctcagatggaaatgcagaaatcacccatcttctgcgtcgctcatgctgggagctgtaggctggagctgttcctatttggccatcttgtctccctactttttgattttttaataatggccattcttgcagtaataaggtgatatcttgttgtggttttgatttgcatttc

SEQ ID NO: 938782 - DNA, 548 bp, Homo sapiens
tgtttacctaatcaagcctgggcaatggcaggcgcccctcccctagccttgctgctgccttgcagtttgatctcagactgctgtgctagcaatcagtgagactctgtgggcgtaggaccctccaagacatgtgcgggatataatctcctgggttgccgttttttaagcccattggaaaagcgcagtattagggtggaagtgacccgattttccaggagctgtctgtcacccctttctttgactaggaaagggaactccctgaccccttgcacttcccgagtgaggcaatgcctcgccctgcttcggctcgcgcacggtgcactstacccactgtcttgcacccactgtctggcactccctagttagatgaacctggtacctcagatggaaatgcagaaatcacccatcttctgcgtcgctcatgctgggagctgtaggctggagctgttcctatttggccatcttgtctccctactttttgattttttaataatggccattcttgcagtaataaggtgatatcttgttgtggttttgatttgcatttc

SEQ ID NO: 938783 - DNA, 627 bp, Homo sapiens
agaaaggaagaaagttagagagaaagcaaagaatgtgaggctcgtgtggatccctgggaaggaggggcctgtattctgcgcagcccagggaggcacagatgcaggggaagaaacggccgggcggtgtttcagcacacagggcagaggcagccttgcagggttgatccaagtgcaatgagggagacggagaacagatccctggtacctgagggatttgcttgtgtccatagtccgcaaaatgaaggcagcctgctggagtgaaggtccctagagagccccgttcagcttttcctgctcttaatgtctccaatgtggcgcaggagcagcagaataacgtttccttttcaaggccaccacagtccgctgacagcaagccaggcytgaagagcctcagggttggaagaaaggaaagtgtgtggggggaggaacacccttgatggagcacagactgaagaccggaagcgaatgcgggccaggccgcgggtgccagcacggccagatgaagacccggaccacgcgcccctctcctcgccttcttagtcatccatgggacagcagtggagagaaacggggacccggattatttccaccgcttgacagaatggagtctgaatagaaattaagttg

SEQ ID NO: 938784 - DNA, 588 bp, Homo sapiens
cagcttcaagggattctcactaaacccatgtgaaacctggaacaatttgagcaccagaatgacaatgatagttacagattacatcccactaaacaagaaatacatgaatctacacttgcataaataaataaatgcataaaaatgtggggagaggagaaagttcttccttaaaatagaacgctgtgtgatatacagaaggaattctggaattggagagattaccatggcagtcatcatagtaataattaatccaggtaagaaacatcaacggatgctaacaataatgaatacaagttggatgaggatcagaatctttatataatcataaagtatctgtccacaaatccttgtgcattttaaggggmaacacaggagctttactggagaaacttggaagacacaaccttactcaagtgatcaaagttctcatcagcagtgatgggacacacagtgttctatgtcacttgatgggatgcaatgagaagaacacagcatctcttccaaacaatgcaatcttcagatcttttcatgagaaaatatctctaatcctagttcaggggcgttttacaaaataattcacctgctgcc

SEQ ID NO: 938785 - DNA, 619 bp, Homo sapiens
tatacccaaatatatcaaaatctggaagagatgcagcccaaacactgcttagaaggaattttatttgctttaaatggttctgttaggaaattaaaaagtacgattttgaatgtatacaaacatagttggtaaaactatcaagaaatgccagacaaaaatcagaagagtggttgcccttgaggaaggaagggatgtgatttgggagaaacccacagaggggctgcaaatgttcaatttctttagctgaygcattatattggtgtccattacaggctgagttatatccctctataatttatatgttgaagtctcaaccctcagaacctcagaatgtgactattattagacatatggcctataaagaggtgattacattaaaatgaggccattggggtaagccctcatctaatcatatgaggatgaagaaaagacatcagggatgcttgtgcccaggaggaccaccatgtcaagaggcagtaagagggtggccgtctacagggcaaggagaaagacttcaggagaaactcaccctgctggcactgtgatcttggacttccagcctccagagctgtgggacaatttctgttgtttaagtcctgcagtccgtggtcttttgtta

SEQ ID NO: 938786 - DNA, 619 bp, Homo sapiens
tatacccaaatatatcaaaatctggaagagatgcagcccaaacactgcttagaaggaattttatttgctttaaatggttctgttaggaaattaaaaagtacgattttgaatgtatacaaacatagttggtaaaactatcaagaaatgccagacaaaaatcagaagagtggttgcccttgaggaaggaagggatgtgatttgggagaaacccacagaggggctgcaaatgttcaatttctttagctgatgcattatattggtgtccattacaggctgagttatatccstctataatttatatgttgaagtctcaaccctcagaacctcagaatgtgactattattagacatatggcctataaagaggtgattacattaaaatgaggccattggggtaagccctcatctaatcatatgaggatgaagaaaagacatcagggatgcttgtgcccaggaggaccaccatgtcaagaggcagtaagagggtggccgtctacagggcaaggagaaagacttcaggagaaactcaccctgctggcactgtgatcttggacttccagcctccagagctgtgggacaatttctgttgtttaagtcctgcagtccgtggtcttttgtta

SEQ ID NO: 938787 - DNA, 628 bp, Homo sapiens
aaaatacagctttgacaatggacacagggagtcgtaacacccggcaggctctcatttggtctgcacagaggaaagcgtggtgtgtaaactccagacgtatctaatgcagagcacttgttcagaagccctagtgcaacatccggcttttgttcatgtccataggcgtctcttagraaaaaagaacccaaagcacatagagaggaagctgctaaaacactgacttctaattagatcactaacatcactggaggaaaaggaaaatggatctgtctactgtttccttaaaatccgctactgctttatctaaaagctataaatgacaaacatcctaaatagcgtactgtacttgggttcaaaagttcagcagtatctggagaagtggtagcaccctccccgaggaaggaccaacctgggggctacagaagggttattgaacctggctcctcccactcagaccatctgcaaaagcttaggtctttgcagccattctgaccttcaggcctagagtcgttactcaaactgcacctgcccgggattgggtttcctgctagtgaatgattgtttctttcctttagtctgcaaacagctgtcacgtgatcaagtggcaggcagaatggagggagctggc

SEQ ID NO: 938788 - DNA, 636 bp, Homo sapiens
ggaacgcagtgttgtacctttattccagacaatcaacaaaacataacagcagccttacaagggatgtcacaggagattaaaacagttgagagccttactgacaatcctctacagagatggtgggcgtgcctgggctctggcctatgttaggccctgataatcataggcagcatagcagaaacattagtcrtaggttgctgctccctgtattgttgctgtggcctatgggtccagggtgctgccttatgggcacgtttccccactaagaggacaccctcggcttaggggttggagtgtaaggaaactggctgtgcagcagtcaagagtaggcccaggtaaatatccagtgcagcatgacccagcaggattggagtgcaggcacacaatcttgtgcattatatagtcacagttatgaaaccatgttatgcgtgggctcgtcacctgactctgagccactattgtctgtgaggtgcataaatgtatcaccgacactgtgagagtggcagtgcgtaataaaaccatgtcccgcctgcctatggccccccaagtgttctttcaactacccgcccaccaactccccttggacctcagctcaggttggaacctgacaggatgtcaaagcaaagatggggtata

SEQ ID NO: 938789 - DNA, 636 bp, Homo sapiens
ggaacgcagtgttgtacctttattccagacaatcaacaaaacataacagcagccttacaagggatgtcacaggagattaaaacagttgagagccttactgacaatcctctacagagatggtgggcgtgcctgggctctggcctatgttaggccctgataatcataggcagcatagcagaaacattagtcataggttgctgctccctgtattgttgctgtggcctatgggtccagggtgctgccttatgggcacgtttccccactaagaggacaccctcggcttaggggttggagtgtaaggaaactgsctgtgcagcagtcaagagtaggcccaggtaaatatccagtgcagcatgacccagcaggattggagtgcaggcacacaatcttgtgcattatatagtcacagttatgaaaccatgttatgcgtgggctcgtcacctgactctgagccactattgtctgtgaggtgcataaatgtatcaccgacactgtgagagtggcagtgcgtaataaaaccatgtcccgcctgcctatggccccccaagtgttctttcaactacccgcccaccaactccccttggacctcagctcaggttggaacctgacaggatgtcaaagcaaagatggggtata

SEQ ID NO: 938790 - DNA, 636 bp, Homo sapiens
ggaacgcagtgttgtacctttattccagacaatcaacaaaacataacagcagccttacaagggatgtcacaggagattaaaacagttgagagccttactgacaatcctctacagagatggtgggcgtgcctgggctctggcctatgttaggccctgataatcataggcagcatagcagaaacattagtcataggttgctgctccctgtattgttgctgtggcctatgggtccagggtgctgccttatgggcacgtttccccactaagaggacaccctcggcttaggggttggagtgtaaggaaactggctgtgcagcagtcaagagtaggcccaggtaaatatccagtgcagcatgacccagcrggattggagtgcaggcacacaatcttgtgcattatatagtcacagttatgaaaccatgttatgcgtgggctcgtcacctgactctgagccactattgtctgtgaggtgcataaatgtatcaccgacactgtgagagtggcagtgcgtaataaaaccatgtcccgcctgcctatggccccccaagtgttctttcaactacccgcccaccaactccccttggacctcagctcaggttggaacctgacaggatgtcaaagcaaagatggggtata

SEQ ID NO: 938791 - DNA, 645 bp, Homo sapiens
tgaccttaaacacatcccctgtgctgcgcttcctcatctgtgaaatagatatgataatgatcttttttttttttgagatggagtttcattcttgttgcccaggctgcagtctaactggctcactgcagactctgcctcccgggttcaagcggttctcctgcctcagcctcctgagtagctgggattacaggcacgtgccaccacacctggctatttttttatttttagtagagaaggggtctctccatgttggtcaggctggtttcaaactcccaatctcaggtaatccgcccgcctcggcctcccaaagtgctaggattacaggtgtgagccactgcacccggccgataatgatctcttttatccagttactccatcaggagcacataggctaatrtatgtgaaaatgctttatgagctgaaagtgcttaaatgatattttctgtgaaaattcatcatggttatttgaaaagttgttttatttatttattttaaattaatatttatttatttatttatttatttgagacagagtttcgctcttgttgccgaggctggagtgcaatggcgtgatctcggctcactgcaacctccgactctcaggttcaagcaattctcccaagtagctgggactacaggcacctg

SEQ ID NO: 938792 - DNA, 592 bp, Homo sapiens
acttttcccaaaccatctattgcattctagcagatttttcagtatcttcaacttcttcaactactttccttattcttattccctcccactatcacttaaccctcttggctcctcagtgaccgtactactggtgttaatacgtgtctggaatatagaaagggttcatttaagtgcacaattatgccattcacaactgttgttatatactagaacatagcttaagcttagaatatgcaaatgcagtagaacctctcttaagcaaatttcatttaaacaacatgccagattaatctcattttctaatttcaaatatactaaccagtcaggtgtggtggcatgctcctgtagtcccagctactagggaggctgaggcaggaggatcacttgaggccaggaggttgtggcttaagtgagctgagattgcaccrctgtactctagcacagttgacagagtgacatcctgtctcaaaaagaaaaaaaaagttagattgcaccactgtactccaacctggtagacagtgtgacatcctgtctcaaaaaataaataaataaataaaaataaataaaactaaccactgccaacaatgtaatt

SEQ ID NO: 938793 - DNA, 748 bp, Homo sapiens
gatggtcaaaggtattatgtacagagtcactaaactccctgcctctcatgagtggtgaatcaggagtatcaaatgcattaattttgtataactctctaagcagtttatgccaaggactatcagtatgctccatactattagaagtagagtccttagcattttggggtctaatcatattaagcagtcaactctagaaaccccaaaaccagtgaaagaactgtatccttaatattctgtttctctagaaccactcctggtaccaaaatctgtattagtcagggttctctagagggacagaactaattttatatatatatagtaacatatgtggtatatatggtaacatatgtggtatatgtggtaacaaattcttaatgtttacttgcctgaaaaataatttatttctccttcttttatgaatcttagtttacgtgaacatgaaatatatgtgtgtgtgtgtrtatatatatatatatatatatatatatgtgactttattaagtattaacttacatgatcataaggtcccacaagaggctgtctgcaagcatatatatatatgagtttattaagtattaacttacatgatcacaaggtcccacaagtggctgtctgcaagctgaggagcaaggagagccaatccgagtcccaaactgaagaactcaaagttggatattcaagggcaggaagaatccagcaggggagaaagatgtaggctgggaggctaagccagtctggctttttcacg

SEQ ID NO: 938794 - DNA, 581 bp, Homo sapiens
gtagagtccttagcattttggggtctaatcatattaagcagtcaactctagaaaccccaaaaccagtgaaagaactgtatccttaatattctgtttctctagaaccactcctggtaccaaaatctgtattagtcagggttctctagagggacagaactaattttatatatatatagtaacatatgtggtatatatggtaacatatgtggtatatgtggtaacaaattcttaatgtttacttgcctgaaaaataatttatttctccttcttttatgaatcttagtttacgtgaacatgaaatatatgtgtgtgtgtgtatatatatatatatatatatatatatatgtgrctttattaagtattaacttacatgatcataaggtcccacaagaggctgtctgcaagcatatatatatatgagtttattaagtattaacttacatgatcacaaggtcccacaagtggctgtctgcaagctgaggagcaaggagagccaatccgagtcccaaactgaagaactcaaagttggatattcaagggcaggaagaatccagcaggggagaaagatgtaggctgggagg

SEQ ID NO: 938795 - DNA, 602 bp, Homo sapiens
cttatttctcctttgcttatgaagcttagtttggccagatattaaattctgggttggaaattcttttcttttagaatgttgaatatggcccccaatctcttctggcttgtagggtttccacggagaggtctgctgttggtctgatgggcttttctttctgggttacctagcctttctctctgtctgctctcaacattttttcttttatttttaccctggagaatttaayaattttttgtcttggggttgacattcttgtggagtaacttaattgggttccctgcatttcctgaatgttaatgccggcatgtctagctatgttggggaagttctcctggctgatatcctgaaatatgttttctgacttggttccattctcctcatctctttcaggtatatcaatcagtcatagtttcagtctctgtaaataatctcatatttcttggaggttttgtttattttttttcattcttttttcctctagtcttgtctgcatgtgttgtttcaggaatatagtcttcaagctctgagattctttcctctgcttggtctattctgctactgatacttataattgcattgtgaagtttttgtgttgtatt

SEQ ID NO: 938796 - DNA, 602 bp, Homo sapiens
cttatttctcctttgcttatgaagcttagtttggccagatattaaattctgggttggaaattcttttcttttagaatgttgaatatggcccccaatctcttctggcttgtagggtttccacggagaggtctgctgttggtctgatgggcttttctttctgggttacctagcctttctctctgtctgctctcaacattttttcttttatttttaccctggagaatttaataattttttgtcttggggttgacattcttgtggagtaacttaattgggttccctgcatttcctgaatgttaatgccrgcatgtctagctatgttggggaagttctcctggctgatatcctgaaatatgttttctgacttggttccattctcctcatctctttcaggtatatcaatcagtcatagtttcagtctctgtaaataatctcatatttcttggaggttttgtttattttttttcattcttttttcctctagtcttgtctgcatgtgttgtttcaggaatatagtcttcaagctctgagattctttcctctgcttggtctattctgctactgatacttataattgcattgtgaagtttttgtgttgtatt

SEQ ID NO: 938797 - DNA, 602 bp, Homo sapiens
cttatttctcctttgcttatgaagcttagtttggccagatattaaattctgggttggaaattcttttcttttagaatgttgaatatggcccccaatctcttctggcttgtagggtttccacggagaggtctgctgttggtctgatgggcttttctttctgggttacctagcctttctctctgtctgctctcaacattttttcttttatttttaccctggagaatttaataattttttgtcttggggttgacattcttgtggagtaacttaattgggttccctgcatttcctgaatgttaatgccggcatgtctwgctatgttggggaagttctcctggctgatatcctgaaatatgttttctgacttggttccattctcctcatctctttcaggtatatcaatcagtcatagtttcagtctctgtaaataatctcatatttcttggaggttttgtttattttttttcattcttttttcctctagtcttgtctgcatgtgttgtttcaggaatatagtcttcaagctctgagattctttcctctgcttggtctattctgctactgatacttataattgcattgtgaagtttttgtgttgtatt

SEQ ID NO: 938798 - DNA, 595 bp, Homo sapiens
gctcatgcctgtaatcccagcacattgggaggctgaggtggggagataacgaggtcaggagatcaagaccatcctggctaacacagtgaaaccctatctctactaaaaaaatacaaaaaaattagccaggcgtggtggcrggcgcctgtagtcccagctaatgaggaggctgaggcaggagaatggtgtgaacccaggaggcagagcttccagtgagccgagattgtgccactgcactccagcctgggtgatggagtgagactccgtctcaaaaaaaaaaaaaaaaaaaaaaaaaaaaattaaaatcttatcaaggatcttcccagactacaatggagtaaaactagaaatcaataacacaggacctttggaagtttacaaatacatgaaaattaagcaagatgctcctgtacactattgggtaaaggaaaaaaatcaaggaaagaaaaacaatcttgagacaaatgaaaattgaaacacaacataccaaatccaatgggatacagcaaaagcagtgctaaaagtttatagcaataaacacttacatcaaaaatgcaagaaaaattcaaataaactaatgttgcacctacaggaa

SEQ ID NO: 938799 - DNA, 595 bp, Homo sapiens
gctcatgcctgtaatcccagcacattgggaggctgaggtggggagataacgaggtcaggagatcaagaccatcctggctaacacagtgaaaccctatctctactaaaaaaatacaaaaaaattagccaggcgtggtggcaggcgcctgtagtcccagctaatgaggaggctgaggcaggagaatggtgtgaacccaggaggcagagcttccagtgagccgagattgtgccactgcactscagcctgggtgatggagtgagactccgtctcaaaaaaaaaaaaaaaaaaaaaaaaaaaaattaaaatcttatcaaggatcttcccagactacaatggagtaaaactagaaatcaataacacaggacctttggaagtttacaaatacatgaaaattaagcaagatgctcctgtacactattgggtaaaggaaaaaaatcaaggaaagaaaaacaatcttgagacaaatgaaaattgaaacacaacataccaaatccaatgggatacagcaaaagcagtgctaaaagtttatagcaataaacacttacatcaaaaatgcaagaaaaattcaaataaactaatgttgcacctacaggaa

SEQ ID NO: 938800 - DNA, 655 bp, Homo sapiens
ctgttttgtcatatatttttaaaaaacttacatcatgcatgttctcccatgtaagcagcccagccatagtttttaatgactacactgcattccaacatatgacaaccccatgattcattgaaggtgtctcctattactggacaaaaacttccccccagtttcctcaccgttaccaaatcatgctgcgatgaacaaccttacatgtcaatctttttgtacatggttctttgggaaaatctcccacctgatcttctgacacatttttgttttgcttctttctgccagtcaacaatgtcggaatgcttccaaaccttctcccaagccatttcctgaacgcaccggatgaaatccaggtagacttgtgctcttctgtgtatagattcctcttayccaggttctgggtcccctggctgggtaatgagtcaggcctgggaaggcgtgatggaagcatgcatctggccgaaatcctggactgtatgtattgaggccccctttcctcttcaccttagcactcgatccacagtcaagagtaccacttttcacgatatctctaggatatggacatcttcctccttctctgcacatcaaaacttacctgtccattgtcctatgcttctggggtgctgcactctactttataaagggtaattctgcc

SEQ ID NO: 938801 - DNA, 655 bp, Homo sapiens
ctgttttgtcatatatttttaaaaaacttacatcatgcatgttctcccatgtaagcagcccagccatagtttttaatgactacactgcattccaacatatgacaaccccatgattcattgaaggtgtctcctattactggacaaaaacttccccccagtttcctcaccgttaccaaatcatgctgcgatgaacaaccttacatgtcaatctttttgtacatggttctttgggaaaatctcccacctgatcttctgacacatttttgttttgcttctttctgccagtcaacaatgtcggaatgcttccaaaccttctcccaagccatttcctgaacgcaccggatgaaatccaggtagacttgtgctcttctgtgtatagattcctcttatccaggttctgggtcccctggctgggtaatgagtcaggcctgggaaggcgtgatggaagcatgcatctggccgaaatcctggactgtatgtattgaggccccctttcctcttcaccttagcactygatccacagtcaagagtaccacttttcacgatatctctaggatatggacatcttcctccttctctgcacatcaaaacttacctgtccattgtcctatgcttctggggtgctgcactctactttataaagggtaattctgcc

SEQ ID NO: 938802 - DNA, 556 bp, Homo sapiens
ttcagcacagtttcaggatacaaagtcaatgtacaaaaatcactagcattcctctatacaagcgatagccaagccaagagccaaatcaggaaggcaatcccattcacaatcgccacagaaagaataaaatacttaggaatacagctaacctgggaggtaaaagatctctacaatgagaattacaaaacactgctccaagaaatcagagaagacacaaacaaatgggaaaacatcctatgctcctggataggaaataaatatcattaaaatggtcatactgcccaaagcaatttacagattcaatgctattcctatcaaactaccaatgacagtattcacagmactagaaaaaaaactactttaaaattcatatggaaggaaaaaagagcctgaacagccaaggaaatcctaagcaaaaagagcaaagctggagacatcatattacccaacttcaaagtatactacagggctacactaaccaaaacagcatggtaccagtacaaaatcaggcacatagaccaatggagcagaatagagagcccagaaataaggctgt

SEQ ID NO: 938803 - DNA, 568 bp, Homo sapiens
gtagcgtaacctgccccaggtcacacagcttctatgtggtagatcagtgatttaggtctgtctgtcaccaaaccccaaatcactaatctttacctcatgtatgtcacactacaatatagccacttgtttacatgtctgtccctctgtcacctaaatcatcaactcctaccaagagattaagaatcatgcttttttttcccattgtttttgtccctgctggaacagggtcatggtggccacacagtatatatttccccaattttaacatttttttattttaaaaagaggagggcaatattgccaatggatggggttgatataaagattttctttttcctgaaatggagtcttgctctgtcacccaggctgaagtgcaatggttcamccttggctcactacaacctccgcctcccagattcaggtgattctcgtgcctcagccacctttgcaccatgacgctcagctaatttttgtatttttggtagagatggggtttcatcatgttggccaggctggtcttgaactcctggcctcaagtggtctgcccgcctcagcctcccaaagtgct

SEQ ID NO: 938804 - DNA, 578 bp, Homo sapiens
tgggcgcagcttcagcagacttaaacgttccagcctgctggctctgaagagagcagtagatctcccagcacagtgcttgagctctgctaagggacagactgcctcctcaagtgggtccctggtccctgtggctcctgacagggaaaygcctcccaacatgggtcaacagacacttcatacatgagagctcccactggcatctggcaggtgcccctctgggatgaagctttcagaggaaggagcaggcaggaacctttgctgttttgcagcctccactggtgatacccaggaaaacagggtctggagtggacccacaacaaactccagcagacctgcagaaaaggggcctgattgttagaaggaaaactaacaaacagaaaccaatagcatcaacatgaacaaaaaggatgaccatgcaaactccattcgaaagtcactaacagcaaagaccaaagatagataaatccatgaagattaggaaaaactggcatgaaaaggctgaacattccaaaaaccagaatgcttcttctccaaaggatcacaactcctcgccagcaagggaacaaaactggatggag

SEQ ID NO: 938805 - DNA, 572 bp, Homo sapiens
tgactcagggagggcaagagccaggggctgggcgaggctgtggaggagggctctgcgggagcagggagcccggcagcttcctgcgggtgccgggacgtgccgtccacagggttcaccatgtgtttttttcttcaccggccatgagaaaggattaattcagaaatctaaaaatggtccccaacaggctgagaagccaaacacccacaagccaccttccactaagmgacgaattaccaatgtactggtggtcctgatgtctagataaaaatgaattccccaaccatgtcttacagcaaattgccacaaggcaaaatccaaagtaagcacacaccattatcctgcccctgtaccaggaaagcccccagggaatgaaggtagagaagaggaatttaaggcaagggttagtcaggagctagtctacttcttgctcctcaaaagatagcctgtaatttactgagcacttactatacgccagccctgacaggcagacattaattgccattttgcagatgaagaaactaaagctcagagaaaagaactaggtgcaaagtcacagcatgattgggaaacag

SEQ ID NO: 938806 - DNA, 572 bp, Homo sapiens
tgactcagggagggcaagagccaggggctgggcgaggctgtggaggagggctctgcgggagcagggagcccggcagcttcctgcgggtgccgggacgtgccgtccacagggttcaccatgtgtttttttcttcaccggccatgagaaaggattaattcagaaatctaaaaatggtccccaacaggctgagaagccaaacacccacaagccaccttccactaagagacgaattaccaatgtmctggtggtcctgatgtctagataaaaatgaattccccaaccatgtcttacagcaaattgccacaaggcaaaatccaaagtaagcacacaccattatcctgcccctgtaccaggaaagcccccagggaatgaaggtagagaagaggaatttaaggcaagggttagtcaggagctagtctacttcttgctcctcaaaagatagcctgtaatttactgagcacttactatacgccagccctgacaggcagacattaattgccattttgcagatgaagaaactaaagctcagagaaaagaactaggtgcaaagtcacagcatgattgggaaacag

SEQ ID NO: 938807 - DNA, 593 bp, Homo sapiens
atgtattagtcagtttgtgctgctatagactgggtggcttaaacaacaaacatttatttatcacagttctgaggctgggaagtccaagatcaagatctagtgtctggtgagagcctgcttcctatttctagatggccatcttcttgccttgtcttcataaggagaagaacagagagaagggaagtaagtctcttcttataagggcactcatcttatcgtgaaggttctaccctcctgatctcattaacaccctatctctaaatcccatcacttagggtatgtttcagtgcgtgaatctggaggggacacaaatattcagtccatagcaatatggtattgaatagttacttcatcagtttyagctgaatttaactgaattgtaatatgttattttaggccctagctcagaatgcaacaacagtgctttagaaatgtgtaagatggcctgaaagcctggaaagttatctctgttcaggagaaaagagctaacatatgaaaaattcattctatgtgccaagtatttatatatatgtgtgtatatatatacatatatatacgcacacacgcatatatatatatatatatatacaata

SEQ ID NO: 938808 - DNA, 628 bp, Homo sapiens
acttcatctggggtcctgtctgggatgcatcaaaagggtgagtaaatgaggatctgccggatctgtctcttcactgagttatgccatttgcagaggacaggatgcaaccctgccacctctttctttcaggtgaaaggaatgttggctctgtttcccttcacagaggtatagccrtcgtgtggagctagaataaagtcctgggcaattgaaagcatctggtcaaggacactccttgttgttgctggaaggcctctagactggcccccatccctgactacctattagggcatctatcaagacccccagacttttctatggtatctttcctttctttctttcgtggtttgaaatggctcgtatcccttcttttataatgataagggtattgctacaaagtgcagaaatgttattaggtagaataagcatttggcccagccccagatatgtaattcagaacaatgtgattgccatctgttctgagaggtgccatctccacccccacctcaatacccgcaggcacgtgcagcacacagcggctcccctcctcccctgctcctctcccatccggggcacttggtcatattcactgcatgcacgtgccacacccaatggccacatgtggtgggag

SEQ ID NO: 938809 - DNA, 663 bp, Homo sapiens
atggcgagtcccatgaaagggtcaaggaaatatcctacttcatctggggtcctgtctgggatgcatcaaaagggtgagtaaatgaggatctgccggatctgtctcttcactgagttatgccatttgcagaggacaggatgcaaccctgccacctctttctttcaggtgaaaggaatgttggctctgtttcccttcacagaggtatagccgtcgtgtggagctagaataaagtcctgggcaattgaaagcatctggtcaaggacactccttgttgttgctggaaggcctctagactggcccccatccctgactacctattagggcatctatcaagacccccagacttttctatggtatctttcctttctttctttygtggtttgaaatggctcgtatcccttcttttataatgataagggtattgctacaaagtgcagaaatgttattaggtagaataagcatttggcccagccccagatatgtaattcagaacaatgtgattgccatctgttctgagaggtgccatctccacccccacctcaatacccgcaggcacgtgcagcacacagcggctcccctcctcccctgctcctctcccatccggggcacttggtcatattcactgcatgcacgtgccacacccaatggccacatgtggtggga

SEQ ID NO: 938810 - DNA, 756 bp, Homo sapiens
atgcagactctaaatgggatcccagtgacaagatgggagaatggaagaggagatgttttcaggcgtgcataatagagggcttatgtaagactagaactaagcttctcaactgtaccaagctatccatgatagaccaaggatttgatgagaatcccaatgccttcctggaaaggctaagagaggccttgataaagcaacacctctgtatctcctgattcagttgggggacaactaattctaaaggataaatttattacttaggcagcccctgatatcaggaggaagctgtggaaacaggccctgggaccagayggtactttagagaacctcctgaaagtgaccaccttggtcttttagaataggtcactggaatagattcttgaatttattgtatctgagtaaagtcctgggaagctgacagagttacctccagcaactcagaagagcaccaaaaataccaatgtgaagagatcagggacctcaagctaaagatctcaaaagataagcattaataattaaccttccatggatagtctttttatggtcttgcctatgattgctgttcttaccttcattctgttctataccatggggtacagtaatgttttcagaatgattagtgtatttcacttcttatttctgttgtccttggcactagattctttccttttaaccccttgttgtataatacacatatttgatccatgcatacttaaccttgtaaaacttgtgtcttcttgcctagatgccatcgaa

SEQ ID NO: 938811 - DNA, 756 bp, Homo sapiens
atgcagactctaaatgggatcccagtgacaagatgggagaatggaagaggagatgttttcaggcgtgcataatagagggcttatgtaagactagaactaagcttctcaactgtaccaagctatccatgatagaccaaggatttgatgagaatcccaatgccttcctggaaaggctaagagaggccttgataaagcaacacctctgtatctcctgattcagttgggggacaactaattctaaaggataaatttattacttaggcagcccctgatatcaggaggaagctgtggaaacaggccctgggaccagatggtactttagagaacctcctgaaagtgamcaccttggtcttttagaataggtcactggaatagattcttgaatttattgtatctgagtaaagtcctgggaagctgacagagttacctccagcaactcagaagagcaccaaaaataccaatgtgaagagatcagggacctcaagctaaagatctcaaaagataagcattaataattaaccttccatggatagtctttttatggtcttgcctatgattgctgttcttaccttcattctgttctataccatggggtacagtaatgttttcagaatgattagtgtatttcacttcttatttctgttgtccttggcactagattctttccttttaaccccttgttgtataatacacatatttgatccatgcatacttaaccttgtaaaacttgtgtcttcttgcctagatgccatcgaa

SEQ ID NO: 938812 - DNA, 756 bp, Homo sapiens
atgcagactctaaatgggatcccagtgacaagatgggagaatggaagaggagatgttttcaggcgtgcataatagagggcttatgtaagactagaactaagcttctcaactgtaccaagctatccatgatagaccaaggatttgatgagaatcccaatgccttcctggaaaggctaagagaggccttgataaagcaacacctctgtatctcctgattcagttgggggacaactaattctaaaggataaatttattacttaggcagcccctgatatcaggaggaagctgtggaaacaggccctgggaccagatggtactttagagaacctcctgaaagtgaccaccttggtcttttagaataggtcactggaatagattcttgaatttattgtatctgagtaaagtcctgggaagctgacagagttacctccagcaactcagaagagcaccaaaaataccaatgtgaagagatcagggacctcaagctaaagatcwcaaaagataagcattaataattaaccttccatggatagtctttttatggtcttgcctatgattgctgttcttaccttcattctgttctataccatggggtacagtaatgttttcagaatgattagtgtatttcacttcttatttctgttgtccttggcactagattctttccttttaaccccttgttgtataatacacatatttgatccatgcatacttaaccttgtaaaacttgtgtcttcttgcctagatgccatcgaa

SEQ ID NO: 938813 - DNA, 626 bp, Homo sapiens
agaagtaattaagcttagtgaggaagacatgtctaaagccaaaataggttaaaagttaggccttttgcaccaaacacttagccaagttgtgaatgcaaaaaaaaaaaaaaaagttcttgaaggaaattaaaaatgctactccagtgaacaaatgataagaaagcaaaacagccttactgctgatagggagaacattttagtggtctggatagaagatcaaaccagccacagcattcycctaagccaaaacctaatccacagcaattcaccaactctcttcaattctattataagaaggttgatagaggtgaggatgctgcagaagaaaagttggaagctagaaaaagttggttcataaactttacagaaagaagctgtctccttaacataaacatgcaaggtaaagcaggaagtgctaatgtattaatagaaattacagaaaattatccagaagatatggctaagttcactgatgagtgtggctgcactaaacaacagattttcaatgtatatgaaacagccttttattggaagaagatgccatctgggcctttcataggtaaaaaagagaagtcaatgtgtggcctcaaatcttcaaaggacaggctgactctcttgttagcggc

SEQ ID NO: 938814 - DNA, 626 bp, Homo sapiens
agaagtaattaagcttagtgaggaagacatgtctaaagccaaaataggttaaaagttaggccttttgcaccaaacacttagccaagttgtgaatgcaaaaaaaaaaaaaaaagttcttgaaggaaattaaaaatgctactccagtgaacaaatgataagaaagcaaaacagccttactgctgatagggagaacattttagtggtctggatagaagatcaaaccagccacagcattctcctaagccaaaacctaatccacagcaattcaccaactctcttcaattctattataagaaggttgatagaggtgaggaygctgcagaagaaaagttggaagctagaaaaagttggttcataaactttacagaaagaagctgtctccttaacataaacatgcaaggtaaagcaggaagtgctaatgtattaatagaaattacagaaaattatccagaagatatggctaagttcactgatgagtgtggctgcactaaacaacagattttcaatgtatatgaaacagccttttattggaagaagatgccatctgggcctttcataggtaaaaaagagaagtcaatgtgtggcctcaaatcttcaaaggacaggctgactctcttgttagcggc

SEQ ID NO: 938815 - DNA, 811 bp, Homo sapiens
ctcccagcgagatcaatgcagaaggcaggtgatttctgcatttcaaactgaggtacctgggtcatctcattgggactggttaggcagtgggtgcagtccacggagggtgagtcaaagcagggtgggacgtcgcctcacccaggaagcacaaggggttggggaactccctcccctagcctacagaagccataagggactgtgccttgagggacagtgcattctggcccccatactacgctttttccacagtcttcacaacccacagaccaggagattccctcagatgcttaggccactagggccctgggtttcaagcaaaaaactgggcggccatttgggcagaaaccgacctagctgcaggattttttttttttttttaatatcccagtggcacctggaatgccagcaagacagaaccattcactcccctggaaaaaggactgaagccaaggagctaaatggtctagctcagaggatcctacccccacagagcccagcaagagaggatccattkgcttgaaattcttcctgccagcacagcagtctgaagttgacctgagatgctccagcttggtgggcggaggggcatctgccaatactgaggcttgagtaggcagttttcccctcacagtataaacaaagctgccgggaagtaggaactgggcaaagcctaccacagctctgcaaagctgatgtagccagacagcctctctagattcctcctctctgggcagggcatcactggaagaaaggcagcagccacagtcacgggcttatagataaaactcccatctccctgtgacagagcacc

SEQ ID NO: 938816 - DNA, 653 bp, Homo sapiens
ttttatcgaggttcttagcttcctttcattgggttagaaaatgctcctttagctcagaggagtttgttattatccaccttctgaagcctacttatgtcaaatcgtcaatctcattttccatccagttttgtgtccttgctggagagaagttgtgatcatttggaggagaggaagcattctggtttttgtaattttcagcgtttttatgctttttttttttctcatctttgtgcatttatctacctttgatctttgaggctgatgacctttggatgggggttttatctgggttctttatgttgatgttggtgttgttgctttctgtttgttaatttttcttctaacaatcagggccctcttctgcaggtctgctgcagtttgctagaggtccactttagaccctgtttgcctgggtatcaccagtggaggctgcagaacagcaaagtttgctggctgctccttcctcyggcagcttcatcccagaggggcctggcctgatgacagccagagctctcctgtatgaggtgtctgttgacccctgttgagaggtttcttccagtcaggaggcatgggtgtcagagacgcacttgaggaggcaagctgtctcttagcagagcttgtgcactgtgctggggaatccctgttgtcaggat

SEQ ID NO: 938817 - DNA, 601 bp, Homo sapiens
atccagctattgcccattcagtatgatgttggctgtggagttgttataggtggctctaattatgttgaagtatgttcctgcaatacctagtttattgagagtttttgacatgaaaagatgttgaattttatcaaaggacatttttgtatctattgaaatatgcatgtggtttttgtctatagttctgtttatgtgctgaatcaaacgttttgatctgtgcatgctgaaccaaccttgcatcgtgcagattaagcctacttgatcatggtggaattagtgactactttttttttttttttcttttgagacagattctcactcagcctatcgccttcggtgaagtgcagtggcatgatttcgactcacagcaaactccacttctggggttcaagcgattctcctgcctctgcctcccaagtagctgggattacagtcatkcgcaaacacacttggctaatttttgcatagatactagagacaggatttcaccgtgttggccaggctgatcctaaactcttgacctcaagtgatccacctgcttcagcctcccaaagagctgggattacaggcatgagtcaccgtgcccagcctgaattaacta

SEQ ID NO: 938818 - DNA, 512 bp, Homo sapiens
aatcccagctactcagaaggctgaggcagagagaattgcttgaacccaagaggcagaggttgcagtgagctgagattgcaccactgcactccaggctgggcaacagaacaagactccgttttttttgttttttttgttttttttkttttttaagaaaaggaaaagtctggagtttgagaccatcctggccaacatggtgaaaccccgtctctactaaaaataaaaaaaatgagctgggcatggtggcaggtgcctgtaagtctcagctacttgggaggctgaagcagaagaattgcttgaaccctgaagcgggaggttgcagtgagcccagatcacgcccctgcactccagcctggcaacagagcgagactccacctcaaaaaaatttttgttttttcccctcaggcctcaggcccgccttggcctcccaaagtgctgggattacaggcatgagtcactgtgcccagccagaatttttcttctttatagcagtgactctgtagcgttggtgg

SEQ ID NO: 938819 - DNA, 745 bp, Homo sapiens; identical to SEQ ID NO: 936492

SEQ ID NO: 938820 - DNA, 560 bp, Homo sapiens
atgtagaaagtaatattatcctctccctccctggatattgtgaacaatatcacaggagggtgtacaccccctgcagtattgaggttaatatcattttctttccacctggttactacgaacaatatgacagaacggtgtacaccccctgcgatattgggggcgatatgctcccccccccaccgggtaatagcaaaaatatcacaggtgggtgtacaccccctgcaaaattgggaataatatcatcctttcccygccttgatattacgaacaatatcccgagggggtgtacaccccctgcgatattaagagtaagaacatactctcacccctggatatcatgaacaatattacaaaggggtgtacacgccctgcagtgttaaaagtaatatcatcctctttccccctggatattatgaacaatatcacgaggggtatacaatctttgcgacattgggagtaatatcattttctcccccagtgcatattacaaacaatatcacagaaggatgtacaccctctgtgatattgggaatacttttatgctcccccctgaaaaacta

SEQ ID NO: 938821 - DNA, 560 bp, Homo sapiens
atgtagaaagtaatattatcctctccctccctggatattgtgaacaatatcacaggagggtgtacaccccctgcagtattgaggttaatatcattttctttccacctggttactacgaacaatatgacagaacggtgtacaccccctgcgatattgggggcgatatgctcccccccccaccgggtaatagcaaaaatatcacaggtgggtgtacaccccctgcaaaattgggaataatatcatcctttccccgccttgatattacraacaatatcccgagggggtgtacaccccctgcgatattaagagtaagaacatactctcacccctggatatcatgaacaatattacaaaggggtgtacacgccctgcagtgttaaaagtaatatcatcctctttccccctggatattatgaacaatatcacgaggggtatacaatctttgcgacattgggagtaatatcattttctcccccagtgcatattacaaacaatatcacagaaggatgtacaccctctgtgatattgggaatacttttatgctcccccctgaaaaacta

SEQ ID NO: 938822 - DNA, 586 bp, Homo sapiens
attcggtaaataaaatgtggcatatccaaaaactggaatattactctgtcacagaaaggaataaggaattcgtatatgttccaacatggatgaaccatgaaaatgttatattaagcagcagaaggtaaacacccaaattcacatattgtatgctcccatttacagttggaaatgtgccacataacatttcagtcagcaatggactgcatatatgacagtattcctgtaagattataatactgtatttgtactgtaccttttctatgtttagatacacaaatacttaccattgtgttacaattgtcagagtgttccctacagtaatatgctgtacaggtttgtaacttaggagcaagaggctataccatatagctaggtgtgaagtaggatctaccatctaggtttttgtaagcrcactctgatgtttgcacaatgacaaaattgccttatgacacacttctcacaacatgtccccatcattaagggacacatgactgactgtatatgaaataacaagaccagagaaaaccataaaaacagaaagcagattagtaattgccaggagtttagtggaagggggtttggg

SEQ ID NO: 938823 - DNA, 623 bp, Homo sapiens
tttacaaaaatcctgaagcccaggctgtactccagaccaattatatgagactctcagggtgtcagccccaggcgtcaggattcttttacaactctctgggtgatttcaacatacagttaaggttgagacttactgttctagtatgttagtgaggtactctatgtggatgccatctgcaaaattaatgtgaatgcctttcatttcattattgatttgattatgggtcaagatagtatctgggtttgtgccaaccctasttgggaaatcgtgggcccaaaccctgcccccaaacattgattctgctccactcttatccccctaccatgctaacataaaaggaaaatcacttttataatgcaaaaaataagagagaatctagtatcatttcttcattttagagctgaggaaactgaagcacaaagaggaggagcaacctacctcaaaccccaagttgttgttggagccaatatgcaaatgcaagtgtttttatttggcatccagggagaaattgtacattgtctaggcgtgttttgatttgtaacagagtaagcgctgtcttttataatttaaaactttgtagattgataattacagaggtttgcattcaatggtaggttgtatgt

SEQ ID NO: 938824 - DNA, 604 bp, Homo sapiens
ctgggaagacagactacaaaaaaatacacaaaataacacaaaacacttggccaagtgatgtgcatagaacaatggtgcagtgtaagaggatgggggtgatgaatggtgaggggtgagaagtattttaaatagagtggctaggaaaaatctttcttaagagataatattagagctgatatctgaataacaaggagatgagaattggaacaagaactttccagggagaggaaaaagcaaatgcaaagacctttgacgtgtgattagcttgggatatttaaggaacaataaagtccagggtagctagagtagaggaagtgaggggaagagggagtggtgggacatgaagttagagaaataggcaaccaccagattatggagagctgtgcaggtcataagatgcttgggacttcagaagaggagtgctttagctgttrggtagaaatttgattgtaggaagcaagagaagtagaaggaattccagttggaagttgtggcaatggtctaggcttggactagctggtattggtgaaagtgatctcttcagtttggggatatatgaagtaggtagacctcaataggacttgctgatgccctgaatgtgggg

SEQ ID NO: 938825 - DNA, 808 bp, Homo sapiens
aagcaaattcttcattttggtgtagcactataagttcagagtgtttttgcaattatatccctaaggagttttcgctttctgtaataagctttacaaaatataagcccaggatgaattattatcccgggaaggatttctccctttatttgcccaattttgtagtactgctctttctccttaatcaggacactttttctccagttacctyttttctgccccaagtcactagcgagaaataagagtaaagtttagtattttgtccttttaatgggaaaagtcaattccagatgggacccaaccaagctcaaaatagttctcttctgggcgggaacgcaaatgctacatttcctaggtaatgttattgaagcatgtctgtcttcataaacactttgtaaaaaaaaaaaaaagtgtacaatgataacataattattattaggcatgtaccatttccagaattcactgtaagttctacagagatgcaccagagctgtggttactttagctggtggggttcgggcagctgggactcactgttgcaatggtcacaaatgccctaatcattgagtcccaaatgtctagttgaacttaatgcttaataacatctatctacccagagggcaacaaaatgtttgttcctggcttgcgaggccactgatattttcatttttttttcctacagaactattggcctgaggcccctggaaacattgcttcattgcttggccttataagaatttacttgacctattttgtggaagcacatttaccccagtcttagaggtttttccatgcaaaagagataaatgaa

SEQ ID NO: 938826 - DNA, 490 bp, Homo sapiens
gaacagacaccaaaaagggtatgggggatgcatgttgttgtctgtttgtattgctacaacaaaatcctgagactgggtaatttataaattatagaaatgtacttctcacagttctggaggctgggaagtccaaggtcaaggcaccagcagtttaggtgtctgctgagggcctggtctctgcttccaagatggcgccttcaatgctgtgtcctcacatggagaagggatggaagggcctaggctaattctctccagcccttttataaggcactagtctcatcyatgagtatccagccctcatggtctaatcacctaatcactacctaaaggccccacttcctaacactgctgcactggggattgagcttcaacataagttttgaattttttgtttgtttgtttttttgagaccaggtctcactctgtcacccaggctggagagcagtggtgcaatctcagctcactgcagccttgacctcccctggtgcag

SEQ ID NO: 938827 - DNA, 618 bp, Homo sapiens
ccacagtgcctagctcctccctgcaggcagattgttgggatgtctgccaaagtttggctaactctgggctttttgtgagcttcagagggcaggaagtgggtgcttattggtccatagctggccatggacaggcctagaaaaagccccattaagttctcactctggtccagggaactggcagcctgaccccctaggtttcaggccatcagtcctaggcctgaaggtggggcttggcwgggacctgtccctttaagcccaggagcctttctgcctctcactgccatcaacctgtcatccccagtgcccaaactgttcctaacaaggggtacctgcaggcctgtgctgaggcaccatcaactccccctttgcctccgtcccatgctcatcagagcccagagcagtgacggggtggggccacctgggcttcctgggttgactagggtctcagaaagctgtgaaactcactcatttcctgcatcagggcttacttcagtcctggatgaataatattgaagatatatgcttaaaaaattcctaacaccaggatttgtgcatgtgatttcttccccaagaaagctataaacagtgaaaattttgctgtaaatttctctgtgtccc

SEQ ID NO: 938828 - DNA, 618 bp, Homo sapiens
ccacagtgcctagctcctccctgcaggcagattgttgggatgtctgccaaagtttggctaactctgggctttttgtgagcttcagagggcaggaagtgggtgcttattggtccatagctggccatggacaggcctagaaaaagccccattaagttctcactctggtccagggaactggcagcctgaccccctaggtttcaggccatcagtcctaggcctgaaggtggggcttggctgggacctgtccctttaagcccaggagsctttctgcctctcactgccatcaacctgtcatccccagtgcccaaactgttcctaacaaggggtacctgcaggcctgtgctgaggcaccatcaactccccctttgcctccgtcccatgctcatcagagcccagagcagtgacggggtggggccacctgggcttcctgggttgactagggtctcagaaagctgtgaaactcactcatttcctgcatcagggcttacttcagtcctggatgaataatattgaagatatatgcttaaaaaattcctaacaccaggatttgtgcatgtgatttcttccccaagaaagctataaacagtgaaaattttgctgtaaatttctctgtgtccc

SEQ ID NO: 938829 - DNA, 670 bp, Homo sapiens
tggctaattttttttgtatttttgtagagatggggtttcgccatgttggccaggctggtcttaaactcctgacattgtgatttacccacctcggcctcccaaagtgctgggattacaggtgtgagccactgcacctgtaacctaattaagaaaacctgtaagttttcttaattaggaccctgatgccctgcctagttcttactagtaacctcctggcaaaatttagagtcaattctctctatctatgtccccctactctcattcctgtcatgtccaggcactggtgagagagctgattcagcatgaactaacctttgaagagctataatatcaccacttgccatactgaraggtgacagcacgctggcagccctcacagccctcgttcgctcttggcgcctcctctgcctcggcgtccactctggccatgctcggggagtccttcagcctgccactgtgctgtgggggctcctctctaggctggttgaggatggagccagctccctcagcttgctaggaggtgtggagggagacgcatgggcaggaaccggggctgcgcctggcgcttgcgggccagctagagttccagatgggcgtgggcttggtgggccctgcactcagagcgggcagccggccccactggccccgggcactgaggggcttagcacct

SEQ ID NO: 938830 - DNA, 799 bp, Homo sapiens
ttggaaatgacatttccaggcaatgttgaatagcttagcccttcagggtttgttcccttttcttcttcatcatcatttagagaaatcctagaaagtgttcctgttattgtggctgctcggcaaggaccaatatccttatgaagaactgtgagtaggaatgtaaagttgaagaaagagagttaatgtgtgtttatttttcattattatattatgttgtctcgctttctactaaacattaaagatatattatttggtaggtatgttatttaaaaaaaatacatatcaatttgtttgtacatggtccagagagattactcaatcacttttcattgattctgttatgctctcatagatctcaggtagcccatagctaaagcaaatctgaaagttgattaatgggctttcaaaaatcttagtaccctgtccttaaacaactccatataacttttcagggaaataggagattaccagagaagttttctccatcaatgtgctccaaaggatttttgtaaaattatgaacatattcatacaaatttgatttttttyttaatggctttccctccaatgtgttctagaagttacgctcattaaaatgcttcttgaagggataattaatgggaacttcatcctactggatcagaaatccctccaaaaattatgcatattgaaaattaatgaggattttttcactgaagtccatatggtcaaggtggatacaatattcaaaagtatttatcatattcagttttatatggaagaaagaaaatttaaaaaattaatctataagctggaatgcc

SEQ ID NO: 938831 - DNA, 635 bp, Homo sapiens
ggtactcttgagtgttcctcccacctcagtatcccaagtcactgggactacaagcatgcaccactacgcctggctactattttttatattttgtagaaacaatcttgctttgttgcccaggctggtgtcaaacttctggcttcaagtgatccttctgactcagcctcccaaagttctgggattacacacatgagccacactgttcccagcctgaaatgtatttcttaaataataagatgtaacagtcaaaattactccctgatccatggactccaggatgaatgttatattagcaggcatgtaaacaacattaatctccttgtacatctccatcagagctcttgggtgtattgtcaatcagcagtgatattttgaaaggactctttttctgagcagtaagtctcaacagtaggtttaaaatattcagtayatgatgttataaacagatatgctgtcattcaggctttgttgttcaaactttacagagaacaggttaagtaaatacagcatagttcttaaggtccctagtatttttagagtggaaaatgagcattggcttcaacttaaagccactagcttaagaccctgataagagagtcagcctgtcctttgaagttttaaaccaggtcttgact

SEQ ID NO: 938832 - DNA, 700 bp, Homo sapiens
ccagccacagctccagagctgggcatccccgcactcctgggggcccaggaagcacctcctggccctgcaggctcagaagtgcctgttcgaactccgtggcctctccccacccccagtgcctgctccagcacagagcaaagtagtagctgagaccagatactgtcgcaaccccactgtgtggaaacatgctcagggaagtactgcatgccacctcaagcccctctggactttgggtgctgatgagcttgggaaggagactggggagtgggggctgaaggcagctcagtgcaagcctgaaggtgccccttggcaccaacagcctgggtgccatgaatggcatgttgacggcaggargccaacagtttcctctgtggaaagggacaggtcctgcccatcttcaagtcagagacagcctgaagcatggggtcgggctgccagctccaggtggagtccgtggccccaagtgagaacttatggtgcttttttcaggcccacctatggccacccatggatcagtcagcatgtacttccttttgagtccataaaaaccccagactcagccagactcagctagacatagggatgacctgcctgcagataggagctacccactctgggtctcctctcctctgagggctgcaggctcaaccaggatgacctgcctgcagataggtgctacctgctaagggtcccctctctg

SEQ ID NO: 938833 - DNA, 591 bp, Homo sapiens
aaaatatattaacacaggaaaagaaaagcaaatactgcatggtcttgcacaagtgggaggtaaacattgaatacacacagacataaatatgggaacaatagatacagcaggctactggataggagggagggaaggaatgtaggcttaacaaccacctatygggtattatgtttgttgcagaaagtcagggaccccgaatggagggactggctggagtcacagcagaggaatataaattgagaatatttcattttaatatggacatatatcagttcccaaataatactcttataatttcttatgcctgtctttatttcaatctctgaacacaaattgtgaagatttcactttaatatggacatttatcacttcccaaaattaatacttttataatttcttatgcctgtctttactttaatctcttaatcctgttatctttgtaagctgagaatgtatgtcacctcaggaccaatattgtgttaactgtacaaattgattgtaaaacatgtgtgtttgaacaatatgaaatcagtgcaccttgaaaaagaacaggataacagcgattttcaggaaacaagggaatacaaccat

SEQ ID NO: 938834 - DNA, 571 bp, Homo sapiens; identical to SEQ ID NO: 929486

SEQ ID NO: 938835 - DNA, 820 bp, Homo sapiens
agtaaatccatccaaatctgaattaatgcagttgtatttcacccagatacagcttcatagtccttattatggtcattgaaccacctggctagttcctcctccatggtgtcactaagtgattatgctcagatagtattttagatcacctttctaaaaaaggaactcaagatagataatttacttcacccctcatctctaaatcttaatccaatctaagtatattcatatctcttttaaattgtctctttagtmtccttaagctattcctctagaattgaggccatcaagctacagatggtcttacaaatggagccctaaatgagttcaactaacaacttctactgaggacccctggaccaacccgctggcacttttactggcctagaaagctcccctctggaggacagtacaactgcagggccccttcatcgcccctatccagcaggaagtagctagagcagtcatcagccaaattcccaacagcagttggggtgtcctgtttgaggggggattgagaggtgacagtgtgctggcagccctcgctcactcttggcacctcctcagccttggcgcccactctggctgcacttgaggagcccttcagcctgccgctgcactatgggagcccctttctgggctggctgaggtcggagccggctccctctgcttgcagggaggtgtggagggagaggcgggagtgggaactggggctgcacgtggggctcacgggccactgtgagttccaggtgggtgtgggctcggcgggtcccgcacttggagcggccagccagcaccaccggccccgggcagtgatgggctt

SEQ ID NO: 938836 - DNA, 820 bp, Homo sapiens
agtaaatccatccaaatctgaattaatgcagttgtatttcacccagatacagcttcatagtccttattatggtcattgaaccacctggctagttcctcctccatggtgtcactaagtgattatgctcagatagtattttagatcacctttctaaaaaaggaactcaagatagataatttacttcacccctcatctctaaatcttaatccaatctaagtatattcatatctcttttaaattgtctctttagtctccttaagctattcctctagaattgaggccatcaagctacagatggtcttacaaatggagccctaaatgagttcaactaacaacttctactgaggacccctggaccaacccgctggcacttttactggcctagaragctcccctctggaggacagtacaactgcagggccccttcatcgcccctatccagcaggaagtagctagagcagtcatcagccaaattcccaacagcagttggggtgtcctgtttgaggggggattgagaggtgacagtgtgctggcagccctcgctcactcttggcacctcctcagccttggcgcccactctggctgcacttgaggagcccttcagcctgccgctgcactatgggagcccctttctgggctggctgaggtcggagccggctccctctgcttgcagggaggtgtggagggagaggcgggagtgggaactggggctgcacgtggggctcacgggccactgtgagttccaggtgggtgtgggctcggcgggtcccgcacttggagcggccagccagcaccaccggccccgggcagtgatgggctt

SEQ ID NO: 938837 - DNA, 546 bp, Homo sapiens
ggacactctcaaagagtgatctaatccccttttagtggttcattttagatgtcagcttgactggactatgggggtcctcagatatttgggtggacattattctgggtgtgagggcgtttctggatgagactgacatttgaatcaatagactaagtaaagcatctaatatgggtgagcctcatccagtcagttgaaggcctgaatagaacaaaatgctgaacaagagagaattcactgtttctgcctgaaggtcttaagctgagtcattggtcttctcctgccctcaggcttggactagaacmtacatcattgactctcctgattctcaagccttcatacttggactagaatttacactgccagctctcctcttgcaagcttttggactcacactgaaattcccaccctggttctcaggccttcagactgctgatcctgggacttctcagccttcaaaattgcataaggcaactccttataataaatctgtctgtctaaatctacctatctacctgtccatccatccgtccatctatcctattggtt

SEQ ID NO: 938838 - DNA, 620 bp, Homo sapiens
acacaaaggccgaggcgcggacctgctgttcctttcatgccaatcagtcctggggttgtaatgactacaattttctgatttgaagtcaaaaccaaatggcccagaagagtgattcagactccacgtggccctcttcctgagaagaagaagcacaaatggatttttctttcttaagcccaattgtgtgctgctcatcgacccctcatcatttctgagctctattttcttccctcctgcttgaggcacaattaacggaggcccaraaagttttttgcttcctgtgtcttggctttgtgggtatagcttggccttggtgctgagaaaatgccgaggagcccaaagccctggagttgccttgggagagtcgctcacccttctgggcctcaggatggagggtccaggggctacagagctgtcagcctatgccctgagctgggactctgtggaaatgtgggtagcccagtctgcccagggtgactgactcagactctccaggggtcattgactctttgggtcaaacatctgctcttcaccatgtgaattttaaagtgtaaaccagctgggcacagtggctcacacctgtaatcccagcacttcggaaggccaaggcgagtggatca

SEQ ID NO: 938839 - DNA, 620 bp, Homo sapiens
acacaaaggccgaggcgcggacctgctgttcctttcatgccaatcagtcctggggttgtaatgactacaattttctgatttgaagtcaaaaccaaatggcccagaagagtgattcagactccacgtggccctcttcctgagaagaagaagcacaaatggatttttctttcttaagcccaattgtgtgctgctcatcgacccctcatcatttctgagctctattttcttccctcctgcttgaggcacaattaacggaggcccagaaagttttttgcttcctgtgtcttggctttgtgggtatagcttggccttggtgctgaraaaatgccgaggagcccaaagccctggagttgccttgggagagtcgctcacccttctgggcctcaggatggagggtccaggggctacagagctgtcagcctatgccctgagctgggactctgtggaaatgtgggtagcccagtctgcccagggtgactgactcagactctccaggggtcattgactctttgggtcaaacatctgctcttcaccatgtgaattttaaagtgtaaaccagctgggcacagtggctcacacctgtaatcccagcacttcggaaggccaaggcgagtggatca

SEQ ID NO: 938840 - DNA, 626 bp, Homo sapiens
taagtatttgtgtatatctaaacatacctaaaccagaaaaggtacaggaaaaataaggttttataatcttatggaaccaccgtcatatatatgatctgttgttgacagagacgaacttatggtggtgcatgcctgttgtgttggtgaataccacaggaattatcttggtgaaggaatccagtctccaacagttacatgctatatgattccatctatatggcattctcaagaagaccaaagccatagtaatggaagacagatcagtagctgtaagggactggggaaaggggaggggattgtgattctaaggggacagtrggtgagagtttttggggtgatagaaccaactatatcttgatattgtggtagttacatagatctatacacatgttgaaatccatagaattgcacaccaaaaagtcaaatgaacaaaaataatttaaaaaatatgtataagaatgttcatagaaggtgtatttataacagcctaaacaggtagcctcccaaaagtccattatgagcagagcaggcatgcaaattgtggtatgttggttcacactgggaaacactacccagcactggaaaagaacaaactactggaacatgcaatagcgcggatgagtctc

SEQ ID NO: 938841 - DNA, 668 bp, Homo sapiens
gattacaggcacccgccaccacgcctgggtaatttttgtatttttagtagagatggggtttctccatgttggtcatgctggcctcaaactccctacctcaggtgatctgcccacctcggcctcctaaagtgttgggattagaggcatgagccaccgcgcccggccaatttacatatttttttattatgtatctcttaacaaactgctatggctattattgttttgatagatttgtcttttgggcttcatactagagttatgagtggattgcattccacatacaatattaggctattaaataggtttgtgtacttaattttaccaataggttttatactttcaagtgttttttgggaagaggagagggtcaaatctgttctttggccttcctgtaactggatatttatatctttctcaagtttgggaaagttttctgttattattctttttttggagacatggagacaaggtctcactctgttgcccaygctgtagtgcagtagcacgttaacagctcactgtagctgtaaactcttgaactcaagtgatcctccctgcctcagcccccaagtagctgggattacaggtgtgcaccacctgtaatgcctccctaattttttatcttcttttttgtagagacaaggtctcactatgttgcccaggctggt

SEQ ID NO: 938842 - DNA, 647 bp, Homo sapiens
  misc_feature 533: n = A,T,C or G
ctgaagatggtaggaaagacaatcttggattgcagaaactaccccttccccattcccccagaagcaactttgtggtgcaaaaagggttccagtaagctccaccaccatagcataaagcactctggggtcgtacacttgaaggcagtttaggccacaggatagcaattcctgggcaaatcctggtgctgtgctggtcttagagccagtggacttgcagtgcacaagacctagtgagacaccagctagaacagtcatgggaatgctggcatcacccttttcccaaccccaagaagcacagctcacagctatgggagagatttctttcctctgcttgaaaagaggagaggggagaataaacagggtttgtcttgcaacttggataccagctcagccacagtagaatagggcacygggcagaattctgtggcccacatttcatgtcctagctagcatgacaattctagacacaccctaggccaaaagggaacctgctgccttgaggggaaagacctactcctagcaggatacataanatgctgactcaagaatccacgggccttgaatatacactagcgtacccaggcagcactcacagtgggctttgggtaagacccagggccatggtggcttcaagcgtgactcagctc

SEQ ID NO: 938843 - DNA, 647 bp, Homo sapiens
  misc_feature 533: n = A,T,C or G
ctgaagatggtaggaaagacaatcttggattgcagaaactaccccttccccattcccccagaagcaactttgtggtgcaaaaagggttccagtaagctccaccaccatagcataaagcactctggggtcgtacacttgaaggcagtttaggccacaggatagcaattcctgggcaaatcctggtgctgtgctggtcttagagccagtggacttgcagtgcacaagacctagtgagacaccagctagaacagtcatgggaatgctggcatcacccttttcccaaccccaagaagcacagctcacagctatgggagagatttctttcctctgcttgaaaagaggagaggggagaataaacagggtttgtcttgcaacttggataccagctcagccacagtagaatagggcaccgggcagaattctgtggcccacatttcatgtcctagctagcatgacaattctagacacaccctaggccaaaagrgaacctgctgccttgaggggaaagacctactcctagcaggatacataanatgctgactcaagaatccacgggccttgaatatacactagcgtacccaggcagcactcacagtgggctttgggtaagacccagggccatggtggcttcaagcgtgactcagctc

SEQ ID NO: 938844 - DNA, 832 bp, Homo sapiens
atggtggctcacgcctttaatcccagcattttgggaggctgaggtgggtggatcacctgaggtcgggagttcaagaccagcctggcctggtagagatggtgaatacaaaaatcagccaagtgtggtggtgcatgcctctaatcccacctcttctggaggctgaggcaggagaatcacttgaacctgggaagcggaggttgcagcgagccaagatcatgccattgcgctccagcataggtgacaaagcgagactctgtcaaaaaaaaaaaaaaaaaaagaaaagaaaaaatatcgagcaaacattttttcagtgctgtctttgttccatattctgtctttcctttctcatgtttggctcgtattattgcgtggaccattcctataggcatttctgttttaatgaactataaagacagagaagattttcatcagctcttatgaaactcttatgtgtcttctttcttcctttactcttatgtttaactattattgtttttcttaaaaaatctaactataaatcagttaagatacaacttattaaaatatcatccttaaagtaaacatcgctattttgagatcttctgctcctcaataaattagaagatactaacttaatgtacctttrtaagcaatatttcagaacagattgtgcttgctctctagaggccagttttctttccttattttgataaaaacttggtctttacacaatttaattgcttttattacatgtggaataattttaaattactattgaaatataactctaatttttaaaaagactttaaagtgccaaagttaagaatagagtttagtacaatatttctttgag

SEQ ID NO: 938845 - DNA, 597 bp, Homo sapiens
gttaattttgtatttttagtagagacggggtttctccatgttgatcaggctggtctcgaactcctaatctcaggtgatccacccgcctcggcctcccaaagtgctgggattacaggcgtgagccaccatgcccagccattttraacatttttaagtatacagttcagtggcattaagtacattcacacaattgtgcaaccatcaccaccatccatctcttgtcatttacatctgttcttgttcactgccacatccccagcgcctaagagcatagataactagacacacagaagatgctcaatcagtaattgctaaatgaatctatgaactgtgaatgctacctcccctccaacggacattagaactgctcgtgttcattaggcttaaatgcttcttttaaataaaatgacagggcaggggtagcatcctgtctacctcaataactaggcttaaggtttccttttctttttctttttaatttttttatttattttattttattttattttttgagacaggtctcgctctgtcgcccagtctggagtgcagtggcgcaatctcagctcactgccagctccgcctcccgggttcacgcca

SEQ ID NO: 938846 - DNA, 831 bp, Homo sapiens
atataaaagtttccaagccactctgctaatctttatactctctgtcatctcgccactcctactaaagaacctactgtacctctctaggtctctaccagttcatctgctgcttggcttcacagctccccataatctcatctttgtttctgagctaatcttgtttttcactctttcccctctaatctcaatctatccagcctgaactctgccccagcggccttacctgggcctgagctatttcctctgcctggtactcattctcctatccctagattgtggtatcctgcaaggcccaggtaaagttccaactgtatccccacataaatctrtgattcttgaagctcacatatgcaccttcctgcacactgctctaaatgttccaagctgaacgttttctttctccagtgactaggtgagcttcaaggttaagggttcactctcaactccatttgcatttttcctcaatgctttgcacattacaaacaactgttcaaaacacttgagggtgaatgcatactagcatactggtagaatgcatactagcattctacctatcacatatgtatagtgtttacaaatttggttaaggggaagtccaaacagtccattcagactatgagccacaccctccttctttcactttcaaaaacagttcttttctttttcaatttagctagaaaatggttggaggttaaacaagcaatgtctaagggcatatattcatcctaccctatgctaggttttccaacctcctttcttccagtatacctgtggaatgccagcaatgtgcttcactccatgtgggaggaaaggaaatgcaaaagcagtctg

SEQ ID NO: 938847 - DNA, 677 bp, Homo sapiens
tccctatgtcactaagattacaaaagaggaacttccaagcactcccatgtccataaatactcacctttgtttgcaaacctcacattctgcttcctctcctgtcactctgtatgaacagtccataacccttcggccaccctccacctatgcgctggaacccaaatgcwctcacctactccaggacatcatttgtcccctgtctcttctgctgcatcatcaacttctacttttgactatattattcccacatacaaacatgctgcaattctcccatttcaggggaaaaaagtttctctttaccccacttcaccaccagctaccatcccatcttctggtcccctttatgataaaactatgaaaagcataatttatatcagtgctgtccagtagccatataatgtgagccacatctgtcattttaatttttctagtagccacatgaaaaaaatttaaaaagaaacaaatgaaattaattttaataataaatttttggagttattttcagatataggccatttttatgccccagttctgtacagccccaatttctcctccttccatcctcttttgaacccatgtctcagggttttgccttcaccactcaactgacactgctcttatcaaagtctccaataatttgctctatctagaggtcaattctcagcctatcacttgct

SEQ ID NO: 938848 - DNA, 677 bp, Homo sapiens
tccctatgtcactaagattacaaaagaggaacttccaagcactcccatgtccataaatactcacctttgtttgcaaacctcacattctgcttcctctcctgtcactctgtatgaacagtccataacccttcggccaccctccacctatgcgctggaacccaaatgcactcacctactccagracatcatttgtcccctgtctcttctgctgcatcatcaacttctacttttgactatattattcccacatacaaacatgctgcaattctcccatttcaggggaaaaaagtttctctttaccccacttcaccaccagctaccatcccatcttctggtcccctttatgataaaactatgaaaagcataatttatatcagtgctgtccagtagccatataatgtgagccacatctgtcattttaatttttctagtagccacatgaaaaaaatttaaaaagaaacaaatgaaattaattttaataataaatttttggagttattttcagatataggccatttttatgccccagttctgtacagccccaatttctcctccttccatcctcttttgaacccatgtctcagggttttgccttcaccactcaactgacactgctcttatcaaagtctccaataatttgctctatctagaggtcaattctcagcctatcacttgct

SEQ ID NO: 938849 - DNA, 553 bp, Homo sapiens
atgcctgtaatcctagcacttcgggaggccaaggtgggcaaatcacctgaggtcaggagttctagaccagcctgaccaacatggtgaaaccccgtctctactaaaaatacaaaattagccaggtgtggtggtgtatgcctgtaatcccagctacttgggaggctgaggcaggagaatcgctcaaacccaagaagcagaggttgcagtgagcygagattgcaccactgcactccagcttgggcaacagagcaagattccatctcaaaaaaaaaaaaaaaaaaaaaaaaaaaaggaaatgggaaggcagtggtggtcaggccataaaggaggcgtggccatcacaaggactttggctttcaccctgcagaaatggaaagtcagtagccagttcataaaggaggcatggtcatcataaggactttcactttcacgctgcaggaagtgggaaatcagtggccagttcatggaagaggtgtggccatcgtaaggactttggctttcaccctgcaggaaaagggaagtcaggcaggattaggagcagaagagccatgtg

SEQ ID NO: 938850 - DNA, 480 bp, Homo sapiens
accaaaaatcaggtgaatactcccagttcctggttttaactttatatagctgaaaggagcagtgaagacagtaggaaagagtcttaaactgtcgacattaccccctttcccatctcctggtagtgaccgcatggcatgaagagagaatctgagtccttatgagagggtgagtgcagcaattatgagacattgcattgaactcagtgctgccccrtcacagcagaatgcaaaaccaagctgaactcagcagatgcctgcccgcagagggaatatttaaaccagccctagccagagggggatattccatccaggcagtaggaacttgagttctggcaagcctttccactgaagactaaaatgctctgaaactctaaataaacttgaaaggcagtctaggccacaaagattgaaactcctaggtaagtccttgtgctgaactggtctcagaaccaatggacttggggagcatgtgacatacta

SEQ ID NO: 938851 - DNA, 590 bp, Homo sapiens
aagttgggtaaagggtacacaggatctcatcgttattatttcttatgtaattacaaatgtaaattaaaataagaggcataattctctctgtggacaataagggaagataagaagtactctttttttctcaaggcacttactttagaaaatgtgtaattgtaagtactttctcctctctttgaaatgtatgtaaatccttttgacttctagatggcctttttgtcactcttatgatccaggattggctttctcaagaacttgagagacttctctctgaaatacaaacctcaagagagacatcatccctatctcctagtttctatgggaaggcaggagcctaacctccaaattagcaaggcgagacccttgcttcaatttgcataactacctcctatcatcaagagataacgmagtttgttttccctctagataaagccaattagctaacatagatggtggtcaccccaattaccaagtgaatttaggatgaattacatgtgacaaatagtgccaagtctgtcctctttcttgaggactagttattgcttatttgaaaatacatacgtaatgagttgtatctgcttggctat

SEQ ID NO: 938852 - DNA, 701 bp, Homo sapiens
gggaggccatcactgttgcctcaggcagcgcagggtttatctcctcagacaaaggtggagaagctgatggcagcatgagtcgggtgaggggggaatgttgccactactgacgatagggaagctgtttcttctggcaaaaagggttcatcagagtttayaaactcagtgtccccagcttcatcatggtcctcccatacattcccattccaagttgcagcgtcccattcttttccaatcaatgccctcattttatcagtagacacctggcaaggctgtgcatgcaccttttgttgcaggtcagccactcacatgataagagtttatgtctgtttttccacaatttcagctctttctctgcaagagataagactctcactcagggcagtcttaacagagttgaagctcagtatctgcttctgaagccaggagacagaatcactgaattcataattttctttaatcactttgtccattgaacttaggagcaaccaaccagcttcattatattccttggttctccatatatggtcaaaggtattatgtatagagtcactaaactcattgccccttatgagcaatgaatcggaagtgtaaaatgcatttattttgcataactctctgagcaattcatgccaaggactatcagtgttctccatactattagaagtagagtccctagcatttttgggtctaatcatatt

SEQ ID NO: 938853 - DNA, 749 bp, Homo sapiens
actgttgcctcaggcagcgcagggtttatctcctcagacaaaggtggagaagctgatggcagcatgagtcgggtgaggggggaatgttgccactactgacgatagggaagctgtttcttctggcaaaaagggttcatcagagtttacaaactcagtgtccccagcttcatcatggtcctcccatacattcccattccaagttgcagcgtcccattcttttccaatcaatgccctcattttatcagtagacacctggcaaggctgtgcatgcaccttttgttgcaggtcagccactcacatgataagagtttatgtctgtttttccacaayttcagctctttctctgcaagagataagactctcactcagggcagtcttaacagagttgaagctcagtatctgcttctgaagccaggagacagaatcactgaattcataattttctttaatcactttgtccattgaacttaggagcaaccaaccagcttcattatattccttggttctccatatatggtcaaaggtattatgtatagagtcactaaactcattgccccttatgagcaatgaatcggaagtgtaaaatgcatttattttgcataactctctgagcaattcatgccaaggactatcagtgttctccatactattagaagtagagtccctagcatttttgggtctaatcatattaagaagccaactccagaaaacccaaaaccaacaaaagaaccccatccttaatattctct

SEQ ID NO: 938854 - DNA, 623 bp, Homo sapiens
gtctgtgaagggaggggctaccacgaagagctctgacatgccttgggggcattttcctcattgtcttggctattaatatttggctcctctttacttacgcaaatttctgcagccagcttgaatccctccccagaaaataggtttttcttttctaccacatcactaggctgcaaattttccaaacttttatgctctgctttctttttcaataaagttccagttttagatcatctctttgtttgtgcagatgarcgttggcttttaaaagcagccagggtacatcttgaatgctttgttgcttagaaatttcttccaccaaataccctaaatcatctctgtcaagtgcaaatttccacaggtccctagagtggggcagaatgctgccagtctctttgctaaagcatagcaagagtgacctttgctcaagctcccaatacattcctcatctccagctgagactgcctcagcctggacttcattatccatatcactatcagcattttggtcacaacaatttaacaagtctctacaaagttccaaactttccttcatcttcctttcatgttctgagccctccaaactgttccaacctctgtctgttacccagttccaaagttgcttct

SEQ ID NO: 938855 - DNA, 623 bp, Homo sapiens
gtctgtgaagggaggggctaccacgaagagctctgacatgccttgggggcattttcctcattgtcttggctattaatatttggctcctctttacttacgcaaatttctgcagccagcttgaatccctccccagaaaataggtttttcttttctaccacatcactaggctgcaaattttccaaacttttatgctctgctttctttttcaataaagttccagttttagatcatctctttgtttgtgcagatgagcgttggcttttaaaagcagccagggtacatcttgaatgctttgttgcttagaaatttcttccaccaaataccctaaatcatctctgtcaagtgcaaatttccacaggtccctagagtggggcagaatgctgccagtctctttgctaaagcatagcaagagtgacctttgctcaagctcccaatacattcctcatctccagctgagacygcctcagcctggacttcattatccatatcactatcagcattttggtcacaacaatttaacaagtctctacaaagttccaaactttccttcatcttcctttcatgttctgagccctccaaactgttccaacctctgtctgttacccagttccaaagttgcttct

SEQ ID NO: 938856 - DNA, 685 bp, Homo sapiens
gggcaacatagtgagatcccatctctacaaaaacatttaaaattagccgggcacagtggtgtacacccggagtcccagctacttggaaggctgaggcaagaggcttgcttaggcccaggaattcaaggctgcagtgagctgtgatcacaccactgcactccagccagagcaacagagtaagaccttgccttcacacacacacacamaaaaacaaaaaactcaggttccaaccctggagttactaaatcaggatctcagaacgcagagatctggcatttcaataaaacttcccctggagattctgatcagccaggtttgggccagatgaactctaagctcacttaaacctttgacattttatgagtctattaaatcgagtacaaaaaatgctgagtccaaaccgggcaaacaaatcccatctccctatgcccagcctccttggattcagaaagccacactgcctggagagtaagcagagagagaattgtcattaacccaaagaccatctttgaaaacagactggctgcggctgagtgcggtggcacacgcctgtaaccccagccctttggaaggccgaggcaggaggatcacttgagcccaggagttcgagaccagtctgggcaacatggcaagaccctgtctctatctttctaagtaaaacaaaataaaaagctcagactggcag

SEQ ID NO: 938857 - DNA, 780 bp, Homo sapiens
agccaggcacggtggctcatgcctgtaatcccagcactttaggaggctaaggcaggaggatcacttgagctcaagagtttgagactggcctgggcaacatagtgagatcccatctctacaaaaacatttaaaattagccgggcacagtggtgtacacccggagtcccagctacttggaaggctgaggcaagagggttgcttaggcccaggaattcaaggctgcagtgagctgtgatcacaccactgcactccagccagagcaacagagtaagaccttgccttcacacacacacacaaaaaaacawaaaactcaggttccaaccctggagttactaaatcaggatctcagaacgcagagatctggcatttcaataaaacttcccctggagattctgatcagccaggtttgggccagatgaactctaagctcacttaaacctttgacattttatgagtctattaaatcgagtacaaaaaatgctgagtccaaaccgggcaaacaaatcccatctccctatgcccagcctccttggattcagaaagccacactgcctggagagtaagcagagagagaattgtcattaacccaaagaccatctttgaaaacagactggctgcggctgagtgcggtggcacacgcctgtaaccccagccctttggaaggccgaggcaggaggatcacttgagcccaggagttcgagaccagcctgggcaacatggcaagaccctgtctctatctttctaagtaaaacaaaataaaaagctcagactggcagcaca

SEQ ID NO: 938858 - DNA, 639 bp, Homo sapiens
acagtggtgtacacccggagtcccagctacttggaaggctgaggcaagagggttgcttaggcccaggaattcaaggctgcagtgagctgtgatcacaccactgcactccagccagagcaacagagtaagaccttgccttcacacacacacacaaaaaaacataaaactcaggttccaaccctggagttactaaatcaggatctcagaacgcagagatctggcatttcaataaaacttcccctggagattctgatcagccaggtttgggccagatgaactctamgctcacttaaacctttgacattttatgagtctattaaatcgagtacaaaaaatgctgagtccaaaccgggcaaacaaatcccatctccctatgcccagcctccttggattcagaaagccacactgcctggagagtaagcagagagagaattgtcattaacccaaagaccatctttgaaaacagactggctgcggctgagtgcggtggcacacgcctgtaaccccagccctttggaaggccgaggcaggaggatcacttgagcccaggagttcgagaccagcctgggcaacatggcaagaccctgtctctatctttctaagtaaaacaaaataaaaagctcagactggcagcacatg

SEQ ID NO: 938859 - DNA, 613 bp, Homo sapiens
agttagaatggcttttatcaaaaagataaaatataacaaacgctggcaaagataaagagaaagaagaacactcatatcccattattagtgggaatgtaaattagtacagccactatgccaaaacagtatggaggttcctcaaaaacctcaaaatgaaactacctatgatccagcaatccctctactggttatacctcaaagaaagaaagggaatcagtatagagaagagatatctgcacycctgtgtttattgcaacactattcacaatagtcaagatatggaatcaggaggtagagcaagatggcagaatagaaagctctgccaattgtaccttccacaaggacaccaatttaacaactatctacagaaaaaaaagcacttagtaagaaccaaagatcaggtgagcactcaccgtacctgcttttaacttcatgtcactcaaagaggcactgaagaggtaggaaaaacagtcttgacttgtggaccccacctcttcccatcccctggcagcagaggcatggtgcagagagcatttctgtgcactggcaagagggagagtgcagtaattgtgaggcactgaactcaacactacctgttacagcagaaagcaaa

SEQ ID NO: 938860 - DNA, 582 bp, Homo sapiens
tcctttgggtatacactcagtaataggattgctgggtcaaatggtatttctgcttcaagatccttgaggaatcaccacactgtcttccataatggttgaactaatttacactcccaccaacagtgtaaaagcattcctatttctccacattacctccagcatatattgtttctgactttttaatgatcgccattctaactggcgtgagatggtatctcattgtggttttgatttgcatttctctaatgaygagtgatgatgagctttttttcatatgtatgttgtccgcataaatgtcttcttttgagaagtgtctgttcatatcctttgcccactttttgatggggttgtttgttttttcccttgtaaatttatttaagttccttgtagattctggatattagccctttgtcagatggatagggtacaaccccgttctgtgggttgcctgttcactctgatgatagtttattttgctgtgcagaagctctttagtttaattagatcccatttgtcaattttggcttttgttgccattgcttttggtgttttagacatgaagtctttgcccatgcctatgtc

SEQ ID NO: 938861 - DNA, 619 bp, Homo sapiens
gagagtgaagcctttgctgagttttagctttaagcagaggtttctccagtcttacttccatcctacaaaggcccaaggctttatggtccattcctctgagtgcagcagcctgtgaaaacagtagctctaggccattggtgtttagttgaaattccgagggctgtcagcttaagcacttactagtttcctgatattgttttgtttctaatctcagagtatttcttagtttcttgcaagctcatcagtttttaataggtatcatgcgtgagtgaatataaatttttacatatatataagagaggatttattttgttgtttacaagagttttggggggatctctaagtctcttcttgccttttaatggaaacgttctcgtcattttttttaatcaaaaaatcacattttgtttytcctgtgacttcttcctgtaggtgagcagtaggtcatccagtcccagtgtcagaatgattactacctcaggaccaacctcagaaaagccaactcgaagtcatccatggacccctgatgattccacaggtgaccagtctgtttcttcatacttatgaagttgaatcagtcatgtttatattcatttggccatgtcattactctaatgtt

SEQ ID NO: 938862 - DNA, 595 bp, Homo sapiens
acactgagctagctacaggagttttttcataccccagtggcacctggaatgccagtgagacagaactgttcacttccctggaaagggggctgaagccagggagccaagcggtctagctcattggatcccaccccaatggagcccagcaagctaagatctactggcttgaaattcttgctgccagcacagcagtctgaagtctgggatgcttgagcttggttgtgggaggagcatccgccattactgaggcttgagtaggygattttctcctcacagtataaacaaagctgccaggaattcagactgggtggagcccaccacagcttggcaaagccactgtagccagactgcccctctagattcctcctctctgggtagggcatttctgaaagaaaggcaacagccccagtgaggggcttatagataaaactcccatctccctgagacagagcacctcggtgaaggggtggctgtgagtgcagcttcagcgacttaaacatttctgcttgccagctctgaagatagcagtgtatctcccagcacagcactcgagctctgctaaaggacagactgccttctgaagtggatccctgac

SEQ ID NO: 938863 - DNA, 586 bp, Homo sapiens
tatccacagctgtagtagaaaaactgctgctaccggtaacactaagtcttagaaacatgattctgaataaagggcaagtcacaaggtgacagtattttttatgaagttaaacataagcaaatcttaaacctattacagttattttraaaacctactgaagccgggcgtggtggctcacacctgtaatcccagcactttgggaggctgaggcgggtggatcacaaggttaggaggttgagaccagcctgaccaacatggtgaaaccccgtctctactaaaaaaaaaaatacgaaaattagccaggcacggtggcacgtgcctgtaatcccagctactcaggaggctgaggcaggagaattgcttgaatctgggaggcggaggttgcagtgagccgagattgtgccacggcactccagcctgggtgacagagcaagactctgtctcaaaaaaaaaaaaaacctattgaaacctatttttgaaaacctagtatgtatgtttttgaaggcaaaagaatgagaaacactatattcagactagtggttacctctgggaaggaagtaggaggtttttatacatgtagagtgaa

SEQ ID NO: 938864 - DNA, 615 bp, Homo sapiens
gtaacaaaagaccacggactgcaggacttaaacaacagaaattgtcccacagctctggaggctggaagtccaagatcacagtgccagcagggtgagtttctcctgaagtctttctccttgccctgtagacggccaccctcttactgcctcttgacatggtggtcctcctgggcacaagcatccctgatgtcttttcttcatcctcatatgattagatgagggcttaccccaatggcctcattttaatgtaatcacctctttataggccatatgtctaataatagtcacattctgaggttctgagggttgagacttcaacatataaattatagasggatataactcagcctgtaatggacaccaatataatgcatcagctaaagaaattgaacatttgcagcccctctgtgggtttctcccaaatcacatcccttccttcctcaagggcaaccactcttctgatttttgtctggcatttcttgatagttttaccaactatgtttgtatacattcaaaatcgtactttttaatttcctaacagaaccatttaaagcaaataaaattccttctaagcagtgtttgggctgcatctcttccagattttgatatatttgg

SEQ ID NO: 938865 - DNA, 615 bp, Homo sapiens
gtaacaaaagaccacggactgcaggacttaaacaacagaaattgtcccacagctctggaggctggaagtccaagatcacagtgccagcagggtgagtttctcctgaagtctttctccttgccctgtagacggccaccctcttactgcctcttgacatggtggtcctcctgggcacaagcatccctgatgtcttttcttcatcctcatatgattagatgagggcttaccccaatggcctcattttaatgtaatcacctctttataggccatatgtctaataatagtcacattctgaggttctgagggttgagacttcaacatataaattatagagggatataactcagcctgtaatggacaccaatataatgcrtcagctaaagaaattgaacatttgcagcccctctgtgggtttctcccaaatcacatcccttccttcctcaagggcaaccactcttctgatttttgtctggcatttcttgatagttttaccaactatgtttgtatacattcaaaatcgtactttttaatttcctaacagaaccatttaaagcaaataaaattccttctaagcagtgtttgggctgcatctcttccagattttgatatatttgg

SEQ ID NO: 938866 - DNA, 588 bp, Homo sapiens
aaggcagcaggtgaattattttgtaaaacgcccctgaactaggattagagatattttctcatgaaaagatctgaagattgcattgtttggaagagatgctgtgttcttctcattgcatcccatcaagtgacatagaacactgtgtgtcccatcactgctgatgagaactttgatcacttgagtaaggttgtgtcttccaagtttctccagtaaagctcctgtgttkccccttaaaatgcacaaggatttgtggacagatactttatgattatataaagattctgatcctcatccaacttgtattcattattgttagcatccgttgatgtttcttacctggattaattattactatgatgactgccatggtaatctctccaattccagaattccttctgtatatcacacagcgttctattttaaggaagaactttctcctctccccacatttttatgcatttatttatttatgcaagtgtagattcatgtatttcttgtttagtgggatgtaatctgtaactatcattgtcattctggtgctcaaattgttccaggtttcacatgggtttagtgagaatcccttgaagc

SEQ ID NO: 938867 - DNA, 581 bp, Homo sapiens
atcctcccacttcagtttcttgagtagctgggactacaggcatgcaatactgtgcctggctaattttttaaatctattttttttgtagagacaggttctcagctcaggctggccatatgcattttgacaccccaaaatattttgaattattcttagtttcagtagatgagatgagtgatcayttgagttccttcaacaggtcattagaccagaccagaagcgagctgtgatgataacacaggctgtgggcaggcaggcaccatgaggcacagtgagagcaccaagactgtgggctttgggtttgaatcctggctccactactaatcagccctgtgcaagtgactcagcctctcttaacctcatttattttctgtaaaaatgggaattgtagatttatatttatggagattatataagataatctgtgtaaaatacttagtccacagtacctgacaaatattaaattctgaggaaatattaattgctattattactacttcagctctgaaaatgctgttttcttgacagtaaatggctgttttgtttatttctgccagtagcaaagtaatatattgattgtt

SEQ ID NO: 938868 - DNA, 575 bp, Homo sapiens
aaactcaaaggagaaatggaacggtgacagtttcctttaacctgagctcagggctttggcaatagctctgctccaggtttctgttctatctagttctgcctggaacttagataaaggaaagctttctgtatcttccatcatccttgccttgttctratgtagcaggagtaagtctttcctaatagtgttgcttctttttttttttttttttgagatggagtgttgctctgttgcccaggctggagtgcagtggcgcgatctcggctcactgcaacctccacctcccacgttcaagcatgtcttttgcctcagcctcctgaatagctgggattacaggtacatgccaccacacccagctaatttttgtatttttagtagatatggggtttcaccatgttggcaaaccatggctgatcaccagtaattcctgacctcgtgatccaccccccttggcctcccaaagtgctgggattacaggcgtgagccactgcacccggccgctcttttttttttttttttttttgccttcactttattaaagaatgagagttttcttttacattttttctcattgc

SEQ ID NO: 938869 - DNA, 575 bp, Homo sapiens
aaactcaaaggagaaatggaacggtgacagtttcctttaacctgagctcagggctttggcaatagctctgctccaggtttctgttctatctagttctgcctggaacttagataaaggaaagctttctgtatcttccatcatccttgccttgttctgatgtagcaggagtaagtctttcctaatagtgttgcttctttttttttttttttttgagatggagtgttgctctgttgcccaggctggagtgcagtggcgcgatctcggctcactgcaacctccacctcccacgttcaagcatgtcttytgcctcagcctcctgaatagctgggattacaggtacatgccaccacacccagctaatttttgtatttttagtagatatggggtttcaccatgttggcaaaccatggctgatcaccagtaattcctgacctcgtgatccaccccccttggcctcccaaagtgctgggattacaggcgtgagccactgcacccggccgctcttttttttttttttttttttgccttcactttattaaagaatgagagttttcttttacattttttctcattgc

SEQ ID NO: 938870 - DNA, 603 bp, Homo sapiens
agagaatgaagagaggttggttaatgggtgcaaaaatacagtttgatagaaggaataagttttagtgtttgatagcacagtagggtgacagtagttaacaataatttattatatatttcaaaatagctagaagagtggatttggaatgttcccaacacaaagcaatgattgattaatatttgaggtgatggatatcaaattatgctcayttgatcattacacattgtatgcatgtatcaaaatatcacttgtaccccacaaacatgaacaattatgtatcagtaaaaaagtaaagtcatgataagcagtatttttttaatgtttaacttacacgaagaaaaccaccaccacaaaaacattgtttttaacaaaacaaaatcaaaacagcattcagttgccaaccttggaatatgtttatactttaaaattattttagttaatatttacttttactcaacaaaaatactacagcattaacactttttgggacaaaaaaatagcttcaaaggtgatgttttgtccactaaaatattccattaaaagtttgatttttgcagggcgtggtggctcacgcttgtaatcccaacactttgggaggccgat

SEQ ID NO: 938871 - DNA, 565 bp, Homo sapiens
tacattcccaccagcagtatagaagtgttccctgatcactgcatccatgccaacatctaccatttttttatttttttgattatggccattcttgcaggagtaaggtggtatcgcattgtagttttgatttgcatttctctgatcattagtgatgttgagcattttgtcatatgtttgttggccatttgtatatcttctcttgagaattgtctattcacgtccttagcccactttttgatgggattgtttgttttttttcttactgatttgagttcgttgtagattctgattattagtcctttgtcagatgtatagattgcgaagattttctcccactctgtggattctctgtttactctgctgtttcttttgccttgcaaaastctttagtttcattaagtcccaactatttatctttgtttttattgcatttgcttttgggttcttgatcatgaaatccttgcctaagccaatgtcttcaaggtttttccaatgttatcttctagaatttttagtttcaggtcttagatttaaatccttaatccatcttgagttgatttttgta

SEQ ID NO: 938872 - DNA, 459 bp, Homo sapiens
agagatatccactgttagtctgatgggtttccctttgtggatatccgctgtttgtctgatggggtttttgtgtggatagcctttttgttaatgttgatgctattcctttctgtttgttagtcttccttccaatattcaggtccctctgttgcaggtctgctggagtttgatggaggtccactccagaccctgtttayctgggtatcaccagcagagactgcagaacagcaaagattgctgcctgtttcttcttctgaaaactttgccctggggggcacctgccagatgctagccagagctctccttgctaggaggtgtctcccagtcaggaggcacaaggatcagggacccacttaaggaggcagtctgtcccttagcagagcttgagtgctgtgctaggagatccgctactgtcttcagagccagcaggcaggaacgtttaaatctgctgaagctgtg

SEQ ID NO: 938873 - DNA, 626 bp, Homo sapiens
  misc_feature 1: n = A,T,C or G
ntagaaacaaggattctccagtagcaatgtgcaaacccaggactcaaattttcatttctaataacaccctacaataaaaggaactaaggctccttggagaaattactgattgtagagttggaaaaggaatatataagattagcctggagctccttgtagtgtcaggaagtaaggaggtgccccaaaaccaaatgattggggaatgtcaaccctttgacaaaagccaactgaaagagctcccacctgrgcaacaggacgaaaccccatctctactaaaaatacaacaattatccaggaatggtggcatgcgcctgtagtcccagctactaaggaggctgaggcacaagaatcacttgaacccaggaggcggaggctgcagagccgagatcatgacactgcactccagcctgggtgacagagcgagacactttctcacaaaaaaaaaaaaaaaaaaaaaaaaaaaaaaaaagaaagctcccaatggccaaaactggaacaatttgagcaatgaaatttataacattgtattggactataacttaaaaaaaatctccatgagtttatacagatataaataaatcattgaaaaagtaaataggagagaagagacaaatctcctgtaatga

SEQ ID NO: 938874 - DNA, 626 bp, Homo sapiens
  misc_feature 1: n = A,T,C or G
ntagaaacaaggattctccagtagcaatgtgcaaacccaggactcaaattttcatttctaataacaccctacaataaaaggaactaaggctccttggagaaattactgattgtagagttggaaaaggaatatataagattagcctggagctccttgtagtgtcaggaagtaaggaggtgccccaaaaccaaatgattggggaatgtcaaccctttgacaaaagccaactgaaagagctcccacctgagcaacaggacgaaaccccatctctactaaaaatacaacaattatccaggaatggtggcatgcgcctgtagtcccagctactaaggaggctgaggcacaagaatcacttgaacccaggaggcggaggctgcagagcsgagatcatgacactgcactccagcctgggtgacagagcgagacactttctcacaaaaaaaaaaaaaaaaaaaaaaaaaaaaaaaaagaaagctcccaatggccaaaactggaacaatttgagcaatgaaatttataacattgtattggactataacttaaaaaaaatctccatgagtttatacagatataaataaatcattgaaaaagtaaataggagagaagagacaaatctcctgtaatga

SEQ ID NO: 938875 - DNA, 401 bp, Homo sapiens
tgatctccgctctgcagcctccgcctcctgggttcaagtgattcttgtgcctcagcctccttagtagctgggactacaggcgcatgccaccattcctggataattgttgtatttttagtagagatggggtttcgtcctgttgcycaggtgggagctctttcagttggcttttgtcaaagggttgacattccccaatcatttggttttggggcacctccttacttcctgacactacaaggagctccaggctaatcttatatattccttttccaactctacaatcagtaatttctccaaggagccttagttccttttattgtagggtgttattagaaatgaaaatttgagtcctgggtttgcacattgctactggagaatccttgtttctagatcctctcagc

SEQ ID NO: 938876 - DNA, 594 bp, Homo sapiens
tttaaccagtttatcttttttatgatcgccataatttggagctattcctcctatgttattttctttctcctctttattatactccctaattttttttcctttcttgctttttgttggtttgactgttgttgctgcttccattttctttctcaagttgtacattgtacttcaacagctctagtttaaattcagatatttaaacatttgtatttttctcaatatcaaaaactttgtctctgtctctgtcttgctctctctgtcttttctctagtcaagaatgttaggatacttttactttgcctctcctatacctctacaacttccactgtggagatcaactgatatttctgtctgaattattattattaatttttattaacrtttattttaattatctcaaagttatacctatttctttgtctatcactgtttcttgtattcatgtctaattcttagattccttttggtaatcatcctctaataacctcttagaaaaaattcaggactggggaactttctgaagtctttcctttcccttcacagttaaatgagcccaggagttcaagaccagcctgggcaacatagtgagatttt

SEQ ID NO: 938877 - DNA, 590 bp, Homo sapiens
tgttggagtttgctagaggtctactccagaccctctttgcctgggtatcgacaatggaggctgcagaacagaaaatattgcagaacagcaaatattgttgcctgatccttcctctggaagcttcatctcagaggggcacccggccrtatgaggtgtcagtcagcccctactgggaggtgtctccaagctaggctacacgggggtcagggacccacttgaggaggcggtctgtccattctcagagctcaaacaccatgcttggagaaccactgctctcttcagagctgtcagacagagacgtttaagtctgcagaagtttcggctgccatttgttcagctatgccctgcccccagaggtggagtctacagaggcaggcaggcctccttgagctgtggtgggctccacccattttgatcttcccagcatctttgtttacctactcaagcctcagcaatggcggacgcccctccctcagccaggcttgctgcctcgcagttggatcttggactagcagtgagcaaggctctgtgggtgtgggacctgctgaggcaggcatgggatataacctcctgatttgctgtttgctaag

SEQ ID NO: 938878 - DNA, 590 bp, Homo sapiens
tgttggagtttgctagaggtctactccagaccctctttgcctgggtatcgacaatggaggctgcagaacagaaaatattgcagaacagcaaatattgttgcctgatccttcctctggaagcttcatctcagaggggcacccggccatatgaggtgtcagtcagcccctactgggaggtgtctccaagctaggctacacgggggtcagggacccacttgaggaggcggtctgtccattctcagagctcaaacaccatgcttggagaaccactgctctcttcagagctgtcagacagagacgtttaagtctgcrgaagtttcggctgccatttgttcagctatgccctgcccccagaggtggagtctacagaggcaggcaggcctccttgagctgtggtgggctccacccattttgatcttcccagcatctttgtttacctactcaagcctcagcaatggcggacgcccctccctcagccaggcttgctgcctcgcagttggatcttggactagcagtgagcaaggctctgtgggtgtgggacctgctgaggcaggcatgggatataacctcctgatttgctgtttgctaag

SEQ ID NO: 938879 - DNA, 610 bp, Homo sapiens
aattctctctcagctctgccctaactagggtggacaaccatccctgcttgcctgggaccatccctgattttagtactgaaaataactacatcccaagggacccttgagtcccaggcgaactaggacggttggttaccctagtcctagcacagcatactcccttctaggtttgtaattgcctttttgtcttttcgatgttttaagtggtctaaaacaaatgaaagtaggcacaggtggttctagctatgctatcaactaagttgggtaaatcagatgacactatggcctagttcaatgttaaagaaatgtttctgctcaaacaaggccaggaagaaaacccttcccattgttagccctccyggaagtgacagcaagggttctcatgtgactggcacctaattccactgtattgtttagcttattcaaaatgctaacagtacgtggataataatacgttcaattgtatgtttgatctttattaagaccgtggtggatgttcatcaaccagaattggtaacttgtgcctgagagacatacccacctgggtgtctcagcaaagctagaccaatgcattggcacagatgtggccagttaatattatcatccactc

SEQ ID NO: 938880 - DNA, 618 bp, Homo sapiens
ttgggtcccctccctttgtatgagagctctgttttcactctgttaaatcttgccactgcactcttttatgttccatgtttgttacagctcgagctgagcttttgcttgccgtctaccattgctgtttgctaccgtcgcagacccaccactgacttccatccctctggatcaggcagggygtccgctgtgctcctgatccagcgaggtgcccattgctgctcctgatcgggataaaggcttgccattgttcctgcaaggctaagtgcctgggttcgtcctaatcgagctgaacactagtcactgggttccatggttcttttccgtgactcatggcttctaatagagctataacactcaccgcatggcccaagattccattccttggaatccgtgaggccaagaaccccaggtcagagaacacgaggcttgccaccatcttggaagtggaccaccaccattttggaaacagcctgccaccatgttgggagccctgggagcaaggaccccctggtaacattagcatttgccttaactttgggcgctagattaacatctctgggctagagagtggcagtacggctgacaggcacaggcactctgccaggtgaggttagctgt

SEQ ID NO: 938881 - DNA, 570 bp, Homo sapiens
ttggagtttgctggaggtccactccagacgctgtttgcctgggtaacagcagtggtggctgcagaagagcggagtttcgtgaaccacgaatgctgctgtgtgatcgttcctctggaagttttgtctcagaggagtacccggccgtgtgaagtctcagtctgccgctactggggggtgcctcccagttaggctgctggggggtcaggggtcagggacccacttgaggaggcagtctgcctgttctcagatctccaactgcrtgctgggagaaccactgctctcttcaaggctgtcagacagggagatttaagtctgcagaggttactgctgtctttttgtttgtctgtgccctgcccccagaggtggagcctacagaggcaggcaggcctccttgagctgtggtggactccacccagttggagctttccggctgctttgtttacctaagcaagcctgggcaatggcgggcgcccctcccccagcctcgctgccgccttgagccttgcagtttgatctcagactgctgcgctagcaatcagcgaggctccgtgggcgtaggaccctctgagc

SEQ ID NO: 938882 - DNA, 698 bp, Homo sapiens
ccagccacagctccagagctgggcatccccgcactcctgggggcccaggaagcacctcctggccctgcaggctcagaagtgcctgttcgaactccgtggcctctccccacccccagtgcctgctccagcacagagcaaagtagtagctgagaccagatactgtcgcaaccccactgtgtggaaacatgctcagggaagtactgcatgccacctcaagcccctctggactttgggtgctgatgagcttgggaaggagactggggagtgggggctgaaggcagctcagtgcaagcctgaaggtgccccttggcaccaacagcctgggtgccatgaatggcatgttgacggcaggargccaacagtttcctctgtggaaagggacaggtcctgcccatcttcaagtcagagacagcctgaagcatggggtcgggctgccagctccaggtggagtccgtggccccaagtgagaacttatggtgcttttttcaggcccacctatggccacccatggatcagtcagcatgtacttccttttgagtccataaaaaccccagactcagccagactcagctagacatagggatgacctgcctgcagataggagctacccactctgggtctcctctcctctgagggctgcaggctcaaccaggatgacctgcctgcagataggtgctacctgctaagggttccctctc

SEQ ID NO: 938883 - DNA, 633 bp, Homo sapiens
tcacacctgtaatcccagcactttgggaaactgagatgggcaggtcactcgaggtcaggagttcgagaccagactggctaacatggtgaaacccggtctctattaaaaatacagaaattggcctggagcagtggcgggcgcctgtaktcccagctattcaggaagctgaggcacgaagatcacttgaacctgggaggtggaggttgcagtgagccgagatcgggccactgcactgtccagcctggcgacagagtgagactctgtctcaaacaaaaaaacaaaagaaagagactgatgaataaacacagttctacaacaagcaggacaaagtcagagagggagagaaggttaagagcctagaaatgcaggtcagtgtgagtcccccaggtgggtaggtaggagagaggccattcctgataggagtgaagtttcaggaaccagaaaagaaatttccttcctgcaggcagagtggaagccacctggttcatgctccctggctgccgggaattcctcacctgggaactcccctcaaccttcttgtttgtgtaggatcagccatgccagaatgcaccttgttccagtcaagctctggggccacggtagccctgctttactgctgcctgcggtctgggg

SEQ ID NO: 938884 - DNA, 607 bp, Homo sapiens
gtttgtttctttcactttttttatttttcttttgagatggagtctcactctatcacccaggctggagtgcagtggtgcaatctcggctcactgcaacctctgcctcccaggttcaagtgattctcctgcctcagccccaccacgccccaccatgcctggctaatttttgtatttttagtagagacggagtttcaccactttggccaggctggtctcgaactcctgatctcaagtgatctgcctgccttggcttcccaaagtgctrggattacaggcttgagccaatgcacctggcatcactttttgttactgaaatgcacaatcgagcttgtctaatctgtggcccacgggctgcatgcagctcaggacagctttgaatgtggcccaacacaaattcctgaacattcttaaaatattatgagattttgtttgtttgtttttagctcatcagcttttgttagtgttagtgatggcggtggtggcctggctgctgccatgatactggctgcagtgggggcggggtagccagggctgcccgctccacagagccagtgagagctgggaacaggcagaagccctgcccgcttccaagttggaggtgtgagag

SEQ ID NO: 938885 - DNA, 669 bp, Homo sapiens
ggctgagtctggaggatctcttcagcccttgaggtggaggttgctgtgagctatgatggcactgttgcactctagcctgggtgacatagcaaggccctgcctcaaaataataatgataaatacacatacaaaaaatgaaaaagtattacattgttgagtgttttccatcttaacgatattgcagtggagttactcaactcagcttttgttggctgtattccctctcactttaggccacacgttagccayttcccatggctggatatttaggtaatttccagtttttggttttgccaaatgttttaggtgcttttccctaggagggcaccactgggttcccagggtaacaacttttaagcctctccatgttgctctctcactgtttccagtcactctttttgacctaaaaccaagtctacaacatttttagggcaacaatacagtctattcacaggcaccttctcagctcatctcaagacagaaacgaacatcctttttatttatttttgagacagagtctcgctctgtcacctagactggagtgcagtagcgccatctcggctcactgcagccgtaacctcccagacttaagtgatcctgctacctcagcctcccaattaactgagaccacagatgcatgccaccacacttggctaatttttaaattta

SEQ ID NO: 938886 - DNA, 592 bp, Homo sapiens
ggcagagaagaatccagatctaggtagccaggatctatatttttagccactatgttatactacttctcaaaagaaaattaatagaatattaacagaaaataaaattctgatgtatatactacatatatatgtatagacatatatagatacatatatatgtatagacatatatagatacatatatatgtatagacatatatagatacatatatatgtatagacatatatakatacacatgtgtgtatatatatatatatatatatatatatattttttttttttttttttttgagacaggtctcactctttcgccctgactggagtgcagtggcccaatctgggctcactgcaacctccacctcccaggctcaagtgattctctggtctcagcctccccagtagctgggactacagggatgccccattaccacccggctaatttttgtgtttctatacagatagggtttcaccatgttggccaggctgatcttgaactcctgacctcaagtgatccacccacctcggcctcacaaagtgctaggattgcaggcatgagccactgtgcctggcctacttttatatatattttta

SEQ ID NO: 938887 - DNA, 592 bp, Homo sapiens
ggcagagaagaatccagatctaggtagccaggatctatatttttagccactatgttatactacttctcaaaagaaaattaatagaatattaacagaaaataaaattctgatgtatatactacatatatatgtatagacatatatagatacatatatatgtatagacatatatagatacatatatatgtatagacatatatagatacatatatatgtatagacatatatatatacacatgtgtgtatatatatatatatatatatatatatwttttttttttttttttttttgagacaggtctcactctttcgccctgactggagtgcagtggcccaatctgggctcactgcaacctccacctcccaggctcaagtgattctctggtctcagcctccccagtagctgggactacagggatgccccattaccacccggctaatttttgtgtttctatacagatagggtttcaccatgttggccaggctgatcttgaactcctgacctcaagtgatccacccacctcggcctcacaaagtgctaggattgcaggcatgagccactgtgcctggcctacttttatatatattttta

SEQ ID NO: 938888 - DNA, 577 bp, Homo sapiens
actgtgtcttcagtccaccgttttcccctaccatgatgccagtgcagtttggatggggagcaattcccccacagcacagcacagcggctgggacagtttgtggccagactgcttctttaggtgggactccaatccattccccctcacggagcagggcctccctgtgggaattttcacatccccagtggagggtttatggatagaactctgatatccctgagaagaggctctaggaggagggttggccacgctatcgtggatcagccattttagtctttcctgcctactggctctggagagggagatttctsccagcacaacacacctgctctaccaaggggcagccagactgcttatttaagtgggtccctgatcctattcctccaaactgggtgagacctcccaacaggagtgttctgctggcatcaggttagcacccctctgggacaaagttctcagaggaaggagcagcctgccatctttgctggtctgcagcctccacggtgatacctcctggggtggaagaaaccaaggtgaataaagtctggaatggactcccagcaaactgcagcaaccc

SEQ ID NO: 938889 - DNA, 560 bp, Homo sapiens
agaatgactttgacgagctgacagaagtaggcttcagaaggttggtaataacaaacttctccaagctaaaggaggatgttcaaacccatcgcaaggaagctaaaaaccttgaaaaaagattagaccaatggctaactacaataaacagtgtagagaagascttaaatgacctgatggagctgaaaaccatggcatgagaactacaggacgcatgcacaagcttcactagccgacttgatcaagtggaagaaagggtatcagtgattgaagatcaaattaatgaaataaagcgagaggagaagtttagagaaaaaagagtaaaaagcaacaagataaagcctacaagaaatacaggactatgtgaaaagaccaaatctacatttgattgttgtacctgaaagtgacggggagaatggaaccaagctggaaaacactcttcaggatattatccaggagaacttccccgacctaccaaggcaggccaacattcaaattcaggaaatacagagaactccacaaagatactcctcgagaagagcaaccccaagacacgtaattgt

SEQ ID NO: 938890 - DNA, 782 bp, Homo sapiens
gagtgaactattcacaattgctacaaagagaataaaatacctgggaatccaacttacaagagatgcgaaggacctctggacctcttcaaggaaaactacaaaccactgctcaatgaaatacaagaggacacaaacaaatggaagaacattccatgctcatggataggaagaatcaatatcgtgaaaatggcgatactgcccaaagtaatttatagattcaatgccatccccatcaagctaccaatgacttttttcatagaactggaaacaactactttcaagttcatatggaaccaaaaaagagcctgcattgccaagaccatcctaagccaaaagaacaaagctggaggcatcayactacgtaacttcaaactatactacaaggctaccgtaaccaaaacaacatggtactgctacccaaacagagatagaccaatggaacagaacagaggcctcagaaataacaccacacatctacaaccatctgatctttgacaaacctgacaaaaacaagaaatgggaaaaggattccttatttaataaatggtgctgggaaaactggctagccatatgtagaaagctgaaactggatcccttccttacaccttatagaaaaattaattcaagatggattaaagacttaaatgttagacttaaaaccataaaagccctagaagaaagcctaggcaataccattcaggacataggtgtgggcaaggacttcatgatgaaaacgccagaaacaaaggcaaccaaagccaaaacagacagatgggatctaa

SEQ ID NO: 938891 - DNA, 782 bp, Homo sapiens
gagtgaactattcacaattgctacaaagagaataaaatacctgggaatccaacttacaagagatgcgaaggacctctggacctcttcaaggaaaactacaaaccactgctcaatgaaatacaagaggacacaaacaaatggaagaacattccatgctcatggataggaagaatcaatatcgtgaaaatggcgatactgcccaaagtaatttatagattcaatgccatccccatcaagctaccaatgacttttttcatagaactggaaacaactactttcaagttcatatggaaccaaaaaagagcctgcattgccaagaccatcctaagccaaaagaacaaagctggaggcatcacactacstaacttcaaactatactacaaggctaccgtaaccaaaacaacatggtactgctacccaaacagagatagaccaatggaacagaacagaggcctcagaaataacaccacacatctacaaccatctgatctttgacaaacctgacaaaaacaagaaatgggaaaaggattccttatttaataaatggtgctgggaaaactggctagccatatgtagaaagctgaaactggatcccttccttacaccttatagaaaaattaattcaagatggattaaagacttaaatgttagacttaaaaccataaaagccctagaagaaagcctaggcaataccattcaggacataggtgtgggcaaggacttcatgatgaaaacgccagaaacaaaggcaaccaaagccaaaacagacagatgggatctaa

SEQ ID NO: 938892 - DNA, 782 bp, Homo sapiens
gagtgaactattcacaattgctacaaagagaataaaatacctgggaatccaacttacaagagatgcgaaggacctctggacctcttcaaggaaaactacaaaccactgctcaatgaaatacaagaggacacaaacaaatggaagaacattccatgctcatggataggaagaatcaatatcgtgaaaatggcgatactgcccaaagtaatttatagattcaatgccatccccatcaagctaccaatgacttttttcatagaactggaaacaactactttcaagttcatatggaaccaaaaaagagcctgcattgccaagaccatcctaagccaaaagaacaaagctggaggcatcacactacgtaacttcaaactatactacaaggctacmgtaaccaaaacaacatggtactgctacccaaacagagatagaccaatggaacagaacagaggcctcagaaataacaccacacatctacaaccatctgatctttgacaaacctgacaaaaacaagaaatgggaaaaggattccttatttaataaatggtgctgggaaaactggctagccatatgtagaaagctgaaactggatcccttccttacaccttatagaaaaattaattcaagatggattaaagacttaaatgttagacttaaaaccataaaagccctagaagaaagcctaggcaataccattcaggacataggtgtgggcaaggacttcatgatgaaaacgccagaaacaaaggcaaccaaagccaaaacagacagatgggatctaa

SEQ ID NO: 938893 - DNA, 598 bp, Homo sapiens
attataatgccaacggggatgtagtggaagaggaggagaactcttgcacctactatgagtgccactaccctccctgcacagtgattgagaagcaggtgggtgtgctgcagtgcggtcgcgtccctggcacctctaccctgtagcccagccttggtttgggatcttgccctccaccgcggggtcccattccccagagaccgcttagcacctcttgggcttttccaccagagtggtctccctttgcccttgtgctggcctgaccagggcccaggccctccagycttggtacgtggtgttttgctgggtccgtcagattgtccgtaagatgcagcctttgccccacactgcgtcccaggcatgatggtgaagccacaggtgttctgtatttcagctccgggagttcaacatctgtgggcgctgccaggtggcccggtactgcggctcccagtgccagcagaaggactggcctgcccacaagaagcactgtcgggagaggaagcgtcccttccagcatgagcttgagccagagcgatgacgggcaggggagccacacatactcacagcccccgggctctaccctgggcacagcagagacaga

SEQ ID NO: 938894 - DNA, 736 bp, Homo sapiens
gcaaccccaacaatgtggacgggttaggtactgttggatggaaagtcactgtagcttgattaaccaagcacaaatcccgtaccggcctgtagtccttggtccctggcttgggaacaggcaggaggggagtgttccatggagactgacaaggaactataattccaaaagttcttaggtgtttgaggcgaacctggatacctttaagagcttctcyggggactggggactgtttttgcctaaccggctgggccccaggcttaacttccatattcaggggcttggttgactgccaatcctggagggttgtcttccgcccacactcttggccaccgcttagccaaagctggtcttatctcttggcccggctcagttaagaaaagtctctattcctcctctcaggggaccataagggtcataacgactcccgttccgggtaactttagcagcaaagagccatgctctgtaaaagagacagtggctctcagcttgctaagcaagtcccttcccaacaagggcaagggacagtcaggcatgtacagaaactgacgaatcactgtatgtcctcctacagcacaagtccgaggcaagcagaaagcttgctttgctgaaacccccatggctccgatgatgtcaatagtctttttggataagggggcaactggggcggttactaccgaatgttcagcaacggtatctacaagaatatcaatgtctttacccccgactgtcatgctga

SEQ ID NO: 938895 - DNA, 607 bp, Homo sapiens
gaatatgtgggggagcgacaagatgcgttggcattttgacagcaattaaactgtgactgggagcataagcatacctgtgtcacttctctacctcggaatcaattgacacatagttgggatgaggtgaaacaacacctctggggaatcttacaagataatttaacagcagacataaggcaacttaaaactagaattttggaatccctaaatgccgtagatctacacacccaacaaacagccatatggaaggatgtgtgagaacatctctcttggataaaacyccactcctggtgggggtcactccttgattggaaaagaatgttactgattatactcatgtttgtcttatgttatttactaattctaggatgcaaagccacaacatgagcagtgacttctgcgccagacaaacctgttgctgcacacatctgtgctcttcaattaacaaaacctgatgcaaaaaacaccaccaacaaaaaaaaaaaaaaaaacaaacagaaaaggggtagatatagaagatcagtcaggctggtgcgagaaattataagaaaaagatgcaaaccttattggaaggccaggaggttttgcaaaagcttcaaaagaggat

SEQ ID NO: 938896 - DNA, 607 bp, Homo sapiens
gaatatgtgggggagcgacaagatgcgttggcattttgacagcaattaaactgtgactgggagcataagcatacctgtgtcacttctctacctcggaatcaattgacacatagttgggatgaggtgaaacaacacctctggggaatcttacaagataatttaacagcagacataaggcaacttaaaactagaattttggaatccctaaatgccgtagatctacacacccaacaaacagccatatggaaggatgtgtgagaacatctctcttggataaaaccccwctcctggtgggggtcactccttgattggaaaagaatgttactgattatactcatgtttgtcttatgttatttactaattctaggatgcaaagccacaacatgagcagtgacttctgcgccagacaaacctgttgctgcacacatctgtgctcttcaattaacaaaacctgatgcaaaaaacaccaccaacaaaaaaaaaaaaaaaaacaaacagaaaaggggtagatatagaagatcagtcaggctggtgcgagaaattataagaaaaagatgcaaaccttattggaaggccaggaggttttgcaaaagcttcaaaagaggat

SEQ ID NO: 938897 - DNA, 585 bp, Homo sapiens
ggttagaatataaagcaggtagaaaaatgcgaaaagagagtggcttagcctcccagcttacatctttctcctgtgctggatgcttcctgcccttgaacatcagactacaagttttttatataagtttatgtatataatatatacatatatatttcattagttctgtcyctctagagaaccctaacataacatacaaaggatatgaatattcagtacatcaaagagatatctgcacctccacattcattgcagcttattcacaatagcaacaataaggaatcaatctaagtgtccatcaatgaatggagaaaatgtgatatatattgatatatatatatgactattcttcagctttaaacgagaaggaaattctgtcattcgtgacatcatagatgaacctaggaagacattatgttaagtgaaataagccatgcacagtaagacaaatactgcaggatttcacttacatgtagaatctaaaaaagtcaaactcacagaaatcaggagaaaaaatgtggcttaccagaggctgggatggaagatatgtagggggaaatgttggtcaaaggatacaaaattttagtt

SEQ ID NO: 938898 - DNA, 642 bp, Homo sapiens
gggtatagggattgggtgaatacagccattccaaatgggagaaattggacaaaacaaaggggccacaggccccacgccagtccgaaatccagtggagcagtcaaatcttaaagttccaaaatgatttcttttgactccatgtctcacatccaggtcacacagatggaagaggtgggttcccatgatcttgggcagctctgcatctgtggctttgccaggtaccgcctccctctggtttgcattcatgggctggcattgagtgtctgtggcttttccagttgcaaggtgcaagatgttgtcggatcttccattctrgggtctggaggatagtggccttctcctcatagctccactaggcaatgtcccagtaaggactctgtgtgggggcttcaaccccacatttcctttccacactgccctagcagaggttctccatgagggccctgcccctgcagctaacttttgcttagacatccaggcatttccatacatcatctgaaatctaggtagaggttcccaatcctcaattcttgacatctgtgaactcgcaggctcaaagccacgtggaagctgccaaggcttgaggctagcaccctctgaagcaacagtctgagctgtaccttggcaccttttagccatggc

SEQ ID NO: 938899 - DNA, 600 bp, Homo sapiens
caatcctcaattcttgacatctgtgaactcgcaggctcaaagccacgtggaagctgccaaggcttgaggctagcaccctctgaagcaacagtctgagctgtaccttggcaccttttagccatggctaccacagctgggatacagggcgctaagtccctaggctgcacacagcagggggccctgggcccagcccacaaaaccattttttcctcctaggcctctgggcctgtaatgggacaagctgccttaaagatctctgacataccctgaagacattttccccattgtcttagtgatttacatttggctccttgttacttatgtaaatttctgcagctggcttcaatttctcctccgaaaatgaatttttcttttctattgcatcatcaggctacaaattktccaaacttttatgctctgtttcccttttaaaaatgaatgcttttaacacacccaagtcacctcttgtatgcttcactggttagaaatttcttccaccagataccctaaatcatctccctcaagttcaaagtttctcaaatctctagggcaggggcaaaaatgctgccagtctctttgcatagcaagaatgacctttac

SEQ ID NO: 938900 - DNA, 395 bp, Homo sapiens
tacttatatcagccaaaatgtacttcatgacaaaaactacaagaagagacaaagaaggccattacgtaattataaaggggtcaattcagtcagaggagttaacgattataaatatatatgcacccaacactggagcacccagatatataaatcaaacattattagagctaaagaaagagacagaccacartgcaataatagatggagactgcaacaccccactttcaccattagacagatctttcagacagaaaaatcaacaaagaaacatcagacttaatctgcactacagaccaaatggatataacacatatttacaaaatattttatccaatggctgcagaatacaaatttttttcctcagcacatggattattctcaaggatagaccatat

SEQ ID NO: 938901 - DNA, 395 bp, Homo sapiens
tacttatatcagccaaaatgtacttcatgacaaaaactacaagaagagacaaagaaggccattacgtaattataaaggggtcaattcagtcagaggagttaacgattataaatatatatgcacccaacactggagcacccagatatataaatcaaacattattagagctaaagaaagagacagaccacagtgcartaatagatggagactgcaacaccccactttcaccattagacagatctttcagacagaaaaatcaacaaagaaacatcagacttaatctgcactacagaccaaatggatataacacatatttacaaaatattttatccaatggctgcagaatacaaatttttttcctcagcacatggattattctcaaggatagaccatat

SEQ ID NO: 938902 - DNA, 749 bp, Homo sapiens
aagagaatattaaggatggggttcttttgttggttttgggttttctggagttggcttcttaatatgattagacccaaaaatgctagggactctacttctaatagtatggagaacactgatagtccttggcatgaattgctcagagagttatgcaaaataaatgcattttacacttccgattcattgctcataaggggcaatgagtttagtgactctatacataatacctttgaccatatatggagaaccaaggaatataatgaagctggttggttgctcctaagttcaatggacaaagtgattaaagaaaattatgaattcagtgattctgtctcctggcttcagaagcagatactgagcttcaactctgttaagactgccctgagtgagagtcttatctcttgcagagaaagagctgaarttgtggaaaaacagacataaactcttatcatgtgagtggctgacctgcaacaaaaggtgcatgcacagccttgccaggtgtctactgataaaatgagggcattgattggaaaagaatgggacgctgcaacttggaatgggaatgtatgggaggaccatgatgaagctggggacactgagtttgtaaactctgatgaaccctttttgccagaagaaacagcttccctatcgtcagtagtggcaacattcccccctcacccgactcatgctgccatcagcttctccacctttgtctgaggagataaaccctgcgctgcctgaggcaacag

SEQ ID NO: 938903 - DNA, 701 bp, Homo sapiens
aatatgattagacccaaaaatgctagggactctacttctaatagtatggagaacactgatagtccttggcatgaattgctcagagagttatgcaaaataaatgcattttacacttccgattcattgctcataaggggcaatgagtttagtgactctatacataatacctttgaccatatatggagaaccaaggaatataatgaagctggttggttgctcctaagttcaatggacaaagtgattaaagaaaattatgaattcagtgattctgtctcctggcttcagaagcagatactgagcttcaactctgttaagactgccctgagtgagagtcttatctcttgcagagaaagagctgaaattgtggaaaaacagacataaactcttatcatgtgagtggctgacctgcaacaaaaggtgcatgcacagccttgccaggtgtctactgataaaatgagggcattgattggaaaagaatgggacgctgcaacttggaatgggaatgtatgggaggaccatgatgaagctggggacactgagtttrtaaactctgatgaaccctttttgccagaagaaacagcttccctatcgtcagtagtggcaacattcccccctcacccgactcatgctgccatcagcttctccacctttgtctgaggagataaaccctgcgctgcctgaggcaacagtgatggcctccc

SEQ ID NO: 938904 - DNA, 483 bp, Homo sapiens
tctcggagagaatttgtttctagcttcttccattttctggtggttggtggtactactcggtttgtgaccacaccactccaattttctttctttctttttttctaaattttattatactttaagttctaggatacatgttcacaatgtgcaggtttgatacataggtatacatgtgccagtttggtttgctgcacccatcaattcatcatttacattaggtatttctaatgctatccctccccyagcccccaccctccagcaggccctggtgtgtgatgttccccgccctgtgtccaggtgttctcactgttcgattcccacctatgagtgagaacgtgtggtgtttggttttctatccttgcgatagtttgctgagagtgatggcttccagcttcatccatgtccctacaaaggacatgaactcatccttttttatggctgcatagtattccatggtgtatatgtgccacattttcttaatca

SEQ ID NO: 938905 - DNA, 583 bp, Homo sapiens
caagactgtctcaaaataaaataaaataaaaaataaatgaataaataaatacatacatacagagaaaaaattaaaaaaggaaaaagaactcaatacaaaaaagtgaacaaggaatatgaagaggcaaatcaagggaaaaataaaaataaacaaacatmtaaaaagaagctctcacgctacagagaagtgcaaattaaaacaagacaactgttttcttccatctaattggcacaaattaagatgactgataaatctagttccagaggatgcttgaaaaaaaaatcaattccattgtcaactaatagtggcagtataattggtatttacttttatagagagcaattcgtgtgatttttaaattttaattcctatatccttccatctagcaaatacgcttctaagaccttagccaaaagaaatatttgtgtatacatacacgcacatacccatatgtatgtatacatacagatgaaccaagatgttctttgtagcattgtttgtaatagttaaaattggaaacaaccctgacttcgtaagtaataatgaaatatccatagtatataaagatttagagaatgaactg

SEQ ID NO: 938906 - DNA, 669 bp, Homo sapiens
gggggtaacatcacatatcagtaggtccgttatgtcccctaagctgcaaaaccagcaagtttttattagggattttaaaaggggagggggtatacaaacaaggagcaggtcacaaagatcacatgcttcaaagggcaataaaaatcacaaggcaaaggcaaaattagaattactgatgagggtctatgtcccactgtgcacgtattatcttgataaacatcttaacagaaaacagggtttgagagcagagaaccagtctgaccaaaatttatcaggctggaatttcccaatcctagtaagcctgagggtactgcaggagaccagggcatatttcagtccttatctcaacygcataagacagacactcccagagcagccgtttatagacctccccccaggaatgcattccttcccccaaggtattccttgctgggaaaagaattcagcgatatctctcctatttgcatgtccatttatacgctctctgcaagaattaaaatatggctctattctgcccgaccccacaggcagtcagaccttatggttaccttccttttttccctgaaaatcgctgttattctgttctttttcaaggtgcactgattttcttattgttcaaacacacatgttttacaatctatttgtacaataatggtcctgaggtgatgt

SEQ ID NO: 938907 - DNA, 549 bp, Homo sapiens
tcagtccttatctcaactgcataagacagacactcccagagcagccgtttatagacctccccccaggaatgcattccttcccccaaggtattccttgctgggaaaagaattcagcgatatctctcctatttgcatgtccatttatacgctctctgcaagaattaaaatatggctctattctgcccgaccccacaggcagtcagaccttatggttaccttccttttttccctgaaaatcgctgttattctgttctttttcaaggtgcactgattttcttattgttcaaacacacatgttttacaatctatttgtacaataatggtcctgaggtgatgtacattctcagctkacaaagataatgggattaagaaattaaagtaaagacagacataagaaattataagagtattattagggaagtgataaacatccatgaaatcttcacaatttatgttcagagattgcagtaaagacgggcataagaaattataatagtattaattttgggaactgataaatgtccatgaaatattcacaatttatgttct

SEQ ID NO: 938908 - DNA, 651 bp, Homo sapiens
agttcaggattcacctaatgtgctgagataaagcagcaaacagatcctgagagtagagtcaggctacacaggcattatatgcatgggcttttgcatgacttttgatgggtcaaagataaatgctcaagcttgtgagcakccaagagacaggtctggaaggatataccagtgtgtcagaactggaaagtgttgcgatctggaagagaagcacaactccagcagagaatggcagggagcttttctgttagtcctgtggaattcaaccatgaactgagaaatcatctcactgggacacacttgcagtcatccatttaaagttaagagccataacagaacaggatttagggtataagtaaataaaaaatgtgccaccaatctggggaaatatcttgctaaataattgccatcttccctatgtgtattagtgcccgtgatcaatagacctgggtgtagatcattttatccatctcttttggaacagattcaccttattcttaaaagccaactcagacactcagtctcatttttcatagtgttccagttcaaaacttgacagttcttgaaactcttcaaaaataattcaggaaattatttctgtagctttttaaatatatgaggtggataatataaaaatttgaaatttaccttgga

SEQ ID NO: 938909 - DNA, 651 bp, Homo sapiens
agttcaggattcacctaatgtgctgagataaagcagcaaacagatcctgagagtagagtcaggctacacaggcattatatgcatgggcttttgcatgacttttgatgggtcaaagataaatgctcaagcttgtgagcatccragagacaggtctggaaggatataccagtgtgtcagaactggaaagtgttgcgatctggaagagaagcacaactccagcagagaatggcagggagcttttctgttagtcctgtggaattcaaccatgaactgagaaatcatctcactgggacacacttgcagtcatccatttaaagttaagagccataacagaacaggatttagggtataagtaaataaaaaatgtgccaccaatctggggaaatatcttgctaaataattgccatcttccctatgtgtattagtgcccgtgatcaatagacctgggtgtagatcattttatccatctcttttggaacagattcaccttattcttaaaagccaactcagacactcagtctcatttttcatagtgttccagttcaaaacttgacagttcttgaaactcttcaaaaataattcaggaaattatttctgtagctttttaaatatatgaggtggataatataaaaatttgaaatttaccttgga

SEQ ID NO: 938910 - DNA, 651 bp, Homo sapiens
agttcaggattcacctaatgtgctgagataaagcagcaaacagatcctgagagtagagtcaggctacacaggcattatatgcatgggcttttgcatgacttttgatgggtcaaagataaatgctcaagcttgtgagcatccaagagacaggtctggaaggatataccagtgtgtcagaactggaaagtgttgcgatctggaagagaagcacaactcyagcagagaatggcagggagcttttctgttagtcctgtggaattcaaccatgaactgagaaatcatctcactgggacacacttgcagtcatccatttaaagttaagagccataacagaacaggatttagggtataagtaaataaaaaatgtgccaccaatctggggaaatatcttgctaaataattgccatcttccctatgtgtattagtgcccgtgatcaatagacctgggtgtagatcattttatccatctcttttggaacagattcaccttattcttaaaagccaactcagacactcagtctcatttttcatagtgttccagttcaaaacttgacagttcttgaaactcttcaaaaataattcaggaaattatttctgtagctttttaaatatatgaggtggataatataaaaatttgaaatttaccttgga

SEQ ID NO: 938911 - DNA, 733 bp, Homo sapiens
ttgttttataatcttggagggggaaaagcctaattgcaataaaaacccagaaaccataaaagaaaggaatgatgaacttgactaagaaaaaagtcagggggaggagccaagatggccgaataggaacagctccggtctacagctcccagcgtgagcgacgcagaagacgggtgatttctgcatttccatctgaggtaccaggttcatcttactagggagtgccagacagtgggcgcaggtcagtgggtgtgcgcaccgtgcacgagccgaagcagggtgaggcattgcctcatttgggaagcrcaaggggtcagggagttccctttctgagtcaaagaaaggggtgacggacggcacttggaaaatcgggtcactcccacctgaatactgcgcttttccaacgggcttaaaaaacggcgcaccatgagattatatcccgcacctggctcggagggtcctacgcccacggagtctcactgattgctagcacagcagtctgagatcaaacggcaaggcagcagcgaggctgggggaggagtgcctgccattgcccaggcttgattaggtaaacaaagcagccgggaagctcgaactgggcggagcccaccacagctcaaggaggcctgcctgcttctgtaggctccacctctgggggcagggcacagacaaacaaaaagacagcagtaacctctgcagacttaaacgtccctgtctgacagctttgaagagagca

SEQ ID NO: 938912 - DNA, 733 bp, Homo sapiens
ttgttttataatcttggagggggaaaagcctaattgcaataaaaacccagaaaccataaaagaaaggaatgatgaacttgactaagaaaaaagtcagggggaggagccaagatggccgaataggaacagctccggtctacagctcccagcgtgagcgacgcagaagacgggtgatttctgcatttccatctgaggtaccaggttcatcttactagggagtgccagacagtgggcgcaggtcagtgggtgtgcgcaccgtgcacgagccgaagcagggtgaggcattgcctcatttgggaagcacaaggggtcagggagttccctttctgagtcaaagaaaggggtgacggacggcacttggaaaatcgggtcactcccacctgaatactgcgcttttccaacgggcttaaaaaacggcgcaccakgagattatatcccgcacctggctcggagggtcctacgcccacggagtctcactgattgctagcacagcagtctgagatcaaacggcaaggcagcagcgaggctgggggaggagtgcctgccattgcccaggcttgattaggtaaacaaagcagccgggaagctcgaactgggcggagcccaccacagctcaaggaggcctgcctgcttctgtaggctccacctctgggggcagggcacagacaaacaaaaagacagcagtaacctctgcagacttaaacgtccctgtctgacagctttgaagagagca

SEQ ID NO: 938913 - DNA, 616 bp, Homo sapiens
cccagccaggatttcttttatcataagtcatcacttcagatttttgaagagaatgtacagcaaataatgaggttctgcatatgtcatagtcatgatggtcaccaaaggagtgattttaccctttatgtttacattttatcaagagttgaaaaaawgtactttatgacctcaaggtagaatagcaatctgatatttgaggctgagtgagaggacgaaattaattctcagagctctgaattacattttgaaaagattgctctggaaagttcttggactctaagggagtcagggtagaagtgggtagtacagttagtagtacagttaaagatctagtctaataatctagctgaaggatgaaggtatttggatcatagcaatcatggagaatagagcaatggtgatctgctagaatgaagaggacttgccattagattgaatgtggtaaaacagaaagacaggagtcaaggaaaacttgaaagttattgtcttgagaaactggaaaaatgaaatttattttttgtttaagacaactttaggagaaatagtttgggggaagaatcaagggttctgttttaaacatgtaaaatatgagatttctattagataacctaatggg

SEQ ID NO: 938914 - DNA, 752 bp, Homo sapiens
agtaaggaaattgatacagtagcaaaaggctggcctcactgtttacagatagttgcggcggtggctgtcttagtgtcagaggctatcaaaataatacaaggaaaggatctcactgtctggactactcatgatgtaaatggcatattaggtgccaaaggaagttcatggctatcagacaactgcctacttagataccaggcgctactccttgagggaccrgtgcttcaaatatgcacgtgtgcagccctcaaccctgccacttttctcccagaggatggggaaccagttgagcatgactgccaacaaattattgtccagacttatgctgcccaagaggatctcttagaagtccccttagctaatcctgaccttaacctatataccaatggatgttcatttgtggagaatgggatatgaagggcaggttatgccacagttagtgatgtaacagtacttgaaagtaagcctcttcccccagggaccagcgcccagttagcagaaccagtggcacttacccgagccttaaaactgggaaagggaaaaacaacaaatttgtatacagatagcaagtatgcttatctaatcctacatgcccatgctgcaatatggaaagaaagggagttcctaacctctggggggacacccattaaataccacaaggaaatcatggagttattgcatgcagtgcaaaaacccaaagaggtggcagtcttacactgccgaagccatcaaaaaggggaaggagaggagaa

SEQ ID NO: 938915 - DNA, 752 bp, Homo sapiens
agtaaggaaattgatacagtagcaaaaggctggcctcactgtttacagatagttgcggcggtggctgtcttagtgtcagaggctatcaaaataatacaaggaaaggatctcactgtctggactactcatgatgtaaatggcatattaggtgccaaaggaagttcatggctatcagacaactgcctacttagataccaggcgctactccttgagggaccggtgcttcaaatatgcacgtgtgcagccctcaaccctgycacttttctcccagaggatggggaaccagttgagcatgactgccaacaaattattgtccagacttatgctgcccaagaggatctcttagaagtccccttagctaatcctgaccttaacctatataccaatggatgttcatttgtggagaatgggatatgaagggcaggttatgccacagttagtgatgtaacagtacttgaaagtaagcctcttcccccagggaccagcgcccagttagcagaaccagtggcacttacccgagccttaaaactgggaaagggaaaaacaacaaatttgtatacagatagcaagtatgcttatctaatcctacatgcccatgctgcaatatggaaagaaagggagttcctaacctctggggggacacccattaaataccacaaggaaatcatggagttattgcatgcagtgcaaaaacccaaagaggtggcagtcttacactgccgaagccatcaaaaaggggaaggagaggagaa

SEQ ID NO: 938916 - DNA, 748 bp, Homo sapiens
gatacagtagcaaaaggctggcctcactgtttacagatagttgcggcggtggctgtcttagtgtcagaggctatcaaaataatacaaggaaaggatctcactgtctggactactcatgatgtaaatggcatattaggtgccaaaggaagttcatggctatcagacaactgcctacttagataccaggcgctactccttgagggaccggtgcttcaaatatgcacgtgtgcagccctcaaccctgccacttttctcccagaggatggggaaccagttgagcatgactgccaacaaattattgtccasacttatgctgcccaagaggatctcttagaagtccccttagctaatcctgaccttaacctatataccaatggatgttcatttgtggagaatgggatatgaagggcaggttatgccacagttagtgatgtaacagtacttgaaagtaagcctcttcccccagggaccagcgcccagttagcagaaccagtggcacttacccgagccttaaaactgggaaagggaaaaacaacaaatttgtatacagatagcaagtatgcttatctaatcctacatgcccatgctgcaatatggaaagaaagggagttcctaacctctggggggacacccattaaataccacaaggaaatcatggagttattgcatgcagtgcaaaaacccaaagaggtggcagtcttacactgccgaagccatcaaaaaggggaaggagaggagaacagcagca

SEQ ID NO: 938917 - DNA, 733 bp, Homo sapiens
atatttaatactctcttttttttaattatactttaaggtctagggtacatgtgcacaatgtgcaggtttgttacatatgtatacatgtgccgtgttggtgtgctggaatactatgcagccataaaaattgatgagttcatgtcctttgtagggacatggatgaagctgggaaccatcattctcagcaaactatcacaaggacaaaaaaccaagcactctcttaaggacctcttgtaaggcaggtctggtagttaggaattttsttagcatttccttgtctgaaaaagatcttatttctccttcacttacgaagcttagtttggctagatataacatttttggttgaagtttattttctctaaaatgctaaatatatgcccccaatctcttctggctgtagggtttctgcagaaagttctgcagctagcctgatgggcttctctttgtaggtgaactatatctcctctccagctacctttactattattttattcatgtcgatcttgaaggatgtgatgactatttgtcttggggatggtcgttttgtatagtatcttgcagtggccctctgcatttccggaaacagaatttcagcctatctaggaaggttggggaattttttaatgaatgatatggtcaaatatgtttccaagttgcttgttttatatccctccctttcagagatgccaatgagtcatttcagggatgccaagtcgttgatttggtctcttta

SEQ ID NO: 938918 - DNA, 597 bp, Homo sapiens
ctgaaaagacagatcatgttattgaataggaaaactcaatatttttaattaaactttttattttgagataactgtagattcacatacggttgtaaaaaataatacacagtgatcccaggtatcctttacccagtttccctcaatagtaatgtattgcaaaactatagtacaatatcacaaacaagaaattgacattgctacactcaagacacaggacatttccataaccacaaaagtctctctcatgttgttcttttacagtcatatctacttccattccactttcctgtmtctttaaccctttggcaatcactaatatgttcttcatttctataattttgtcattttgagaaatttacaaaaataaaaatatatagtatgtaaccttttggcgtgggaatttcactcagcctaagtatccaaagattcatccagaaatgtgtacatcaataatttattcttttatactgctaagttgtgtttcataaactatggtctgaatattggtgtcccccctccaaattcatatatttgaacctaaaacccaatgtgataatattaagaggcagggcctttgggacctgattaagtcatgag

SEQ ID NO: 938919 - DNA, 597 bp, Homo sapiens
ctgaaaagacagatcatgttattgaataggaaaactcaatatttttaattaaactttttattttgagataactgtagattcacatacggttgtaaaaaataatacacagtgatcccaggtatcctttacccagtttccctcaatagtaatgtattgcaaaactatagtacaatatcacaaacaagaaattgacattgctacactcaagacacaggacatttccataaccacaaaagtctctctcatgttgttcttttacagtcatatctacttccattccactttcctgtctctttaaccctttggcaatcactaatatgttcttcatttctataattttgtcattttgagaaatttacaaaaataaaaatatatagtatgtaaccttttggcgtgggaatttcactcagcmtaagtatccaaagattcatccagaaatgtgtacatcaataatttattcttttatactgctaagttgtgtttcataaactatggtctgaatattggtgtcccccctccaaattcatatatttgaacctaaaacccaatgtgataatattaagaggcagggcctttgggacctgattaagtcatgag

SEQ ID NO: 938920 - DNA, 641 bp, Homo sapiens
gagctctttatatattccagaaactagtttttttgttgaatatgtgatttgcaaatattttcactgagtttttaggttgtctttttgccctttaatagggtcttttgcagaaaaagttttaaattttgatgaagtccaatttatcaagttttccttttatggatcatactgttggtattaagattaaaaatctcttcatttagctctaggtgttccatgaattttaaagatcttttatcaggtgtctttacagttgtataagaactctgcttaacctcagatcaaaaagatattctgttttttaaaaaagatttatagttttacaatttacatttaaatcccgtggtccattttgagcttttttaaaggtgtgtgtggttcttcttccccttcctcctcttttcttcttcttcatctacmtcttcttcatcttctttctcttcatctttgttttgtcttttttttttttgcccatggatgtccaatggctctagtattatttattgaaaagtctatcctttctccaatgtattgcttttgcacctttgtaaaaaatcaactatccatatttttgtgggtttatttctcagttctttattctgttccattgatctatgcatcaaactcttcactaccattat

SEQ ID NO: 938921 - DNA, 641 bp, Homo sapiens
gagctctttatatattccagaaactagtttttttgttgaatatgtgatttgcaaatattttcactgagtttttaggttgtctttttgccctttaatagggtcttttgcagaaaaagttttaaattttgatgaagtccaatttatcaagttttccttttatggatcatactgttggtattaagattaaaaatctcttcatttagctctaggtgttccatgaattttaaagatcttttatcaggtgtctttacagttgtataagaactctgcttaacctcagatcaaaaagatattctgttttttaaaaaagatttatagttttacaatttacatttaaatcccgtggtccattttgagcttttttaaaggtgtgtgtggttcttcttccccttcctcctcttttcttcttcttcatctacatcttcttcatcttctttctcttcatctttgttttgtcttttttttttttgcccatggatgtccaatkgctctagtattatttattgaaaagtctatcctttctccaatgtattgcttttgcacctttgtaaaaaatcaactatccatatttttgtgggtttatttctcagttctttattctgttccattgatctatgcatcaaactcttcactaccattat

SEQ ID NO: 938922 - DNA, 429 bp, Homo sapiens
actgatatccttaatatgttgagtctcccaatttatgaacatggtaacttatttagatcttctttgatttcctttattagtattttatggctttcagtatgtaagttctgtactatttttgttaaatttacaccaaagtgtattatttgatgagtaattttgaatggcactgtattttaaattttgatctccatgtattcatttataatataagaaaacacaattgaattttctatgtttgtcttttgtccggtaaatrtgctgaacatttatttattagttctataaatttgttgttgttgttgtagactccttggattttctatgtccataaatatgtcatatgtaaatccagaaaattttactgtcctttttgggtaggtttgttggtgacagattctattttcctttatttgaaaatagcttgat

SEQ ID NO: 938923 - DNA, 659 bp, Homo sapiens
taaaccggcagtgtaaacaagagcagggcatgtatgagtagttgagaatggtgaataggagtatgactagacagaaggtaatagggatgacaagtattttttggggcacaatctaagttggtctggtgtctggaatgagactggggcctaataaaaaggagygtctatacggagcttaaatgggctgtaccctgtagcattccgaggacaggcctgaattctgagaaggtaaagtggtaaaagtattgtccagtcctttttaagttggtgactgagcttggtgaggtgtgtttttaaaagacctttagtccattctacttttcttgaagacggaggaccgtaagggatataaaggtttcactgaatactaagagcctgaaaaactgcttggctgatttgactaataaaggctcgtctgttatcagactgtattgaggtgggaaggctaaactgaggaattatgtctgacagaacggaagaaatgactgcggtggccttctcagaccctgtaggaaaggcctctacctatctagtgaaagtatctacctagactaagaggtattttagttatctgactcaaggcatgttgagtaaagctaatttgccagtcctgggtggggcaaatcatcaagcttgatgtgtagggaagggagggggcc

SEQ ID NO: 938924 - DNA, 581 bp, Homo sapiens
  misc_feature 560, 561, 562, 563, 564, 565, 566, 567, 568, 569, 570, 571,572, 573, 574, 575, 576, 577, 578, 579, 580, 581: n = A,T,C or G
aactcacttgaataaggtaatgtaggcagaataattgtctctttaacattaaaaactttttaatgcatttttagtgtcagcatggaccagcttctcccccacaaggatgcagggaagagggacagaggtgtgtgtgaggctgggatcccccactgatgacatggaatacctcatcagcagtgcagggactgtcctcgtacagttccactgggatgcttccctccactttcctctcacatccactccatctcatctatgttgaaagtgtcttccaggaagcatccccaagacagagtcacacacacacacacacacacacatgactggtaaagggtagggaatkggagaggcagggagagccattggcatgatgtgggttggacagccctgaaaggagagtaggaaggaaagaagatgggaaaaacctcagctcacagcggagctctgagaaagtcctggccggctcggtggtgagctccaatgcaaaggttgtctagagaagaatcccacattgcatagaaataaccagacccaaggacatagccatgctaagtcaccannnnnnnnnnnnnnnnnnnnnn

SEQ ID NO: 938925 - DNA, 715 bp, Homo sapiens
tagtggtggaatggttgctaacttatactctctaaaatgtccaatttttgaccaaaaaaattatgaaagtcaaagaaataaggtaatgtgtaccttactcaaagaggattttaaaaagcaaggaatataaactgtttttgagggtacccagatgttagaattagcaaagacttcaacaggactattataaatatgttcaacaaactaaagaaaattgatgagaatgacatcaaatagattataaataaagaggtagatatttaaaaaaatacatattttggagtggaaaagtaccataatgaaaaataaaaaatacctaaagggatttagcagtagctttgagctggcagaagaatgaatcagcaaacttgaagatagattattagagagtatggaatctgaagaacagggaaaaaaaattcaggaaaaygaacaaagcctcagagatctgtaggatactattaagtgcacaaacatatgcccagtggaatgtaaaggaaaaaagagaaaagggcatacaatacacaaagatataatgcctgaaaacttcccagatataatgaaaaccattaatctacatgtacatgaagctcaacaaattcctagtaaacttttaaaatatatatctagatatagtcaaaatgttgaaagctaatgacaaagaaaaaatttttaaagcggcaagagaaaaataacttaccgtataccagcaaac

SEQ ID NO: 938926 - DNA, 562 bp, Homo sapiens
ttggttcacagctttcactgggttacttattggggcaaagtttagccatgtgaatatgttcacagactggtgagtttgtatcagtctatgaactgtaactgtatctcacagctagagttccaaagaaaaagctattggatctcgtgtgtgtgtgtgtgtgtgtgtgggggggggggggtgtgtgtgtgtccatgcttatatgtgtttatgtgtgtgtacatttattatgttatatattatgtctaccacattggcttatgaataaaaaagcactcataaattgagtaaacaagtataaaatatttttcaagttcatgtgacttaagtcaatctttaataaccaagctgtctttaaaattgttggtaagataaawatatgaacgtcttcagaaatgttagaatacatttttatttgggttttatatttgtctctgctagatattcgaggtgtcaggttttggcatagaaggtagtaaaattataatcccagtcaaaagaaaatgatctttgtagtattttattctgattaatgagactaatttaatgttgttagtttaacaaa

SEQ ID NO: 938927 - DNA, 724 bp, Homo sapiens
ccaccttccaccattttacctctccagagaatacagcaacagaaactatcttagaagcagggagcagccctcaccaaataatcaaacctgttggtgctttgatcttggcctcaaaactacgataaataaattcccagcctcaaaaactatgagaaataaatttgtgttcttgataaattastcagtttcaggtattttgttataacagcacaaatgaactaagacagagctgatgtgtcattgttacttaaatttgcatttctctgatgattaatgattttgaacatttttgtatacccgttgatcatttgtatgtcttcttttgagaaatttatattcaaatcctttgcccattttttaattgggttttttaattactattgggttgtttgaattccttatacattttggatattaaccacttaccagatgtatggtttgaaaatattttctccattctttaggttgtctcttcactctgttgattgttgccttggctctacagaagcttttttgtttgatataagcccatttgtctattttgcttttgttgtctgtgctttggggttcaacatccaaaaaatcattgcctagaccagtgtcatgaagcttttcttctgttttcttccagtagttttacagtttcatgccttacatttaagtctttcatcaattttgagttgatttttgcatatgatgtaagataggggtctaatttccttct

SEQ ID NO: 938928 - DNA, 724 bp, Homo sapiens
ccaccttccaccattttacctctccagagaatacagcaacagaaactatcttagaagcagggagcagccctcaccaaataatcaaacctgttggtgctttgatcttggcctcaaaactacgataaataaattcccagcctcaaaaactatgagaaataaatttgtgttcttgataaattagtcagtttcaggtattttgttataacagcacaaatgaactaagacagagctgatgtgtcattgttacttaaatttgcatttctctgatgattaatgattttgaacatttttgtatacccgttgatcatttgtatgtcttcttttgagaaatttatattcaaatcctttgcccattttttaattgggttttttaattactattgggttgtttgaattccttatacattttggatattaaccacttaccagatgtatggtttgaaaatattttctccattctttaggttgtctcttcactctgttgattgttgccttggctctacagaagctttttkgtttgatataagcccatttgtctattttgcttttgttgtctgtgctttggggttcaacatccaaaaaatcattgcctagaccagtgtcatgaagcttttcttctgttttcttccagtagttttacagtttcatgccttacatttaagtctttcatcaattttgagttgatttttgcatatgatgtaagataggggtctaatttccttct

SEQ ID NO: 938929 - DNA, 754 bp, Homo sapiens
accaagtaagagtcaacactgcctgataacaccccagggggctataagtgctctttaaatcctaagatgcagagttaagaactaatagggagccttccttcaaggacaattataacttgaaaaaagaaacaagtcaaagcgatgtgtcattagcagaccgtaactagtacaattgttccttaaggccttggaaagggaaagtggtgagggagatggaaccagtgggtgtgatgaatccagggaagcttcctggagagggaacaccagtagccacgaaccactgcagagctctccttctcctacccacctctaagcagttctccccatgtaacaccgaggatcagccaccccttcaaactgttggcccagaagggcagtagaaaggaggaaaatggcagcccaggaggtacctggagttctgtgacacttcctgggccaggactgtgagagaaaactgttcccattccaagtcaacagtrcaaagggctttccaagcactactcctgtcctgccaaagctcccaagccccttgtccctgtgttcattttattctttacagcccacctgctgccccctttaacctgttagataagtagtcagcactcagtcatgagaacccatgtgtgtagctctggatacttcaaggttgtgatgagcatgcttccatccaactggggctcaccaagctcaagaaatgaaatctcagactggggcccaggagccaggtgcctctactcagagaagcagccttctc

SEQ ID NO: 938930 - DNA, 593 bp, Homo sapiens
gcctttggccaaaagcaatacaattctgccctagaaaagttaaaaggactttgaaattatgagtctcaagccctggcctgatccatggatgaggatgagatgactgaggcagcagaaaggaaaagaaagaggaacacttaacagcaatttcccttccggctcacctcctccaggttttcattaacctcatagtgcccagagccctggcctgcaatgtgcagaacaaggaagatgggggaggctgggcagggcccagggaaggcgcccagtgyggggcacacacagggctgcctcgtccttgctgatcccttgctgcctccagccctgggcactgcagtccagagtacgggagtggagggtggctgccaaccctgccaaagtcagggattctgggcggtgcttctcagcctgccagggttcagcagcattgaagactcaaagcacgctggaatgtgtccaaagatttgaaggacaccaaatcttccccacaaccacaaagccatgtggtaacaatatcttgttgatggtggcatgctttgccacatcctcgaaagacaccagtcctcattagcatgtcaccttctgctatgtct

SEQ ID NO: 938931 - DNA, 590 bp, Homo sapiens
gttgatagtttttttgtgttttgttgctgtgcagaagctcttaagtttaattagatcccgtgtttcaatttttgcttttattgcaattgttttgatgtctttgtcatgaaatctttgcccacttttacgtccaggatggtattgcctaggttgtcttccagggtttttataatttggggttttgagttgatttttgtatatagtgtaaggaaggggtccagcttaatcttctgcatatggctagccagttatccyagcaccatttattgaatagggaaccttttccccattgcttgtttttatcagctttgtggaagatcagatggtcatgggtgtgtggccttacttctgggcccctattctgttccgttggtctatgtgcctgtttttgtaccagcaccatgctgttttgattactgtagccttgtagtatggtttgaagttggataatgtgatgcctccagctttgttctttttgcttaggattgcctgggctagtcaggctcttttttggttccatatgaattttaaaatagtttttttttctatttctgtgaagaacgacattggtagtttcataggaacagcat

SEQ ID NO: 938932 - DNA, 593 bp, Homo sapiens
ggaagatcagatggtcatgggtgtgtggccttacttctgggcccctattctgttccgttggtctatgtgcctgtttttgtaccagcaccatgctgttttgattactgtagccttgtagtatggtttgaagttggataatgtgatgcctccagctttgttctttttgcttaggattgcctgggctagtcaggctcttttttggttccatatgaattttaaaatagtttttttttctatttctgtgaagaacgacattggtagtttcatagkaacagcattgaatctgtaaattcctttgggcagtatggcctttttaatgatattgattcttcctatccatgagcatgaaatgtttttccatttgtttgtgttttctctgatttctttgagcagtgtttgtaaatctgattgtacagatccttcacctcctggttagctgtattcctaggtattttattctttttgtggcaattatgaatgggattgcctttctgatttggctcttggcttggctgttgttggtgtataggaatgttagtgatttttgtacactgatttttttatcctgaaactttgttgaagttgtttatcag

SEQ ID NO: 938933 - DNA, 788 bp, Homo sapiens
gctttttgatcaagactatggaattttctagatacagaatcatgttgtctgcaaacagagatagtttgacttcccttttcctatttaagtggactttatttcattctcttgcctgattgctctagctaggactttcaatactatgttgaataggagtggtgagagagagcatccttgtcttgtgctggtttttaaggggaatgattccagcttttgccccttcaatatratgttggttgtgggtctgttgattgattttcaaatgttaataaccttgaattcctgatcatttttgcttggttatgatgtatttctagattgtatgttttaataatttttagtggtttttgcatccatgttcttgagttaattttcttttttctaatgtgcttgtcagtgtttgatgtcagagttatgctggcctcaaaataaattttgaaatgcccccacctttattatcagaaagaatttgtggaaaatttgtattatttatttcacaaatgttgggcagaatttgccatctggccccagagcttcctttgcagaaaaggtttttaattacaaattcaatttaaatattagatatagggttactcagcacttctatttcctcttctgttagttttggcacatattttaagaaatttcttgagtttgcctgagttattgaatttgttggcaaaaagttgttcataacattcctttattatcattttaatgtaaatacaaattcttggtattggtgattcatgctttctttcatttttttatgttgtcttagtcagctc

SEQ ID NO: 938934 - DNA, 788 bp, Homo sapiens
gctttttgatcaagactatggaattttctagatacagaatcatgttgtctgcaaacagagatagtttgacttcccttttcctatttaagtggactttatttcattctcttgcctgattgctctagctaggactttcaatactatgttgaataggagtggtgagagagagcatccttgtcttgtgctggtttttaaggggaatgattccagcttttgccccttcaatataatgttggttgtgggtctgttgattgattttcaaatgttaataaccttgaattcctgatcatttttgcttggttatgatgtatttctagattgtatgttttaataatttttagtggtttttgcatccatgttcttgagttaattttcttttttctaatgtgcttgtcagtgtttgatgtcagagttatgctggcctcaaaataaattttgaaatgcccccacctttattatcagaaagaatttgtggaaaatttgtattatttatttcacaaatgttgggcagaatttgccatctggccccagagcttcctttgcagaaaaggtttttaattayaaattcaatttaaatattagatatagggttactcagcacttctatttcctcttctgttagttttggcacatattttaagaaatttcttgagtttgcctgagttattgaatttgttggcaaaaagttgttcataacattcctttattatcattttaatgtaaatacaaattcttggtattggtgattcatgctttctttcatttttttatgttgtcttagtcagctc

SEQ ID NO: 938935 - DNA, 788 bp, Homo sapiens
gctttttgatcaagactatggaattttctagatacagaatcatgttgtctgcaaacagagatagtttgacttcccttttcctatttaagtggactttatttcattctcttgcctgattgctctagctaggactttcaatactatgttgaataggagtggtgagagagagcatccttgtcttgtgctggtttttaaggggaatgattccagcttttgccccttcaatataatgttggttgtgggtctgttgattgattttcaaatgttaataaccttgaattcctgatcatttttgcttggttatgatgtatttctagattgtatgttttaataatttttagtggtttttgcatccatgttcttgagttaattttcttttttctaatgtgcttgtcagtgtttgatgtcagagttatgctggcctcaaaataaattttgaaatgcccccacctttattatcagaaagaatttgtggaaaatttgtattatttatttcacaaatgttgggcagaatttgccatctggccccagagcttcctttgcagaaaaggtttttaattacraattcaatttaaatattagatatagggttactcagcacttctatttcctcttctgttagttttggcacatattttaagaaatttcttgagtttgcctgagttattgaatttgttggcaaaaagttgttcataacattcctttattatcattttaatgtaaatacaaattcttggtattggtgattcatgctttctttcatttttttatgttgtcttagtcagctc

SEQ ID NO: 938936 - DNA, 625 bp, Homo sapiens
tctcctgcctgacccaggagggccatgcctcctcctacctggtgtgagcctcaggtgggattgctggggtgctctgtgaggagagccctggccctggggacttcccacccgggatctctgcctggaggactccttcagtcccgcccctacctaaggccctgcccagtgctccactccagctcctgcttccctttgcaccctccagccaatccagctcctcgcagctcccagggtgctctgcggcttcattagctctggcctttgtaggtgctgctccttttgtctgggaggcttcttgccttctcccctccccattactgtttgtcaggctatcctccacttgtccttccaggtttagcataagtgtttcttattttgggaaacttctgaccaccaccgtccccatcccaaccctcacttaagtgcctcaggtgggctgccctggcctccgtattcccscatcagagcacgatcacattgctgtgcgtagaacctcttcacatgttttttttcctccaccaaacagaactccaagctcctagatccttgagggcagggtctggggatgcattcgtttcatcccacagatacggagttcctcctgcggcaccattgtgctgcaccc

SEQ ID NO: 938937 - DNA, 635 bp, Homo sapiens
gcgccgggcgcctggaggtgacctggggcaccgtctgtgatgcggccctggacctggccacggcccacgtggtgtgccgggagctgcagtgtggggcggtcgtgtccacgcccgagggcgcccgcttcggccggggctcggggccggtgtggacggaggccttccgctgtgcgggcaacgagtcgctgctgttccactgcccacgggggcgtgggagccagtgtgggcatggycacgacgcggggctcaggtgctcaggtgaagtcctgtgtgtgggctctgaaggctcagccctgccttgttctctgtcaaatcccttcgtgccctaaaggtgcctctggccagtaggtgtgggtgcttttgatgtttgcttctgttggttgaaagaagcgcagggaagagactgggtgtagagtgatgtaccccaaggctgcagctaagatcaaattcttctggagagctgtgtgagctggatgctgatgcagaggagggtgggggagctggtgagaccaaggctgggctctgtgcccatcccactgggtgtgaaggaaggaaatgaccacagacagccatgttctgggtcggccgtctgcaagccaggctgactcctcctctcccccagagttcaggatggt

SEQ ID NO: 938938 - DNA, 796 bp, Homo sapiens
actttacactgctccaagggtaacattgaacatatttgggcactgatccctcaggaccaaagctatctctgaacatggggctgaggtacacacacacacacagacacacacacacacttaaataattactgcagtcaagctaatgaacattccaccatctcacaaagttacgtttggttttgtggtaagagcacctaaaatctactttcctagcaaacttccagtgtacaatgcaatattattaactacattcctcctgctgtatgttgggtttctagatttattcatcctgcacagttgtgtaccctttgacctacatctccccattcccccaccacctgcccctggtaaccacattctattgtttttacgtatttgactttttttttttttttttgctcccatatstaagtgggatcatgcagaatttgtctttccattcctggtttatttcatttaacataatgtcctccaggttcatccatgttgtcacggatcacataatttccttcttatttgaggctgaacagtattccatagcatctatgtaccacatttctgttttctttttttaaattgacaatctttgtacatctctatggggttcatagtggtgtttcaatccatataatgtgtagtgataagatcagggtaattggcaaagccatcatctcagacatgtatcatttcttcgtgttgggaacattcaatatcctccttccagcgatttgaaaccatataatatactgttaattacagtcatcctacagtgctatagaatgctagaatttattcc

SEQ ID NO: 938939 - DNA, 607 bp, Homo sapiens
gaaaagatagtctttttttttttttttaatggagtcttgctctgtcacctaggctgaagtacagtggtgtgatctcggctcacggcaacctctgtctcccaggttcaagcaattcttatgcctcagcctccagagtagctaggattacaggtatgtatcaccatgcccagctaatttttgtatttttagtagagacagggtttcacatgttggccatgctggtcttgaactcctgacctcacgtgatctgcccacctcggcctcccaaagtgctgggtttacaggcatgagcctccatgcccagccaaaagataatcttttcaaaaatggtgttgaaacaactggttacttatatatagaaaagaaataactggttatgtatatagaaaagaatgaaccataatccctmcctcaaaccatatatgaacattaaacagatcatataccaaaacagtaaagctaaactaaaagctactagaaaaaatatgcaacttttgggtatacaaaaattttgtaggtagtacacacacaaaaagcacaaaccaccaaagaaaataatttacaaagtaggctttataaaaattagaaacctctgctttttgaaaga

SEQ ID NO: 938940 - DNA, 772 bp, Homo sapiens
taagatccagcatcttatatactaaatatatccaggttttaaccagaacccatttgacacactaagagccaggaagatacctaatcaaatgcaaaaagacaattaatagatgccaacaccgagaagacagagatgttagaaatacctgatgaagagttttaagcagttattgtaaaaatacttcaaagagtaattrcaaatgtgcttgaaacaaatgaaaatatagaaagttcaagcaagaaaattgaagatataaagaagagccaaatggaagttttagacatgaaaaacataatcactgaaaataaaaatctcaaaggatatattcaacagcaaaacagagggacagaggaaagattaattgaacttgcaggttgaaaagtagaaattacccaatttgaacaacagagagaaagtacactgaaaacaataaagagaacagtctcagtgcttgtgggattgtaacaaatgatctagtataaatgttctaggagtcccagaagaacagaagacaaaggacaggaatggaaaagtacttggaaaaataatggctgaaaccttcccaaattttgcaaaccacatacctacaaaaaagaaagacaggggtaactatctgaagtgaggaatatgttaattagtttaaggtgaatttatatatatacacacatatatattaaatcatcatgttatacaccttaaatgtatacagtctttgtcaaatatacttcaagttgaaaaattagtttaaaaaagacatacttatgtattcaag

SEQ ID NO: 938941 - DNA, 595 bp, Homo sapiens
acttggactgaaatttacaccatttgctttcctagttctcagactttggactcagactggaattataccatcagctctctgggtttctagcttgctgactgaagttctttgccttcacagcctccaaaattatttgaataaattttatataattctgtataataatctctctttctctctctttctctgtatacatacatacatatatataacatagagatttatttatatataaatatatagttttataaaattttaaaaattgttattttatttttattttgggggaggaacaggtggtttttggttacatggataagttcttcagaggyggtttttgaaattttggtgcacccatcacccaagcggtgtataccatacccaatgtgtagtcttttattcttcatccccctcccatccttacatttgagtccccagagtccattatatcattcttattcctttgtgtcctcacagcttagctcccacttataagtgagaacatgcaacattttccattcctgagttacttcattcagaataatagtctgcaactccacccaggttgctgtgaatgccattacttcatttcttt

SEQ ID NO: 938942 - DNA, 602 bp, Homo sapiens
tgctcttcttcatcatactaaagttcatgctaatgcaataaaaaagtaaaggaaataaaatatattcatattgggaaggaagaaataaaacctcattgtttacagatgacatcatcatgatcatctttgtagaaaatctgaaagagctgacagaaaacctcctggagctattaaggaattacagtaaggctgcaggatacaagattgtatgcagaagtcaattgctttcctgtacagcagcaatgaaaatggacaatttgaaattagaaacacaatattacttacatgagaacccaaaaaaatgaaatacttggttataaatctaataaaatgtgtacaggatctataggcagaaaaccacaaaactgtattgaataaagccaaaggaaaactaaataaatggagagatatttcgtgtttatcaaaaagaagaatcaatattgtcaagatatcagttcttcccaaygtgatctgtagattctgtagattcaatgcaattccattcaaaatcctaacaagttatttttttcaatatcaacaaactataaaattgatatggaaaggcaaaagacacagaattgacaagacaatattaaagaaca

SEQ ID NO: 938943 - DNA, 575 bp, Homo sapiens
aatgcacagaaagaaaaaacaatagaactaaatccaaacttcaactaacacaactaacatataaaaagataatgactacaattaaaaatcgaaacgcaaacaccagattagatacaattaaagaccaaattagtgggatggaggatacttttgaataaattactcaaaatgtaccctacagtgccaaaaataaaaataaaaaatgaaagtaataaagaggttaagacacatagcagagaaggcccagcatgcattgagtcaggaaagcagtagcagagaatgtgtgtgagaggcaatattagcaagggtaggactcagaattttgagaattgatacggccaggtgtgatggctcatgcttataatcccagcacattgggacgtgggaggattktttgagtcaggagttcaagtctagcctgggcaacatagtgaaaccctatctcaacaaaaaatacaaaaacgagccaggtgtggtggcacatgcctgtggtcccagctactcaagaggctgagataggagaatcgcttgagccaagaggttgaggctgcaggaagctgagattgtgccactgc

SEQ ID NO: 938944 - DNA, 570 bp, Homo sapiens
actcctgtctcaagagccgagctcctcgagtgagcaattcctgtcccttttaagggctcacaactctaagggggtctgcgtgagagggtcatgattgattgagcaagtagggggtacgtgactgggggctgcatgcaccrgtaatcagatcggaacagaacagtacagggatttttacaatgcttttcaatacaatatctggaatctatagataacataactggttaggttgtaactaccaggcccagggcgcggcagcaggctgtttgcctgtggatttcatttctgccttttagtttttacttcttctttctttggaggcagaaattgggcataagacaatatgaggggtggtctcctcccttaacagaatctcactctgttgcccaggctggaatacaatagcaagatctcggctcactgcaacctccacctcctgggttcaacgattcaccttcctcagcctcccaagtagctggaattacaggcatgcaccaccacgcccagctaatttctgcgttttagtagagatggggtttcaccatattggccaggctgttcttgaacttc

SEQ ID NO: 938945 - DNA, 546 bp, Homo sapiens
tgcgcggattacaggcgtgagcccctgcacccggccaaaatacattcttcttaattacctatttgtagaaatactactaaaatatgatcaagaatctttaaatagaaattttaatgaagacttttttttttgcatctttaacatggaagtacttcttactgatgattacattttttaaaatcatgcctgccagcccatctaagccaaattcaaacaccactctgcattaaatgaagctgcagyaggaaagctgagcacatagcacccaactgatcggaaagaaacgtaccatgtttaataaaattccagattcctgtggtcgttgtccataaaaatgctttgcagtgttggatatatggtttgcaaaagcaagcaaatcctccacagttccatatctgactgatgacaaccatggtacctcttggccactaagcagcagagacttagaacgctcatcgttttgattactgtcttgacacatggtcattagactgggttcataaactgctggctcttcacttgcataaagattttccataatgtcta

SEQ ID NO: 938946 - DNA, 546 bp, Homo sapiens
tgcgcggattacaggcgtgagcccctgcacccggccaaaatacattcttcttaattacctatttgtagaaatactactaaaatatgatcaagaatctttaaatagaaattttaatgaagacttttttttttgcatctttaacatggaagtacttcttactgatgattacattttttaaaatcatgcctgccagcccatctaagccaaattcaaacaccactctgcattaaatgaagctgcagtaggaaagctgagcacatagcacccaactgatcggaaagaaacgtaccatgtttaataaaattccagattcctgtggtcgttgtccataaaaatgctttgcagtgttggatatatggtttgcaaaagcaagcaaatcctccacagttccrtatctgactgatgacaaccatggtacctcttggccactaagcagcagagacttagaacgctcatcgttttgattactgtcttgacacatggtcattagactgggttcataaactgctggctcttcacttgcataaagattttccataatgtcta

SEQ ID NO: 938947 - DNA, 661 bp, Homo sapiens
agccccagatcccgggactcaggaggagctgggccgagctgcgggaggcgtggaagccccaggagagggttttgcactacgaaaaaaccatatgcaaattgcctgggaagagtttagattctgtggccaaactgcaagcggccgttgctaaaatgggaagcatttacaggaaaaagcaaacggtttcatcgaggtggattcgacgacaaactaagcgaaggcaaaaacgatcgcgggagtcgacgtggagacagataaggcccagagctctgaccagacactaagtacttcatcactagtccctggctgctgctctgtggataacagcagctcatgtaagccaacctcacaaaaccaggggccgtccacctccttcacgcaggcatgaggaggcttcagaggccgagtccgaagtggccaaccacaacttccaggagcaagaggggcatttcataatgactaggggtcaattctccagaaagacatagcagtctttaatakgtagggacctaacaacagagcctcaaaatatggaatccatcaaaggggagaattgcaagaaaaaccagacagatccactgttatagttggatatctcaacacctatctactaataattgatggactcaggacatagctgagctgaagggcatcgtcaatc

SEQ ID NO: 938948 - DNA, 629 bp, Homo sapiens
tttcactcttttttttttttcttttgggacagagtcttgctctgtcgccgaggctggagtgcagtggcgttatctcggctcactgcaacctccacctcccaggttcaagtgattctcctgcctgagccttccgagtagctgggattacaggcatgtgccaccatgactggctaattgtttttgtgtatgtatttttagtagagatgggatttcaccatgttggccaggctggtctcaaactcctgacctcaagtgatctggccacctcagcctcccaaattgctggaattacaggcrtgaaccactacgtttggtcaacccttccatttcttaaacttagtttccaattatttccaaagctggatcctctcagaatcttccctaagtcaggtaaatgcagatagttgttcaggccaaaaatcttggagttatcttcaactccacttttaatttcacatcccaagtacaatctgtcagtcttcctattggttcattttcaagatatgtcaaaaatctgactgataactattgttatcactctgatccaaaccaccactgtattagacttggataattgcaatagcctcctatgttagtcatgacactaactgcttagcaaacaactccaa

SEQ ID NO: 938949 - DNA, 782 bp, Homo sapiens
agaacaaagtccttaccctcatggagtttgttttctagtgaagtgacatagacactaaacaagcaaatacaatacacaatttccagttttaaacacacagtaaaaaataaaactaaaaacaccggaagaagacctggtttatatagggtggtcagagaaatctttccaagtttgagatatttgaatcaagacctaaagaggggacagaaccagcctgccattaagaggtaaaagatgctccaggtgaaagaatcacatgtgccaaggtgttgtagaagcattctgggcattgcccagggaaagtgatgaagcagatgggaatggagcagagtgactgaggttaggagtggtctgagaggagacagggaggttgggcggctagtggtgcagatggtgtaggagctttagamcactttgattattttgtttttttcacccagggtgagacaggaatccattacagggttttgaacagaggaaggacatgcctggtttgttttaaaagattgactctgctgtgtggaaaataggcaatatcaagatgaggagcagaaaaagagaggcctatgagcaatctctatagaaaagaggcaactgtggctttgacgtggtggaagtggtcagattcaggatgtatttagaaggacgagctgataggtcttcagacagtatagtgtgatgttaagtgaaacggcaaggacaactgatgcttctgggctgagcatctggtaggctgaggttgccctttgctgaaatacagaacagtgtggaagaatcagtgt

SEQ ID NO: 938950 - DNA, 575 bp, Homo sapiens
agctatttttgaaacatttttttgtagagatggagtcttgctatgttgccgagactggcctcgaactcctgtcctcaagcaatcctcctgccccagcctcccaaaatgctgggattaccagcatgagccaccttacttggcccccagtgtctttaattttgatgaagtgtatctattttttcttttgtcacttgtgcttttggtgtcatatgcaagaaatgatagcccaatctgaagtcataatgcttttcctctatgttttcttctgggagttttayagttttaggattcacattaggtctttaatccattttgagttaatttttatgtatagtataagatcagaatccaacttcattcttttttgcatatgaatttccagttttcccaacaccatttgttgaagacatagtcctttccctgtagagttgtcctgtcagccttgccaaagatcattttatcatatatgttaaggtgtatttctgggctttttactctattccgttggtctgtgtgcccctctttatgccagtactacattgttttgattactatatctttgtagtaaattttga

SEQ ID NO: 938951 - DNA, 561 bp, Homo sapiens
agtagctgggatgataggcgtccaccaccacggccggctaatttttgtattttcactagagacagggtttcaccatactggcgaggctggtctagaactcctgacctcatgtgatctgcctgcctcgtcctcccaaagtgttgggattacaggtgtgagccatcacacccagcctgcagcctgttttgtcagcaaggtcttcatgacctgtatcttgtgccaacctcctatctcatcctgtgacttagaatgccttaacagtctgggaatgcagcccagtaggtctcagcctcattttacccagctcctgttcaacacggagttgttcgggttcccgcgcctctgacacaytggtcccctttatgagccaccacatctcccattcttgctgcaggatctttgcacacgctgtccctgcctgtgtgctgaccgcagggaaactcccctgggacccctggtctagctcagttgccaaagctcacccttcctgggcccatgtgcccttctttttcaggccatttctctcagtttgaggttcaacaccttcctctctgagatggt

SEQ ID NO: 938952 - DNA, 577 bp, Homo sapiens
taatatcacagatatgtgcaaataccaccacaattttagaacattttcatctcttcaaaaagaaaccctgttcccgccctccctcctgtggcaaccactagcctactttctgtctctatagatttccctgttctggatacttttgataaaatatgtggtcttgttgaccatcttctttcacttagcgtagtattttcaaggttcatctatgttgtagcatgtatcagcacttcattcctttttatgtacccattatctcttaagaatatttataagttatataaaactatatacaatgttccaaagaagacatacaaatggccaacaggtatatgaaaaggtgctcaacatcacgagtatcagagatgcaaatcaaaaccatgatgaggtattacctcacacttgctaggatgggtattttaaaaawgacaagagataacaaatgctggtgagggtgtgtacacggttggtgggattataaattggtacagctattatggaaaacagcatggaggttcctcaaaaacttacaaacagaactaccataagatccagcaatcccacttctgggtatata

SEQ ID NO: 938953 - DNA, 692 bp, Homo sapiens
aaaacttggtgtatctcaaacaaaaagtcattatttattaaagttttttttttttttttttttttttgagacagagtctcactctgttgcccaggctggagtgcagtggcacgatctcggctcactgcaagctctgcctcccgggttcatgccattctcctgcctcagcctccagagtagctgggactacaggcgcccgccactacgcycggctaatttttttgtgtttttagtagagacggggtttcaccgtgttagccaggatggtcttgatctcccgacctcatgatctgcctgcctcagcctcccaaagtgctgggattacaggcgtgagctgccgtgcccggcctatttattaaagttttaagaaataaaaatacaagatacaaggtacatcatttcagtatttccaaccataagcctggtattattagatcctcatttcacagctatggaagaaagatatagggggtttagtaaacctaatctatgtatggtgaagttaggatttgaaactagcagagcccaagctcttaacaagaatgtattaacaaattaatgcttatttattcacaatattagctaccctaatgccaaaaaatgtcattttaaaatttagttcagttctcccaaaacagaaatctatttgaacaacttgtatccaatcttcacaagtgtacataaaaagttat

SEQ ID NO: 938954 - DNA, 729 bp, Homo sapiens
gcaacagagtgagaccctgtctaccaaaaaaaagtaagaaagaaagattccctagcctccgttggcctcatttgtttcttcacattctggtctcattctgcttactccttatctccggctactgccaacaaacagcctttagttctgtaagactagcattctaactaaacagaccaaaatcaactcaggtttagctaagaaagtttcctttttaaatycgatcatccttcaaaagtaataaaaagtttaaaaataaaaagtaaatttgagtctccaggtaaagtctcacaccagttaataaatatcacttctttctataatatctgattctaccagtgatgaaggcccaagtgagctcattcccccaaaacatactagaacatatacatatgtgtgtataaattaatattgttcccttgtgaaaagtctccaatggtttagcatctctggatgggaattttgcaaagagccaaaagtcgttgattattaagcaacccccccccaaaatgattaaaagggcaatatttcttatttaaaaatcaagtccttttaattacactaactaggaaaaaaaaggaagctatcgctggtgcatttacacatttttcgatgtattacagcacttaactctctgagcaatcttacgaggtaggtaccacctcaaccaggagaagtactgcatgtattgtaaatgtttagaaggaaagcactcattatatgtcagataat

SEQ ID NO: 938955 - DNA, 636 bp, Homo sapiens
ctaattcacagccaatgccagccagacgttttgaacagtcagtccaaagtccacagaagctgaacagaatccatgaaatttttatttcacagggcatggctttaataccctctaaaatattctagaccaaaatccttccgtgatatcaaactgcagcttaagcaaaagccatgtaacaagtacgggctaaaaggcaacaaggcattttgcattccatccatccacactgtctaatgagtgtgaatgcttccaaagcattaggtttttatgacctcaaatttgrttcagacaattcctaaaagttaaaagatcaaatcggctgggtatggtggctcatgcctgtaatcccagcactttgggaggctgaggagggcagatcacctgaggtcgggagtttgacaccagcctggccaacacggtgaaaaaccatctctactaaaaataaaaaaattagccgggtgtggtagcacacgcctgtaatcccagctactcgggaggctgaggcaggagattgcttgaacctgggaggcagaggttgcagtgagccggtatcacgccactgcactccagcatggatgacagagttagactccatctcaaacaaaacaaaacaaaacaaaagcaaatcaaatcatg

SEQ ID NO: 938956 - DNA, 565 bp, Homo sapiens
aatatacctttactgtcctacctcaggggtatatcaactctatggctttgtgtcataatcttattcagagagaccttgattgtttttcacttccataagatatcgcactggtcattgatgacattgatgacattatgcttattggatccaatgagcaagaagtagcaaacacactggacttattggtgagacatttgtacacaaaatgatgggaaataaatctgactaaaattcagggactttctacctcaataaaatttctaggggccaagtggtacggggcctgtcaagatattccttctaaggtaaaggataagttgctgtatttggccctttctacaaccaagaaagaggcacaatgcctagtgggcctrtttggattttggaggcaacatgttcctcatttgggtgtgttactctggcccatttatcaagtgactagaaaggctgtcagttttgagtggggtccagaacagaagaagcctctgcaacagatccaggatgctgtgaaagctgctctgccacttgggccatatgacccagcagatgcaacggtgcttgaggt

SEQ ID NO: 938957 - DNA, 757 bp, Homo sapiens
cagcagacttaaatgttcctgcctgctggctctgaagagagcagcagatctcccagcacagtgctcaagctctgctaagggacagactgcctcctcaagtgggtacctgacccccgtgcctcctgactgggagacacctcccagcaggggttgacaggcacctcatacaggagagctctggctggcatccagcgggtgccctctgggacaaagcttccagaggaaggaacaggcagcaatctttgctgttctgcagcctcttctaattaaacccaggcaaagagggtctgaagtggacctgcaggaaactccagcagacctgcagcagaagggcctgactgttagaagaaaaactaacaaacagaaaggaatagcatcaacgtcaacaaaaaggatgtctacacagaaaccccatctgaaggtcaccagcatcaaagaccaaaggtaggcaaatccatgaagaygaggaaaaaccagcacaaaaatgctgaaaaattcccaaaaccagaacacctcttctcttctaaaggatcacaactcctcgccagcaagggaacaaaactaaatggagcatgagtttgacaaattgacagaagtaggcttcagaaggtgggcaataacaaactcccccgagctaaaggagcatgttctaaaccaatgcaaggaagctaagaaccttgaaaacaggttagaggaattgctaactagaataaccagtttagagaagaacataaatgacctgatggggctgaaaaac

SEQ ID NO: 938958 - DNA, 840 bp, Homo sapiens
tttccaccaaagagcctgtctgcttcctgctgctattcatggcacccaggctgtttgcccttggcctgcctcattcttttttttttttttttttttgagccagagtcttgctctgttgcccaggctggagtgcagtggcacaatctcggctcactggaaactctgcctcccgggttcacaccatcctcctgcttcagcctcctgagtagctaggactacaggcacccaccaccgtgcccggctaattttttgtatttttagtagagatggggtttctctgtgttagccaggatggtctccatctcctgaccttgtgatccgcccacctcagcctcccaaagtgctgggatgacaggcgtgagccactgcacctggccagcctgactcattcttattggcaccaaatrtccagaggggaccaagaaagcaggggtctggcatctcagcactggcctgagtgtgcatacacccagccaggttgcaacagtgccctggctcagcctcaacttttctcccagatcagagtgggtgccaggagcagggagaggccaggaagtgggagcaggcatttctgagcctgtggaggtacagggggcattcctgggcctccaagagtgtggagatgcctgggagtggccgcggcttggacaggtgcagccatacccaggagggtggggctcctggctgctcccagcccctaagagcacagatagcctaggatagcctaaggagtgtgaagctcccaccctgccaactcagaaggggtcagggcttctgcctgttctactgctcctgcaagctctgtggagcacagagccctggccaagccttccccactga

SEQ ID NO: 938959 - DNA, 840 bp, Homo sapiens
tttccaccaaagagcctgtctgcttcctgctgctattcatggcacccaggctgtttgcccttggcctgcctcattcttttttttttttttttttttgagccagagtcttgctctgttgcccaggctggagtgcagtggcacaatctcggctcactggaaactctgcctcccgggttcacaccatcctcctgcttcagcctcctgagtagctaggactacaggcacccaccaccgtgcccggctaattttttgtatttttagtagagatggggtttctctgtgttagccaggatggtctccatctcctgaccttgtgatccgcccacctcagcctcccaaagtgctgggatgacaggcgtgagccactgcacctggccagcctgactcattcttattggcaccaaatatccagaggggaccaagaaagcaggggtctggcatctcagcactggcctgagtgtgcatacacccagccaggttgcaacagtgccctggctcagcctcaacttttctcccagatcagagtgggtgccaggagcagggrgaggccaggaagtgggagcaggcatttctgagcctgtggaggtacagggggcattcctgggcctccaagagtgtggagatgcctgggagtggccgcggcttggacaggtgcagccatacccaggagggtggggctcctggctgctcccagcccctaagagcacagatagcctaggatagcctaaggagtgtgaagctcccaccctgccaactcagaaggggtcagggcttctgcctgttctactgctcctgcaagctctgtggagcacagagccctggccaagccttccccactga

SEQ ID NO: 938960 - DNA, 840 bp, Homo sapiens
tttccaccaaagagcctgtctgcttcctgctgctattcatggcacccaggctgtttgcccttggcctgcctcattcttttttttttttttttttttgagccagagtcttgctctgttgcccaggctggagtgcagtggcacaatctcggctcactggaaactctgcctcccgggttcacaccatcctcctgcttcagcctcctgagtagctaggactacaggcacccaccaccgtgcccggctaattttttgtatttttagtagagatggggtttctctgtgttagccaggatggtctccatctcctgaccttgtgatccgcccacctcagcctcccaaagtgctgggatgacaggcgtgagccactgcacctggccagcctgactcattcttattggcaccaaatatccagaggggaccaagaaagcaggggtctggcatctcagcactggcctgagtgtgcatacacccagccaggttgcaacagtgccctggctcagcctcaacttttctcccagatcagagtgggtgccaggagcagggagaggccaggragtgggagcaggcatttctgagcctgtggaggtacagggggcattcctgggcctccaagagtgtggagatgcctgggagtggccgcggcttggacaggtgcagccatacccaggagggtggggctcctggctgctcccagcccctaagagcacagatagcctaggatagcctaaggagtgtgaagctcccaccctgccaactcagaaggggtcagggcttctgcctgttctactgctcctgcaagctctgtggagcacagagccctggccaagccttccccactga

SEQ ID NO: 938961 - DNA, 621 bp, Homo sapiens
taggcagaataatcaccctccccttcaagatgtccatgttctcatccctggaacctgtgaatatgttgcttacattcaaagaggaattaaggttgcagatggaattaaggttgtcaattagctgaccttacaatggggagattatgcttgattatcttgatggtcccggtatagtcacagggatccttaccagtggaatagtgaggcacaggaggagctcagagggatgcgatgtgagagggacttgccttgcctttgtgactttgtagatggaggaagaaggtcacaagccaacaagtgtagacagcctctagaacttggaaggcaaggaaatgtcctacctaraccccacagaaaggaatgcatgcggccttgccggtgccttgattttagcctagtgagacatataccagatttttaactaaaagaggactataaaataataaatctgtatggtttttagccaccaaatttgtggcaatttgctatagcagcaataggaaactaatacaccctgactactttaaagctgttctcctggtctgtcctaaagccctttccaccctttaacttcatggagtcttctatgggcactaaaaaggaggttctgaatgtggccag

SEQ ID NO: 938962 - DNA, 601 bp, Homo sapiens
ttaagctgaacgtgcctagtgcaaggaaactactaagatcagtcttgatataccaaattgaggacattattgtaaaattcatacttacagggcaatttggatacttataaggaccaaaggaaggtataggaaaaggaaaaggaaaaaaaaaagaggaagtaaatgagacctgagaaaaagaaaaggctctatgaggtcatgatgaatagaacaatggctcattattacatatggaaaagagtgaccttgctgagactctgagaggccacctatgccgtaagacaccctccaccaccaatgagctctaggtgctcaaggaagataaacataactgcataagtytcatgaggggtgggaaaaaacaaacagaaaaaccccactgttgtctgggttcaaaacagctttactctgagataatcttataaaattgtacaggaaaagggaaagcagttctctattaactggagagaatgataagccacacacatcccagggctaacagtcaatgatcccaaatgagcacctgtagggggacagaggcccgagaccagcatcactggaagatcccagacctgagctgtaaggagttgctttcgtggtg

SEQ ID NO: 938963 - DNA, 713 bp, Homo sapiens
gtagaattaagagacctgatgcagccagtgttgctagatatgactttgggcaagtcaattttctgagcctgtttccttactcattgccaccgcatccctcagggctactgcaaaagaaatgaaggcaaaagaaaatcttttgcaaatctgaaagcactacacactgttaagtatcacgagggacactcataaaaatgtcctgtttctcagaatacagcagtgaccaccttttggagtcccttaaaatgaagtcagaggattctttctaaactctaaattcaatcattccatttccaggcttcaagattccttactcccaaaggataaacactcaactgtttagcttggtaaataaggtcctgcaaaaattggctccccaactgccctttccatagctttactcttcaaagaccacagcaaatacacagctgctccctgatcacattgtcttccgtgtatctttgcctttacattgactttacattgttggtggagttcctggctatgattatcctgycaaacttaggactccaccaactgctattatagcaccttgcacattataatggagcactgaacttctgtaggagaaagaggataaatgtcttattcttatcagtagcccccatccttagtataaagcccaacctacagcagtcagtaaatgttccctgagtgacaggcaagggagatacttacttgcatacctcaaa

SEQ ID NO: 938964 - DNA, 767 bp, Homo sapiens
aatggttccttcctgaggccaagccagaccttcctgcagatcatgatttggccaagcctttgtacagaggactatgaggtgtttttcctccagaatctgagggtcaaagcagtcccagtgattcagtatacactccagaggagtatagactgggggtggtgaagatagctggttctgaaagacagggaaagacagggaaataggcattcctcatttcccttccttctttcggcaaaaacttggggtgtgagggagrgagaaagcaagcatcccccttttctcttctgttttttgatccctgagacccatcgacctttagacagataccacccacaggtgccactatggcccgcacctgtgaagcagggggtgcctacacaacaggacttgtctgcactcacccacatctccaccccccactactgtcggcagccctcaggttccctgggccttatctatgccatggagcatggcctccttccatgaagcatgggctgagccagcaggaatctgtcctgaccatttacactgtgcccgttgcctcgctttggatccctcagatctggtttttctttctagggcttcagcccaaaacttggaatcgagtttggaacaaaaaggtgtctgagggggtgcatgggtccctttagatggactccccgatgggccctgccaaacttgcagttattagccggtgggggtggctccttggttgtttccccatcataagcggagtgctgaggcaggaaaataaccctcttgcatag

SEQ ID NO: 938965 - DNA, 598 bp, Homo sapiens
aagcactttcttcacaggtggcaggacggagtgagtgcaagcgggggaaacgccagacacttataaaaccatcagatctcatgagactgaatcactatcacaagaacagtatggggaaaaccacccctgtgatccgattgcctccacctgatcctgctcttgacatgtgaggattatggagattacaattcaagatgagattttgggtaggaacacagccagaccrtattaccatcttctccatttcagcctatttgtgtctttggatctaaagtgagtctctagtatatactgtataattggatcatatttttatattaattctgccaatctttgtcttgtgatgtgacagtttaatttactcacattgaaagtaattactgttgagtaggaacttacttatgtcattttgctgttagttttttatataccttacagaattttttcgctcattttcttcattgctatcttcttttgtgtttagttgaatttttgtggtgaaacatttaaatttctttctcatatcctttattgtatattctataactattttctttgtatttaccatggggattatatttaacattttacattataa

SEQ ID NO: 938966 - DNA, 598 bp, Homo sapiens
aagcactttcttcacaggtggcaggacggagtgagtgcaagcgggggaaacgccagacacttataaaaccatcagatctcatgagactgaatcactatcacaagaacagtatggggaaaaccacccctgtgatccgattgcctccacctgatcctgctcttgacatgtgaggattatggagattacaattcaagatgagattttgggtaggaacacagccagaccgtattaccrtcttctccatttcagcctatttgtgtctttggatctaaagtgagtctctagtatatactgtataattggatcatatttttatattaattctgccaatctttgtcttgtgatgtgacagtttaatttactcacattgaaagtaattactgttgagtaggaacttacttatgtcattttgctgttagttttttatataccttacagaattttttcgctcattttcttcattgctatcttcttttgtgtttagttgaatttttgtggtgaaacatttaaatttctttctcatatcctttattgtatattctataactattttctttgtatttaccatggggattatatttaacattttacattataa

SEQ ID NO: 938967 - DNA, 587 bp, Homo sapiens
tgtctccaggacatttcggggaccttcctaacaacccctccaatcacagacctggaggcctagaagggaaaaatggtgccaggctcggtggctcacacctgtaatcccagcactttgggaggtggaagtgggcagatcatgagatcaagagattgagaccatcctggtcaacatggtgaaaccccgtctctactaaaaatacgaaaattagcttggtgtggtggcatgcacctgtagtcccagctactggggagrctgaggcaggagaatcacttgaatccaggaggtggaggttgcagtgagccaagattgcaccactgcactccatcctggtgacaggaaaagactctatctaaaaaaaaaaaaaaaaaaaaaaaaagggaaaaatggcttcatcagccaaacccagggccctgctgctctgtgcaaccttggtacactgctctttgcattccagccactcaagctccagctgtggctaaagggcttagatagagcttggactgtggcttcagagggtgcaagccccaaaccttgttggttttcaagtggtgttgggcctgtgggtgtgcagaagatgggagctg

SEQ ID NO: 938968 - DNA, 590 bp, Homo sapiens
cagctgaagtggctatggggaaggaccccttacgcttgagaaaaggaaagggaagagtaaaggagactttgtcttacagtttaggaaccagctccgtcacagtggcacagtgggatagagcatcatgctggctcttgtggtyctcaattccaggtgttgactcttgcacggcatttctggaccagcactggccagagagaagttcactgccctgaagggagagttctaggctggctgtatccaccacaagttgaacgaagagcccttgggtcttgaaggaacaatggtggtagccaggcagtactcactgcagacttggggcagtggtaaccatgaggagagactcctctgctggtggaaaggagagggaagattcaggaggactttcccttgtggcttgggtgccagcttagctacagtagaatagagaatcaggtagattattaaggtttccaactctaggccctggctccaggacagcatctctaacctgggggggatctttctgccctaacaggaagaacacaaacttggctggctttaccacctgctgattgtagagccctaaggccttgagtgaacacaagtgg

SEQ ID NO: 938969 - DNA, 590 bp, Homo sapiens
cagctgaagtggctatggggaaggaccccttacgcttgagaaaaggaaagggaagagtaaaggagactttgtcttacagtttaggaaccagctccgtcacagtggcacagtgggatagagcatcatgctggctcttgtggttctcaattccaggtgttgactcttgcacggcatttctggaccagcactggccagagrgaagttcactgccctgaagggagagttctaggctggctgtatccaccacaagttgaacgaagagcccttgggtcttgaaggaacaatggtggtagccaggcagtactcactgcagacttggggcagtggtaaccatgaggagagactcctctgctggtggaaaggagagggaagattcaggaggactttcccttgtggcttgggtgccagcttagctacagtagaatagagaatcaggtagattattaaggtttccaactctaggccctggctccaggacagcatctctaacctgggggggatctttctgccctaacaggaagaacacaaacttggctggctttaccacctgctgattgtagagccctaaggccttgagtgaacacaagtgg

SEQ ID NO: 938970 - DNA, 804 bp, Homo sapiens
ccggcagagagctacttctgctcaataaaacttggcttttattcaccaagcccaggtgtgatccgattcttccggtacaccaaagcaagaatccctctgtccttgtgacaaggtagagggtctaattgagctggttaatacaagccacctatagasagcaaactaagaaagcaccctgtaacacaggcccactggggcttcaggagctgtaaacattcacccctagacactgccgtggggtcggagccccccagcctgcctatctgtatgctcccctagaggtttgtgcagtgaggcactgaggaagtgagccatactcccatccacgccctacaaaggggataagggaatctttcctgtttcataagtagcaatctctgtggtaacagcccctgtggtgatgccgtctctctcggttctgccctctctatgctcagaggccctggttgctgattgcatctcatccgaacaccttgtcgggggctgaagcccactgtgcccaggtcttcctaggctgggccaggctgcgttttgacctgaccttgccctgcaaaccattccagcctcagcatagaccctccgctgctcctgcccaggcctcgcctattcccagtaaggctgcctggagcaagttgtttccaaacattgacctgaggttgagcaggagttaaaaccaaactcctgcacccccgtgaatgcccagccctgggacactcacattatttaagcagcattgctgaggatttggttcagctcagtactcccggggtgggttctcaaaacaccagactggggctggacaca

SEQ ID NO: 938971 - DNA, 804 bp, Homo sapiens
ccggcagagagctacttctgctcaataaaacttggcttttattcaccaagcccaggtgtgatccgattcttccggtacaccaaagcaagaatccctctgtccttgtgacaaggtagagggtctaattgagctggttaatacaagccacctatagagagcaaactaagaaagcaccctgtaacacaggcccactggggcttcaggagctgtaaacattcacccctagacactgccgtggggtcggagccccccagcctgcctatctgtatgctcccctagaggtttgtgcagtgaggcactgaggaagygagccatactcccatccacgccctacaaaggggataagggaatctttcctgtttcataagtagcaatctctgtggtaacagcccctgtggtgatgccgtctctctcggttctgccctctctatgctcagaggccctggttgctgattgcatctcatccgaacaccttgtcgggggctgaagcccactgtgcccaggtcttcctaggctgggccaggctgcgttttgacctgaccttgccctgcaaaccattccagcctcagcatagaccctccgctgctcctgcccaggcctcgcctattcccagtaaggctgcctggagcaagttgtttccaaacattgacctgaggttgagcaggagttaaaaccaaactcctgcacccccgtgaatgcccagccctgggacactcacattatttaagcagcattgctgaggatttggttcagctcagtactcccggggtgggttctcaaaacaccagactggggctggacaca

SEQ ID NO: 938972 - DNA, 804 bp, Homo sapiens
ccggcagagagctacttctgctcaataaaacttggcttttattcaccaagcccaggtgtgatccgattcttccggtacaccaaagcaagaatccctctgtccttgtgacaaggtagagggtctaattgagctggttaatacaagccacctatagagagcaaactaagaaagcaccctgtaacacaggcccactggggcttcaggagctgtaaacattcacccctagacactgccgtggggtcggagccccccagcctgcctatctgtatgctcccctagaggtttgtgcagtgaggcactgaggaagtgagccatactcccatccacgccctacaaaggggataagggaatctttcctgtttcataagtagcaatctctgtggtaacagcccctgtggtgatgccgtctctctcggttctgccytctctatgctcagaggccctggttgctgattgcatctcatccgaacaccttgtcgggggctgaagcccactgtgcccaggtcttcctaggctgggccaggctgcgttttgacctgaccttgccctgcaaaccattccagcctcagcatagaccctccgctgctcctgcccaggcctcgcctattcccagtaaggctgcctggagcaagttgtttccaaacattgacctgaggttgagcaggagttaaaaccaaactcctgcacccccgtgaatgcccagccctgggacactcacattatttaagcagcattgctgaggatttggttcagctcagtactcccggggtgggttctcaaaacaccagactggggctggacaca

SEQ ID NO: 938973 - DNA, 838 bp, Homo sapiens
tcaaaaattcatatcggttcagttatctcaactagatattccagcctgtgactcctcaggctgaaatttgtcaaagtcaggagattttaactgttttagagcagctatgaactctactagaatcttcttaaaactccttttttaatgataaaggaaaaaagataaagcccctaatattccatattcccaccagatttaaccactattaacatcttggcatatttggcttccaggtttttttttttttttttgtaagaaaaatcactacattgctttttataaaagtgatatatgtataataatatcaagtacaaaaaaatgtagtaagtagaaaggtaacagtttttaatcacrccaattccacactcagaaattgctattgttaccattaggtgaacatggtctcagacagctccctgtgcataaaaatagaaggcacttagaaacacttccataaaaatgtaatcggccaggctaggtggctcacccctgtaatcccagcactttgggaggccgaggcgggcagatcacaaggtcaggaggagttcgagacaagcctgaccaacatggtgaaaccccatctctactaaaaaaaaaaaaatacaaaaattagccgggcctggtggtgtgcacctgtaatcccagctactcaggaggctgaggcaggagaatcgaccggggaggcggaggttgcagtgagcggagatcgcgccactgcactccagcctgggcgacagagcgagattccgtctcaaaaaaaaaaaaaagtaatcaggctgaaacatcataattattatatagtagcaaatgtattttccttgaatttaataaagtaaaa

SEQ ID NO: 938974 - DNA, 848 bp, Homo sapiens
agtgatatggtttggctgtgtccccacccaaatctcatcttgtagctcccacaattcccatgtgtcgtgagagcgacctggtgggaggtaattgaatcatgggggagggtctttcccatgctgttctcatgataatgaataagtctcatgagatctgatggttttaaaaatgggagtttccctgcacaaactctctctttgcccactgccatccatgtaagatgtgacctgctcctcctttccttctgccgtggttatgaggcctccccaggcaggtggagctgtaagtccattaaacctctttcttttgtatattgcgcagtctcaggcacgactttatcagcagcatgaaaacagastaattcagtgaatgatgctgaggtttggggtagagatgccatcacccaggtagcaagtatagtaccaaacaggtagtttttcaacccatgctccccattctcctcccctccactccccactctagtctgtgtatgctcaatgtttagctcccacttagaagtgagaacatgcagtatttgattttctgttctgcagttattattcttactgacgccaacaccattcgctctttgggcattagcacccccgccccgggttggctttgagctgacctgacttgccccgctgctctggggagcttctttgcttaacagtatcctctttctgagtttttcagatggtggcccagtactttctcacaatcttgttttatctcctctctgcctttaagatttttatagattcatttttgtttgtttggccttggtagaagttaagatacctgatcataggtttatttaacaagtatttgctgagaacctgcttag

SEQ ID NO: 938975 - DNA, 848 bp, Homo sapiens
agtgatatggtttggctgtgtccccacccaaatctcatcttgtagctcccacaattcccatgtgtcgtgagagcgacctggtgggaggtaattgaatcatgggggagggtctttcccatgctgttctcatgataatgaataagtctcatgagatctgatggttttaaaaatgggagtttccctgcacaaactctctctttgcccactgccatccatgtaagatgtgacctgctcctcctttccttctgccgtggttatgaggcctccccaggcaggtggagctgtaagtccattaaacctctttcttttgtatattgcgcagtctcaggcacgactttatcagcagcatgaaaacagactaattcagtgaatgatgctgaggtttggggtagagatgccatcacccaggtagcaagtatagtaccaaacaggtagtttttcaacccatgctccccattctcctcccctccactccccactctagtctgtgtatgctcaatgtttagctcccacttagaagtgagaacatgcagtatttgattttctgttctgcagttattattcttactgacgccaacaycattcgctctttgggcattagcacccccgccccgggttggctttgagctgacctgacttgccccgctgctctggggagcttctttgcttaacagtatcctctttctgagtttttcagatggtggcccagtactttctcacaatcttgttttatctcctctctgcctttaagatttttatagattcatttttgtttgtttggccttggtagaagttaagatacctgatcataggtttatttaacaagtatttgctgagaacctgcttag

SEQ ID NO: 938976 - DNA, 790 bp, Homo sapiens
tattaactagcattttcaatagggcaccctgatgtctggatgaacttcagggcaacaaaatagggggaaggtgagcagttgaagacacctggacactgggcctgaccaaggtggggtggtggggatggcacaggacgatgcagaatgtgagttagtgatggcaggggctatgtcttgctcattgataagtccctgacccatagatggtgatcggtaatggtgcacagccctgtgactcagagtacagacgagcttgggcagtgcctccacacatgggagatgcggggatgggcgcayaggcatgctccactcatggagaaagaaggtggcccagcaattccacccccaagcaaacccaatggaagggaaaacagacatccatataaagacatgtacacaagtgctcacaacagcatgattcatagtagccaaaaagtggagtgactcattgtccataagccagcaggcagataaactaaatgtggtctatccatacagtgcaatactattcagccttagaaaggatgtggtggctcacgtctgtaatcccagcactttgggaggccgaagcgggcagatcacttgaggtcaggagtttgagaccagcctggccagcatggtgaaactccatctctactaaaaatacaaaaaaattagccaggcatagtggcacatacctgtagtcccagctacctgggaggctgaggcaggagaatggcttgaacctgggaggcagaggttgcagtgagccaaaatcgtgccattgcacttcagcctgcacgacagagca

SEQ ID NO: 938977 - DNA, 821 bp, Homo sapiens
gtgtttagaagtttgcaagccgctgcattcagggtcatactaccgctgatggagccgagcatggagaagacgccctatgggcggctgtggcagccacctgccctccagcccctgggaggtggtgtgtgccccgggacttctgtacacacaggagaggagcgtccaggcaagaatggagtcactgcttggggtgcagacactcagagggtgagggaaatggtgatgtttgtgtatgtgtttgtgtgtgtatgtcagggctgtgctttttggaggaaaacaatgaaggacacacacaggagacagtgaccaacacagtagagcagtaaagcaggcagagccagaagaggccgaccctgtaagagcagcagagacctctcactgaaaacatcctgtcctaatttccgcacccagaaaacctgccaagagccackcagatatttccaagttcctgggagttgcctagagagtgagagcagccccgtgcacccatgatccccacccgggcatctgtggaaggcacaggagccacccacaacccgcctcagcagcgcagcaccaggaaacggagggaacgcctcccgcagggggaggctctgccccacaccagcactttctggctgggcacctccagcaggttgcatcactcctcggagccatgggttctcatctctaattggagtaattataaatgggttgttgtgaaagagcgttgcaaatgttgcaaagcacaatagtcttggagttgttattattattatcaatcctaataacagccttgccaggcaggcagggcacgtagtcattcgcattttaaaacaagg

SEQ ID NO: 938978 - DNA, 831 bp, Homo sapiens
aaatggcccaaacagcactctgtaaaatggaccaatcagcactctgtaaaatggaccaatcagtgggactctaaaagtaaccactcgtgggggattgggaaaagggcattctgataggacagaaacaggacatgggaggggacaaataaaggaataaaagctggccaccccagccagcagtgacaacccgctcaggtccccttctccgctgtgtgacgtttgttcttttgctctttacaataaatcttgctccagctggctctttggttccgtgccatctttaagcactgtaacactcaccgggaaggtccgtggctccattttgaagtcagcgaggccaggaaccctccacgaacccactggcaggaactaaccctggacacaactggagaggctgaggcacgagaatcacttgaacccaggaggcagaggttgcagtgagctgagatggtgccactgcactccagcctgggtaacagaacgttacactctctccaaaaaaaaaaaggcgggggccaaaggcccgaagataacaaccctagaagctgcaatgccacacagaggtaaggatgcaggcctggagttggatctggacttcagccgtgtttttgctgtttattggccttatgacttggtttccttgtgagtaaaatgggtacaataaggatggytgcaaggaataaaggacagaaggctcagaaagtacttgttataatgcctgtgctattatagggagccaagaagtatttgttttctcccccattaagaaaaaatggcacaaaataaaaacgtcacaatgtcataaaccaaaacttcccaaggttaaaaata

SEQ ID NO: 938979 - DNA, 832 bp, Homo sapiens
ttctaggttgtaggaattcacctctattaggcttttcctctctctttttggattgacaactgagacatcacctactttaggaaacaccccctgacagcccttgtcacccaccaggctcagcccagggccattcccgggtgctcctaggacaccctgtgcatggctctgtggttgcacttgcagctttaaattatgcttttctcttcatgtrtgcatcttccccaccagactgtgaacttgtcatggtcaaggtcgacacaattccgtagcctcagacgcctacatagtccttgctctaaacacatatattgaataagggaactgtggcaaaatcagcagtattcacctctttgaagacaaaatggtgacaacagagtgtggagggagcctaggcactggtcttatgttcctccccgtcaccatgcagggccaagcttcttcccacagaaccacacgctccctcccctaggctgtcatggctcagcagtgcccaccacgcccctgctcaaccaccaggctaccaagcaacttcctggtcatggttgggtcctactctcctgcctacccatcttcttcatcccaggaaacggcaattctccctccatccacagaagagttgtccttgacgtttacctttctctcatccccaacatgctgtctgcccatcctgttggctttacctccaagacagctccagaatctggctgctgctcccctcctccttgccacaccctcctccagacctctgctgccatccctgaccaagacagtggcaagaaagcctggactccctgcttccaccccagcctccggacagtcctttttccaccca

SEQ ID NO: 938980 - DNA, 832 bp, Homo sapiens
ttctaggttgtaggaattcacctctattaggcttttcctctctctttttggattgacaactgagacatcacctactttaggaaacaccccctgacagcccttgtcacccaccaggctcagcccagggccattcccgggtgctcctaggacaccctgtgcatggctctgtggttgcacttgcagctttaaattatgcttttctcttcatgtatgcatcttccccaccagactgtgaacttgtcatggtcaaggtcgacacaattccgtagcctcagacgcctacatagtccttgctctaaacacatatattgaataagggaactgtggcaaaatcagcagtattcacctctttgaagacaaaatggtgacaacagagtgtggagggagcctaggcactggtcttatgttcctccccgtcaccatgcagggccaagcttctkcccacagaaccacacgctccctcccctaggctgtcatggctcagcagtgcccaccacgcccctgctcaaccaccaggctaccaagcaacttcctggtcatggttgggtcctactctcctgcctacccatcttcttcatcccaggaaacggcaattctccctccatccacagaagagttgtccttgacgtttacctttctctcatccccaacatgctgtctgcccatcctgttggctttacctccaagacagctccagaatctggctgctgctcccctcctccttgccacaccctcctccagacctctgctgccatccctgaccaagacagtggcaagaaagcctggactccctgcttccaccccagcctccggacagtcctttttccaccca

SEQ ID NO: 938981 - DNA, 832 bp, Homo sapiens
ttctaggttgtaggaattcacctctattaggcttttcctctctctttttggattgacaactgagacatcacctactttaggaaacaccccctgacagcccttgtcacccaccaggctcagcccagggccattcccgggtgctcctaggacaccctgtgcatggctctgtggttgcacttgcagctttaaattatgcttttctcttcatgtatgcatcttccccaccagactgtgaacttgtcatggtcaaggtcgacacaattccgtagcctcagacgcctacatagtccttgctctaaacacatatattgaataagggaactgtggcaaaatcagcagtattcacctctttgaagacaaaatggtgacaacagagtgtggagggagcctaggcactggtcttatgttcctccccgtcaccatgcagggccaagcttcttcccacagaaccacacgctccctcccctaggctgtcatggctcagcagtgcccaccacgcccctgctcaaccaccaggctaccaagcaacttcctggtcayggttgggtcctactctcctgcctacccatcttcttcatcccaggaaacggcaattctccctccatccacagaagagttgtccttgacgtttacctttctctcatccccaacatgctgtctgcccatcctgttggctttacctccaagacagctccagaatctggctgctgctcccctcctccttgccacaccctcctccagacctctgctgccatccctgaccaagacagtggcaagaaagcctggactccctgcttccaccccagcctccggacagtcctttttccaccca

SEQ ID NO: 938982 - DNA, 839 bp, Homo sapiens
gacaggctttgacaaacactacaggctctccctgaaaaactagcaggaccacaccttaggagtaagaaccacatcccaagactaaaggctatgacccaggatcatgacaaacccaaagaacaaaccctaaatccaagctttcacaagagctacagaacctgccagcaatgtaagtgcctgccggaacaaaacagcacattgtaaaggaaggtaatgtaattcagtctccacaacaaatccacggttcccaaaacaataataactttctaaaaagacactagacaagcacaaaaacagaaaatgtgacccataatcaggataaaagaaacagacctgtagatcacctagatgttgaatttagcagacgagcaatttaaagcagctattataaatatgtcagcagctatttattataaatatgtcaggtggccgggctcggtggctcatgcctgtaatcccagcactttggaaggccaaggtgggcagatcacctgaggtcaggagtttgagaccagcctggccaacatggtaaaaccccatctctactaaaaatacaagaattggccgggcgtggtggcacccacctgtagttccagctactcaggaggctgaggcaggagaatcrcttgaacctgggaggcagaggttgcagtgagccaagatcgtgccattgcactccagcctgggcaacagagagagactctgtctcaatcaatcaatccatcaataagtaaggggggttacaaagaagagtgaaaagaagggcaaagacagagaatcttagcagagaaatagaaacattaaaaaggaaacagatggaaattctagaaatgaaaaat

SEQ ID NO: 938983 - DNA, 788 bp, Homo sapiens
gtacatgcttcctgtaatcccaaatagcaggtgccaacctgttttcttgggttggaaatattagcccctgaagccagttgtgtgtggtcatggttatgagcgtgatttctgcagttggatgcaccacatccatattcagtgctgcagggatcaccatctatgcatggaagagactgggtacctggtggcacttggataataagcacacatgctatagagacagcagcaagtgcatttcaaagcacttttgtatctattatttaaaaagtggtggacttgtttgttgcatatatgctgaggaatgtttacatgtacatttcaaacccagttttctaattgtgcagtcttaatttcctagttaatttcactttacagataagaagctctggagacatggcctttccggttaaagacacrgagcccaggcactgcccacggcttcctccacactcatgctgctttcccttaggtaagacaaacctcaccaaagctgagactggctcaagaaacggggaagcctaatgcttgtaaacattcccttaattggaagcattaggcaccaaaattcttcctaaaaaatatgtaagccccaagaatgaaagggccatggttagcacaaaccgcacctcctgagcccagcaaaacccaacaggcacagtgcagcacagcctgggcggtctctcaggtgagtctctgcctcgctcttgccctgtctgtcacctcatctctgccaagtctgaaaatcctgagctccagggactgtgggaacttcactagacatgtgtgaa

SEQ ID NO: 938984 - DNA, 861 bp, Homo sapiens
cacctctctatctcctgattcagtcaagggacagctaatcctaaaggatgaatttggctgggcatggtggctcatgcgtgtaatcccagcactttgggaggctgaggtgggaggatcacctgaggtcaagagtttgagaccagccttgtcaacgtggtgaaaccctgtctctactaaaaatacaaaaaaaattagctgggtgtggtggcaggtgcctgtaatctcagctactcgggaggtggaggcaggagaattgtttgaatctgggaggcagaggtttgcagggaacctagatcgcaccattgcactccaacctgggtgacaagcaaaactccatctcaaaaaaataaaagggataaatttattactcaagctgcccgatatcaggaggaagttgcagaaaggggccctgggtccagaaagtacattagaggacctcctgaaaatggccaccttggtcttttatgattgagacagggaggcctgggaaagagagaggagatacaggtattccagggtgcacctgttaacttctaaagatatggcaagaacagttctctctcttctaaagtttatctgcccccrtacaaggtttaatttctttcaccagggtgaaacagcttggagtacaatgttgttgttagtatatttcacttatctctgttggcactaaattctttccttgtataatacacatgtttaacttatgcatacttgaccttataaaacttgtttttttctctcatgcctagaagccatcaaactccaaatggtcaggcaactggagcctcagatgatagctcccctttgctaggaacccttaaatagacctctgggaggactctgactgccattttctcc

SEQ ID NO: 938985 - DNA, 746 bp, Homo sapiens
aactgatgcccatctacatgggccaaaaaatagagacctctctatacacatcagtagtgttaccaaatcagagaacaggcaagccatatagctgtctgtattgtactgagtgaaggagttccaaactgaagccactcccacagagagtaatgtgaaaggaaaataaatctcaggacccccaaaccactaagctaagagaaaagtcaagctgaaaactatttcaggcaaacttgcctcacattttattcctaaataagatagctataacgataagaagctacatactttcctcwctatttggccataggaaattccttctagacataggacagacagaactctaagtcattcctctgaggctcacctgagacaaattcatatctgattgcttcctctgccctgttgtttatgtaaaaatccagatttactgagccaggctaaattgtgtattcagtggaaggctgaacaaggactcagaagaatgcaaccttttgtcttctaacccggaagccctcacttcgagttgtcccgccttactggactgaaccaatgtacatcttgcacatattgattgatgtctcatgtctccctaaaatgtgtaaaagtaaactgtactctcgaccaccttgggcacacgtcatcaggacttccctgaggaagtgtcatgggtgtgtccttaaccttggcaaaatcaactttctaaattgaccgagacctgtctcacatattttggcttaacagtaaca

SEQ ID NO: 938986 - DNA, 587 bp, Homo sapiens
actgggggcagggacacatgacctattgagatgccaggtagggtggctaagagagtgctggaatcgcccctcttctgaccccaggctacacatctcatggctccaaaagagactgcttccttctatttgaagacaggagaggaaagagtggggaggactttatctgcatcttgaataccagctcagccacagcaggatagggtaccaatcacagttgttaggctccctttccaggacctcaatcccagataacatttctagacaccctgggtctgaagggagccctctgacatgaagaaaaagatgcagttttaccagcatttgtcacttgctaactgaagagcccttggaccctgaataaccagcagtaatatccaggtactacatcaaagaccttgggtgagactcagatttggaggcttcaggtgagacttagcatattcccarctgaggtggatacaaggtgagagactccttccacttgagaaaaatggaaggaaaagtaaagggcacattgtcttgcactttagagatcagcttaaacacagaagggtagaggatcaagtgggctattggggtctccagtt

SEQ ID NO: 938987 - DNA, 776 bp, Homo sapiens
gtcagggtggacttctggctctggcctccagcaacctgggttcaaattctgcctctaccacttggcactgtggcttcttgcagctatttgaacctctgtgagccccattcttcttgtctgcaaactgtagataataatcatgactaccttacaggagaagtaaattggttcagagaacacacttaactacagtgccaagcatggaagtaagctctcaataagaattattgattattaaaactacattcttggccaagtgcaatgactcacgcatgtaatcccagtactctaggaggccgaggcgagcggatcacttgaggccaggagttccagaccagcctggccaacagggtcaaatcccatccctactaaaaatacaaaaattagctgsgcatggtggcacatatgcctgtatgtgccagctactcgggaggctgaggtggaagaattgcttgaacttgagaggtggacgttgcagtgagctgagatcgtgccactgcactccagcctggacaacagagcaagactccatctcaaaataaataaatacataaataaattcataaataaataaatgaaagaaataaaattatattcttgttttagttataacaacattttatatgtctctcaagccaaagtctaatagcattacaagttgtttttgcacatgtatcatctccctttaaaggacagatagtttcttgggattattcttatttttgtcctttatgaagcctaacccagcactttcagcacagcaggccttcaataaa

SEQ ID NO: 938988 - DNA, 587 bp, Homo sapiens
agtaaaagtaaatatcaaaaaggagccgggaaataaataaaagagagaggtggaatgaaaaggaatgcatttggcaaagaacacattaaaaatggacggcgtggggaagacactaacgaggatgttgcccacagaggagccctgcagggcctcgctgcacctggaattgctgcgcagaactcggcgccctccagggtgctgcggaggatcagcgttctggccgggggctgctcatctctgggcgatgtgcctcaagtgcgtccacatttgcacccttgttacacagcagagggggtgcagygtgttgcttccacaacccttccagctggcagggcatctccatgggatggtggggccacacaatacgatagattcatattccaagtgggctgactcatcattaaagggcaccatgtggctgtaatcccagctttttggctgaggcgggcagatcacttaagatcaggagttcaagaccagcctggccaacatggtgaaaatccgtttctactaaaaatacaaaaattagccaggtgggtggcatatacctgtaatcccagctactggggaggctgaggcaggagaat

SEQ ID NO: 938989 - DNA, 587 bp, Homo sapiens
agtaaaagtaaatatcaaaaaggagccgggaaataaataaaagagagaggtggaatgaaaaggaatgcatttggcaaagaacacattaaaaatggacggcgtggggaagacactaacgaggatgttgcccacagaggagccctgcagggcctcgctgcacctggaattgctgcgcagaactcggcgccctccagggtgctgcggaggatcagcgttctggccgggggctgctcatctctgggcgatgtgcctcaagtgcgtccacatttgcacccttgttacacagcagagggggtgcagcgtgttgcttccacarcccttccagctggcagggcatctccatgggatggtggggccacacaatacgatagattcatattccaagtgggctgactcatcattaaagggcaccatgtggctgtaatcccagctttttggctgaggcgggcagatcacttaagatcaggagttcaagaccagcctggccaacatggtgaaaatccgtttctactaaaaatacaaaaattagccaggtgggtggcatatacctgtaatcccagctactggggaggctgaggcaggagaat

SEQ ID NO: 938990 - DNA, 847 bp, Homo sapiens
tcatttagcaatctcacttctgggtatttatccaaaagaattgaaagcagaatctcaaagagacaattgcactctcctgtttgttgccacattattcacaagagccaagaggtggaaacaacctaactatccattaatgaatgagtggataaagaaaatgtggtatatacatacaatggaatacaattcagtcacatataaggacttcctgtcatatgccacaacatgtatgaaccttgagaacattatgcaaaatatgtaagtcacagcagaaaaaatactgcatgatttcgtttacatgaggtatcttaagtagtcagtgtcattgaagcagaaagtagcatrgtggttgccaaagactgggggaggggaaaattgatatgtttcagtagtgcaagattaaaaattttctagagctctcctgtactacattgtacttatagctcacaatactgtactgtacacataaaaatataagaggggggagctcattttatgtgctatttactaccagcacaacaaaaaaatgcaattattttatccttcagttttatctattcagttaccagtgctttttatttttcagtgtggattgagttactgtttcatgctcagtgtggattgagttacatgtttcagcttgaaggattccctatagtgtttcttataaggtgaacctgctagtgataaattatctcagcttttatatatctaggaatgcttaatttcttcttcatcatttttgaaagacagtttttctggatatagaatttttggttaattctttctttccttcagcactttgaatatgtcatcccattgccatatggcttctatggcttctgat

SEQ ID NO: 938991 - DNA, 639 bp, Homo sapiens
ctcattgcggcccttcttgccaatccaaagtctcctttgcgtcctcctcttgtatcccccaccttaacccacaagtgtaagatacctctattccctccttggcgaccgatcatgcacccctcaccatctcattaaaacctaatcgcccgtaccccggtcaatgccaatatcccatcccacagcatgtctttgaaaggattaaagcctggtatcactcgcctgctacagcatggccttttaaagcctataaactctgacagttcccccattttacctgtcctaaaacccgacgagccttactagttagttcaggatctgcgccttatcaaccaaattgttttgcctatccaccccatggtggcaaacccatatactctgctatcctcaatacctctctccacaatccattattctgttctggatctcaaacatgytttctttactattcctttgcacccgtcatcccagcctctcttcaccttcacttggactgaccctgacacccatcaggctcagcaaattacctgggctgtactgccgcaaggcttcacagacagaccccattacttcagtcaagcccaaatttcatcctcatctgttacctatcttggcataattctcgtaaaaacacatgtgctc

SEQ ID NO: 938992 - DNA, 540 bp, Homo sapiens
gaaatatcattgaaacatacagattgctgtcactttatatttacaatcagcaatctcaactaagccctcaacagtgtccactaatcttattatatgtctacagtagtatagtacattttctaccctttcatactttttgcaatttcctcaaaattcccactacctattatctctctctctctctctctctctctctctctctctctctctctctcagacaaaatctcrttttattacccaggccagagtgcagtggtgctatcacggctcactgcagccttaacctcccaggctcaagtgatcctcccaccttagcctcctgagtagctgagactacaagcacacaccatcactcctggctaatttggttttttatatattttttttagagacagggcccctctatgttgcctgggctggtctcaaactcatgagctcaagtgatcctctcgccttggcctaccaaagtgctggggttacaggcgtgagccaccacacccagcccaccacccattctcaagtaatgatttgtctccaatt

SEQ ID NO: 938993 - DNA, 712 bp, Homo sapiens
gttggaggagagagaggaaattgtgtaaatgttattttgaagagtcagagagtaaacagaacattcaaggaaagccaggaagtgtcaagtgctgatttgaaaattaggagaatagttagtttactggtattagctattccaaccccattcaggtgctcaaagtgggcaagtagttggctttcataatggtagggtttttgttttcactttagttttatttttgttagtttgtttgttttgccaagtaaacactatgaaggaagacaggaaggcaagacagttaacttaaactcctaatttcccaggggttaattacagtgacagaacatagcgtcracaccttcaacatgggaaatctcgtgctctaaaccaagcaggggggacatttgcaaaaaaacagaaaggaaataaaaagcattattcagattttcaaaggaatgtgcttttaagtaaatctaagctggatgaagagagaatgagactggaaagcttgataatgaaatgctgaataatgaaaagtggtggggttagtagatggggatccccatgaaatagaagaactggtagggggctgggcacagtggctcatgcctgtaatcccagcactttgggaggcccagtgggaggattgcttcaccctgggagtttgagaccaggctgggcaacatagtgagaccctatctctatgaaaaatttaaaaattagtcataca

SEQ ID NO: 938994 - DNA, 535 bp, Homo sapiens
ccagacgcagctccagtacatttttaaaagctctcctctggagcttgaagacaggtttagagatgtgtctgtctttggggtcttgtggggattctcatctgcgcacgctgactcctaacatagcaggctctgccttgctggcggactcgtccctccaccggcygcctgtgcgggcctccccgcgtcctgcctctgctggggaccgctgacccctttcaaaactgacccaggctgcctgcacccctgcctcccccaaaaactccccgccaagaggcttccctctctcctgtttctcggtcacttgttttgtctgatgttaagcccttcccccagatgtttgtgggcctggacatcaatacaccaaaaatagtcagcaccaagatcccaggcgagatgcgtcccgcactcagtggcagcagccctggggcggtggggttctcaccggcccacccccgggcctggtctggggtctctgttcctggctaagcaggcctgactggcatcgccggcctcccagtctctctccagcacactt

SEQ ID NO: 938995 - DNA, 622 bp, Homo sapiens
atagtgctgctatgggccttatattatgaggtttttggtaaacacaatccacatttctggtaagtgcatacttggtagtgaaacactgggacataatttatgtttaggtgtaatggataaaattagacaattttccaaatggattataacacttgacatcacttgacatttctatcagcagtgtccaagttgctccataccctcagagatacttggtaattttaatccttgtaattttagcttttctggtaacacaaagcaataattctccgtggttataatatgaattttcctgatgactaattgaaatgtgagagatccctgattccccttgaaggacatgcaacaggtgtgcggcttgccagttaggtcgccctgcagctcaaaccccttacggggagggggagcacacagatgcacmggtgcgggaaccggagtgagcgctttcgggctctggcctcacagcagcatctaggggtgggtgtctgcgatttccgaagcccaagtgggcgtatgttacagtgtgctcctttagctttgccatctgcaaatggtttatgtgttaatcagctcaacaaaccctcttccttatctcatgggtagtgggacagtgaaatagccc

SEQ ID NO: 938996 - DNA, 614 bp, Homo sapiens
tgtccgcgccacctactgtcctgaatgttgaactgcacagcccagtgcaaaatgctgacactagggcatgatgcagaacaaggttagttttctgcgtagtcctccataccagcccttcaggaggcagtaagcctcgtcatacacccagtacataactactacaaccagcaattaagaaagccatcatacaaaagttatctctaaccaakgtactcaaacagagtctttaccactgaaagaacccagaacctaaaccaaatagccctatacaacatacatcgtagtcatattctcaaaggggaaaaaaaaatcctgtctgttggaaactggacttaaaaataagaagggatagttcatctggatgagaagaaaccactgaaacatttctggaagtatgatttaaaacagcgtattacaacactcgcaaaggatcacactaactcttcagcaataagtcctaaccaaaataaaatctttgaaataccaaagaatttaaaatatttattttaaagtagctaaatggagtccaagagaaagttgaaaagcaacacaaagaaattagaaaaaaaactcaggatatgaatgaaaaatgtactaaaaatattttttaaaaa

SEQ ID NO: 938997 - DNA, 614 bp, Homo sapiens
tgtccgcgccacctactgtcctgaatgttgaactgcacagcccagtgcaaaatgctgacactagggcatgatgcagaacaaggttagttttctgcgtagtcctccataccagcccttcaggaggcagtaagcctcgtcatacacccagtacataactactacaaccagcaattaagaaagccatcatacaaaagttatctctaaccaatgtactcaaacagagtctttaccactgaaagaacccagaacctaaaccaaatagccctatacaacatacatcgtagtcatattctcaaagggraaaaaaaaatcctgtctgttggaaactggacttaaaaataagaagggatagttcatctggatgagaagaaaccactgaaacatttctggaagtatgatttaaaacagcgtattacaacactcgcaaaggatcacactaactcttcagcaataagtcctaaccaaaataaaatctttgaaataccaaagaatttaaaatatttattttaaagtagctaaatggagtccaagagaaagttgaaaagcaacacaaagaaattagaaaaaaaactcaggatatgaatgaaaaatgtactaaaaatattttttaaaaa

SEQ ID NO: 938998 - DNA, 628 bp, Homo sapiens
agtggggtcttggagaacttttctgtctagctagaggattgtaaatgcaccaatcagcactctgtaaaaacgcaccaatcagcgctctgtgtctagctaaaggattgtaaaggcaccaatcagcactctgtaaaaatgcaccaatcagcgctctgtgtctagctaaaggattrtaaatgcaccaatcagcactcttaagagctgtaacactcaccgcgaaggtccacagcttcattcttgaagtcagtgagaccaagaacccaccagaaggaaccaactccggacacataagtacttttattatagacacatattatgctgtattgcaataaaaaatgtattttttgaacatcctagtctacctatcttcagaaggcaaaagcacctctggtgtccctgttgtggtatctcctagcctacctctctataaaagttttgcaattaagtatatttgtgttttatacatccttgggcttctcatagtttaaggtcctaactggagttcagtctttctcagagccgtctcatggtatcctcactgatgaatgaatgctgaatagaaagagccctgcttgcatatatgcaggtagtatggtggaggggaaatctagaagtcatttctgagctc

SEQ ID NO: 938999 - DNA, 628 bp, Homo sapiens
agtggggtcttggagaacttttctgtctagctagaggattgtaaatgcaccaatcagcactctgtaaaaacgcaccaatcagcgctctgtgtctagctaaaggattgtaaaggcaccaatcagcactctgtaaaaatgcaccaatcagcgctctgtgtctagctaaaggattataaatgcaccartcagcactcttaagagctgtaacactcaccgcgaaggtccacagcttcattcttgaagtcagtgagaccaagaacccaccagaaggaaccaactccggacacataagtacttttattatagacacatattatgctgtattgcaataaaaaatgtattttttgaacatcctagtctacctatcttcagaaggcaaaagcacctctggtgtccctgttgtggtatctcctagcctacctctctataaaagttttgcaattaagtatatttgtgttttatacatccttgggcttctcatagtttaaggtcctaactggagttcagtctttctcagagccgtctcatggtatcctcactgatgaatgaatgctgaatagaaagagccctgcttgcatatatgcaggtagtatggtggaggggaaatctagaagtcatttctgagctc

SEQ ID NO: 939000 - DNA, 648 bp, Homo sapiens
ataacagacttgagcgtgaatctcagcttcaccattttttaactgtatggccttaggcaatataattaaccttcatgaacctcaggcatctcagctataaatgaaaagtatgagctaagtgtctaagagtgcttgggctctcaggttctatgattctttgtgagtcacagactccccttgctggctgggaccctctttggggtcttagatggcaaatctctgcagtcaagtcatgcttctcaagtcagactggaattctcttctcccagcatcacgtggcaggctgttgccagatctttcatgagcataatcacacaacaggcatcctccagcccccattaatcagcctgtcctgtggctttaattcakcagcactccaccatccacctaagtaatcactctggcttctgccagtgaattcttttcatccacttttgtttatcactgttgaagcattttttaatcaaaacaattaaatttgctaaatcttcccccaattagtaatgcattaaaaattaaaagtgtttgaatggaaatggcagaagaagccctttgctcagtgctgagtgccggtgctcagagcatcactttccccaagcactttcagctcaggagtgactcagaaactgatatccaaagaggcacaga

SEQ ID NO: 939001 - DNA, 609 bp, Homo sapiens
ttaggtaagatactgaactcggtgcgcatgtgtttcctcatccataatggaaggattgttggactgtggagagaactgcacaggtacttgatataaagcacttagacctgtgcacgccctacagcaagcagggtctaagtgctagctcttattcctgccaggtctctcacttctgctcatatgcctgtctcatctcgatcttcccaactctgtagtttctcacaataagcaattctatagctcttatctcaggcaatgtctgctttatcccttaaaagccagctctctttgatgctctccctcactcctcttggaaaagctagttattctttccttcgtagcaaaatagcattctgtacctgtattttgacatgaagcatttattttaatcatccatgtacatgcgcttccctaccagagcaaggactcttcaakgtcagggcatgcctatgataagcaaatccgccagtaagtgaacagatttcttaaagggttttctttagcctgcattgcgttatctttatgccatcaccaaagattagaagaaatcaaagcacagaccagaacacagaagtgaacttccagcaggacctgcagcatgggtggacc

SEQ ID NO: 939002 - DNA, 609 bp, Homo sapiens
ttaggtaagatactgaactcggtgcgcatgtgtttcctcatccataatggaaggattgttggactgtggagagaactgcacaggtacttgatataaagcacttagacctgtgcacgccctacagcaagcagggtctaagtgctagctcttattcctgccaggtctctcacttctgctcatatgcctgtctcatctcgatcttcccaactctgtagtttctcacaataagcaattctatagctcttatctcaggcaatgtctgctttatcccttaaaagccagctctctttgatgctctccctcactcctcttggaaaagctagttattctttccttcgtagcaaaatagcattctgtacctgtattttgacatgaagcatttattttaatcatccatgtacatgcgcttccctaccagagcaaggactcttcaagktcagggcatgcctatgataagcaaatccgccagtaagtgaacagatttcttaaagggttttctttagcctgcattgcgttatctttatgccatcaccaaagattagaagaaatcaaagcacagaccagaacacagaagtgaacttccagcaggacctgcagcatgggtggacc

SEQ ID NO: 939003 - DNA, 609 bp, Homo sapiens
ttaggtaagatactgaactcggtgcgcatgtgtttcctcatccataatggaaggattgttggactgtggagagaactgcacaggtacttgatataaagcacttagacctgtgcacgccctacagcaagcagggtctaagtgctagctcttattcctgccaggtctctcacttctgctcatatgcctgtctcatctcgatcttcccaactctgtagtttctcacaataagcaattctatagctcttatctcaggcaatgtctgctttatcccttaaaagccagctctctttgatgctctccctcactcctcttggaaaagctagttattctttccttcgtagcaaaatagcattctgtacctgtattttgacatgaagcatttattttaatcatccatgtacatgcgcttccctaccagagcaaggactcttcaaggtcagggcatgcctakgataagcaaatccgccagtaagtgaacagatttcttaaagggttttctttagcctgcattgcgttatctttatgccatcaccaaagattagaagaaatcaaagcacagaccagaacacagaagtgaacttccagcaggacctgcagcatgggtggacc

SEQ ID NO: 939004 - DNA, 638 bp, Homo sapiens
aacagattctgccctgttgattattataccaccattttgtaattatttggacttcattctttcttttttttttttgagacggagtctcactctgtcacccaggctggagtgcagtggcatgatctcagctcactgcaagctccgcctctcagattcacgccattctcctgcctmagcctcccgagtagctgggactacaggcgcccaccaccacacctggctaatttttgtatttttagtagagacggggtttcaccttgttagccaggatggtctccatctcctgacctcgtgatcctcccgcctcagcctcccaaagtgctgggattacaggcatgagccactgtgcccggcctattctttctttatttttgggacagggtctcactctgttgcctgggctggagtgcagtggtgcagtcttggctccctgcaacctctgcctctcagattcaagggattcttgtgcctcagcctcccaagtagctgggattacagaaacacaccaccatgacccactaattttttgtagagacagaatctcactatcttgctagggctgatctcaaactcctggggtcaagcgatcctctcacctgggtgttccaaagtgctgggattacaggcatgagccacca

SEQ ID NO: 939005 - DNA, 638 bp, Homo sapiens
aacagattctgccctgttgattattataccaccattttgtaattatttggacttcattctttcttttttttttttgagacggagtctcactctgtcacccaggctggagtgcagtggcatgatctcagctcactgcaagctccgcctctcagattcacgccattctcctgcctcagcctcccgagtagctgggactacaggcgcccaccaccacrcctggctaatttttgtatttttagtagagacggggtttcaccttgttagccaggatggtctccatctcctgacctcgtgatcctcccgcctcagcctcccaaagtgctgggattacaggcatgagccactgtgcccggcctattctttctttatttttgggacagggtctcactctgttgcctgggctggagtgcagtggtgcagtcttggctccctgcaacctctgcctctcagattcaagggattcttgtgcctcagcctcccaagtagctgggattacagaaacacaccaccatgacccactaattttttgtagagacagaatctcactatcttgctagggctgatctcaaactcctggggtcaagcgatcctctcacctgggtgttccaaagtgctgggattacaggcatgagccacca

SEQ ID NO: 939006 - DNA, 638 bp, Homo sapiens
aacagattctgccctgttgattattataccaccattttgtaattatttggacttcattctttcttttttttttttgagacggagtctcactctgtcacccaggctggagtgcagtggcatgatctcagctcactgcaagctccgcctctcagattcacgccattctcctgcctcagcctcccgagtagctgggactacaggcgcccaccaccacacctggctaatttttgtatttttagtagagacggggtttcaccttgttagccaggatggtctccatctcctgacctcgtgatcctcccgcctcrgcctcccaaagtgctgggattacaggcatgagccactgtgcccggcctattctttctttatttttgggacagggtctcactctgttgcctgggctggagtgcagtggtgcagtcttggctccctgcaacctctgcctctcagattcaagggattcttgtgcctcagcctcccaagtagctgggattacagaaacacaccaccatgacccactaattttttgtagagacagaatctcactatcttgctagggctgatctcaaactcctggggtcaagcgatcctctcacctgggtgttccaaagtgctgggattacaggcatgagccacca

SEQ ID NO: 939007 - DNA, 576 bp, Homo sapiens
tagtctataaaaaacctatgaggtccatttggtctatagtgcagattaaattcaatgtttctttgttgatgttctgtatggatgatctgtccaatgctgaaagaaagatgttgatgactccagctattactgtattatggtgtatctctccttttagttctattaatattttgtttacatatctgggtgctccagtgttgggggtatatatatttaaaactattttatcctcttgttgaatttacctttttgtcattatagtgaccttccttgtctctttttgtagtttttgtctgaaatckctttttttctgatgtaagtatagctacatcttttcttttttggtttccatttgcattgaatatttttttccatccccttacttttagtctatgcatttccttataaattgttggttcttttttaacttatttattcaaccactctatgtttttttattggagaggttagtccatgtaccttcagtgttattattgataagacttacttctgccattttgtttgttttctggttgttttgtggtctactattacttctttccttccttcctgtct

SEQ ID NO: 939008 - DNA, 759 bp, Homo sapiens
atgcattacacagagctggtgggggccaggaacaggcaggatccttatcctttactgagttgatggggtgggagccccatgatcctgggcacagctacagatgcccagcagtgggtctggactcgggcatccctgtgccattgggggcctgggaagccccctgtctctgcaggcttgaagtgcctgctcctgctccctggcctctcttggctttcagagcctgctccagtgcagagcaaagttgtggctgagcccagacactgycatgacctggccacgtgtgcgcaagctcagagtgatgctggcatgccagctccctgctgccttggtcccctccagactttgattactgacaagcatgggagggaggccagtgggctgagggcggctcagcatgagcctgcaggtgcccctcaatgcaaacagcctgggcaccatagatgacatgttgatgatggcaggaggcaggcaggttcctaggcaggaagagatgggtcccttgtgaaatcccaccttcaagcagggatggccagaagccttggggccaggctgccagtactgggtggagtccacaaccaggagcgagaacttatggtgctttttccaggctaagccatggttgcccatggaccaatcagcatgcacttcctcccttctgagccaagaaaaatcctggactcagccagactcagacactcttaggacaacctgcctgctgaaaggagccacagacttcaggtctcctctacactcgttggg

SEQ ID NO: 939009 - DNA, 579 bp, Homo sapiens
ccatgcttatgaggataccaaggacagggaaagaaccatcagaaaggagcgggcgaaacaatccctagagttcacacagggccaggaacagttcacattctcaccagccagtgggaaaaaccttgcagttcactgggyattgggcacttctcagccttcctatagtattcagaagggtattgcctcagtagtgggcctagactaaaagccattatgatcctaccaaacaaaaaagcaagcctggaggatcaaacaattgctaagtgatttaactgcatcccagcacaaagctcaagagtagagacacatcccatttcattacatgttgctttattgtgcatcacagatactgcatgtttttacaaatcgaaggtttgtggcaatgctgcattgaacaagtctgttagtaccattttttccaacagcatgtgctcactttatgtctgtgtcaaattttgataacactttgcaatatttctaactttttcattatatctattacagtgatctgtaatcagtgatttttgatgttactattgtaattgttttggggtgccacaaactatgcccatataagct

SEQ ID NO: 939010 - DNA, 647 bp, Homo sapiens
ggtggcacgcacctgtaatttcagctactcgggaggctgaggcgggagaattgcttgaacccaggaggcagaggtggcagtgaattgagatcatgccactacacttcagcccgggtgatagaacgagactctgtctcaaaataayaataataataataataataataataatagctggacatggtggtgcacacctgtagtcccagctacgtggaaggctgaagcaggagaattgcttgaacccagaaggtggaggttgcagtgagccaagattgtgccactgcactccagcctgggtgacagagcaagacaggtgtactccagactgggtgactgcaccccagcctgggtgacactgcactccagcctgggtgacagagcaactaactaactaactaactaaaactacagttagtttatatatagtttttagttaaaactatagttagtttgagccaggcgcggtgcctcacgcctgtaatcccagcactttgggaggccgaggcgggcggatcacgagaataaggagatcgagaccatcctggctaacaaggtgaaaccccgtctctactaaaaaatacaaaaaattaggcgggcgtggtggcgggcgcctgtggtcccagctagtcgggaggctgaggcaggag

SEQ ID NO: 939011 - DNA, 610 bp, Homo sapiens
gggaggctgaggtgggaggatcacttgaacctgggaggtggaggctgcagtgagctgtgattgtgattacaccactgcactctagcttgggcaacaaagcaagacccagtcaaaaaaaaaaaaagagaaagaataaagaaaraaagaaaagaaaaggaaggaaggaaggaagaagagagaaggaaagaaaggaagagaaagaaagaaagaaagaaatgggaaaaaaatgaaaaaagaaagaaagagaaaaacagacaaagagaaagaggaaagaagaaaggaaagaaagagaaaaaagcatttgtggctcatagctaccaaattagacagtgcatatctaaagctgtcacctttatttgcatctgctgctcaccctcacaccaccacataaagaaaaaatttctctacaagtggacacatgctgaaataaacactcaggcatccttgaaggggagaagtcaccagaagatgtaccaatgaaggagaaaccctctcttgcgcttagatgggggtgggatagatcaaggcctattgatacatttttctataagctgcagacccaccaccttcttcctcagtggttgcatttgcaagttggagtctcagtcta

SEQ ID NO: 939012 - DNA, 438 bp, Homo sapiens
ggaaaagggaaatcctctctaaaggcttctattttctcaactacattagatagctaagaggtggaggagtgggagctgaagtgtggagagaagaaagcttgggatgtttgtcttggagagtgagaagtcatgcttgccaggatggccgggcagtgttragagtctgttcagggtttggtttctagaatatgttcatttttctttctccccactgttatcgacctagttcaggccacatcatcacccggtgtaagtgcaaccacctctgactgggttcttttcttcccatcgtgccccaccccaacccggtctattctccacattgctgtcaccacggtcattcaaagtttacgtggtatcactctccagcttaaagtccttcccctagtttcccactgtcctccagataaaacccaactctgtactgtggctctcaag

SEQ ID NO: 939013 - DNA, 438 bp, Homo sapiens
ggaaaagggaaatcctctctaaaggcttctattttctcaactacattagatagctaagaggtggaggagtgggagctgaagtgtggagagaagaaagcttgggatgtttgtcttggagagtgagaagtcatgcttgccaggatggccgggcagtgttaagagtctgttcagggtttggtttctagaatatgttcatttttctttctccccactgttatcgacctagttcaggccacatcatcacccsgtgtaagtgcaaccacctctgactgggttcttttcttcccatcgtgccccaccccaacccggtctattctccacattgctgtcaccacggtcattcaaagtttacgtggtatcactctccagcttaaagtccttcccctagtttcccactgtcctccagataaaacccaactctgtactgtggctctcaag

SEQ ID NO: 939014 - DNA, 589 bp, Homo sapiens
tgtgatatggagaaagagagagagagggagagcgacgaaaggatacagaagaggagagaactgaaggaacagagagagtccttgagaaggcggtggttcaggagcggaagaggggaagatagacacagaagcagacaggtatgatataagggaaaagggaaatcctctctaaaggcttctattttctcaactacattagatagctaagaggtggaggagtgggagctgaagtgtggagagaagaaagcttgggatgtttgtcttggagagtgagaagtcatgcttgccaggatggccgggcagtgttaagagtctgttcagggtttggtttctagaatatgttcatttttctttctccccactgttatcgacctagttcaggccacatcatcacccggtgtaagtgcaaccacctctgactgggttcttttcttcccatcgtgccccaccccmacccggtctattctccacattgctgtcaccacggtcattcaaagtttacgtggtatcactctccagcttaaagtccttcccctagtttcccactgtcctccagataaaacccaactctgtactgtggctctcaaga

SEQ ID NO: 939015 - DNA, 555 bp, Homo sapiens
ttcaacatactgtagtttacacgaagttaaattggggcctgaggtttacccagattcagtgtcttaatctcccagcttttcttctgcaacagtaatgcagaatcaaaataaccattttctaccattgccttcagttttcaggatgtcccgcaaggggcagggaaagattaccccttctttaaaamcaataatgacgataaacattgggctactcagcaaataacgcagttggcagtttctctcctgaaactttaaaaaaaaggtcagaaagaagaggcactgagcaccctctgaaactaatttttccatcacctctgcacaacttctcttaactaagaccacgcagttaaatccctttgaatcaaaggcgaagtagaaatgaattcctctgaccgaaggcaacggagggagggaaggaggcggggagcgaacactggcttaaagacatccagagagttccgatctccactcctagtcaagaccggttttaatgaagttaataagcccaataatggtgatacttggtactgaaatgacgccgtcctccaaagaggt

SEQ ID NO: 939016 - DNA, 836 bp, Homo sapiens
ggggtgtgggggaagggttggattggaggataagattaggcaaaaaactagctggaccatcggtagtgaagggctcctaacttaggtgcttctcaaaggggagctctcagtccagtagctgtttgtcaggggtccatgaagagatgagtggagaaatcaggactgtgtgtttagaaactttcgcagcwatttgacagactcttttctttttttcttttttttttttgagacagagtcttgctctatcacccaggctggagtgcagtggtatgatctcggctcactgtaacctccacctcccgggttcaagcaattctcctaactcagcctcctgagtagctgggattacaggcatgtgccatcatgcctggctaacttttatatttttagtaggacagggtttcaccatgttgaccaggttggtctcgaactcctgacctcaagtgatctgcctgtctcgggctcccaaagtgctgggattacaggcgtgagccaccgtaccccatcagcaatttgacagactctttatgcccatgacgtgtgacaattaaaatttgagacttttattttgtatatgtttaggtttttttgtattaaatttttccaataaatactttttactgttttacacatgtatgttctgttactgaaacttggttaggaaacaaactgatcttcagtccaaatagtctgagaagatagcagtaggtgaagggctttcagaaggaaagtggcatcctgggcttgtccttttgcactgatttccctggtgcctgcagggaggatggattggaagaggtgacaccaggcgctggatttaagttagagggtgatga

SEQ ID NO: 939017 - DNA, 731 bp, Homo sapiens
attttgccagtcttatttctctttgctttagtttggatatttttctattgacctactcactaatcctgacatctgctgtgtctggtacattgttcaatccatccaagtaagttcatttcagatattgtgtctttcagttttaagttatttgactctttttcacagattccaacattcaattgaaattttccatctttttatccattttattaacttaacacactagtcacaaagtccttgtttgttaaatccattatctggattttctagaggactgcttctatttatactttctcttgattgctggtcatattttcttgactccttgcattctagtaattttttttttcttgagacagagtctcgctctgtcgcccaggctggagtgcagtggcgcgatctctgctcactgcaagctccacctcctgggttcacgccattctcctgcctcagcctcccgagtagctgggactaccggtgcctgccatcacgcctggctaattttttgtattttttagtagagacggggtttcaccatgttggtcaggatggtctygatctcctgacctcgtgatctgcccgccttgacctcccaaagtcctgggattacacgcatgagccactgcgcccagccacagtaattttattacatgccaagcattgtatatataagaaccgtagagactgcaaatgatattcttaccatagaaaggtcctctttcctctcttag

SEQ ID NO: 939018 - DNA, 588 bp, Homo sapiens
acgccctatacttcagctcaaaaagcggagcttgtagctgtaattgaggtgctgactgcttttgagatgcctgccaatgtaatttctgattcttcatatgtggttcattccacacagttagttgaaaatgctcagctacaattccacacagatgaacaactgatgactttatttacccaattacaaaccacagttaggaacagaatgcactctttttacattactcatattggagctcatacaactcttccaggacttttgactccaaggaatcaaatggctgattgcctagctgctactgaaatatctaaygctagacactttcacaatttaacccatgttaatgcctctggtctcaaacgcagatacagcattacctggaaagaagctaaagctattatccagcgatgcccaacttgtcaaatggtgcattcctcatcttttacaggagaagttaatcctcgaggatcggaacctaattctctttggcaaatgggtgccacccatgttccctcgtttaggagactagcttatgtgcatgtatgtgtagatacatttttctcactttgtttgggctacctgtcaaac

SEQ ID NO: 939019 - DNA, 588 bp, Homo sapiens
acgccctatacttcagctcaaaaagcggagcttgtagctgtaattgaggtgctgactgcttttgagatgcctgccaatgtaatttctgattcttcatatgtggttcattccacacagttagttgaaaatgctcagctacaattccacacagatgaacaactgatgactttatttacccaattacaaaccacagttaggaacagaatgcactctttttacattactcatattggagctcatacaactcttccaggacttttgactccaaggaatcaaatggctgattgcctagctgctactgaaatatctaacgctagacactttcacaatttaacccatgttaatgcctctggtctcaaacgcagatacagcattacctggaaagaagctaaagctattatccagcgatgcccaacttgtcaaatggtgcattcctcatcttttacaggagragttaatcctcgaggatcggaacctaattctctttggcaaatgggtgccacccatgttccctcgtttaggagactagcttatgtgcatgtatgtgtagatacatttttctcactttgtttgggctacctgtcaaac

SEQ ID NO: 939020 - DNA, 565 bp, Homo sapiens
gtgttttaagctaagtgttattgcaaaaacagtcaaaaagtttaaaaagtttaacagtttataaagtaaaaaagttatagtaaactaaggttaatttattactgaagaaagaaaaatattgaaaacgtaagtttagggccgcctaagacccagtgttgatggatctacagtggtgcgcggtcacgccccaggccttcacatccacgcacccygcactccccaacgcagacagagcaacttccaagtcccgcaagctccgttcatggtaaatgccctacacaggagtcccattttacatctttttactttctttttactgtaccttttctgtatttagatatacaaatagtactgtgtcgcaactgcctacgtacaggtttgtagcctagtagcaacaggctttatcacacagccgggtgtgtagtaggcccggccatctaggtttgtgtgagtactctccagtatgttcaagcaatgatgaaactgcccagccacacgtgtcccagaaggtaccccgttgttaagcgaggcatgactgtatgaggaagataatattatttattgc

SEQ ID NO: 939021 - DNA, 565 bp, Homo sapiens
gtgttttaagctaagtgttattgcaaaaacagtcaaaaagtttaaaaagtttaacagtttataaagtaaaaaagttatagtaaactaaggttaatttattactgaagaaagaaaaatattgaaaacgtaagtttagggccgcctaagacccagtgttgatggatctacagtggtgcgcggtcacgccccaggccttcacatccacgcaccccgcactccccaacgcagacagagcaacttccaagtcccgcaagctccgttcatggtaaatgccctacacaggagtcccattttacatctttttactttctttttactgtaccttttctgtatttagatatacaaatagtactgtgtcgcaactgcctacgtacaggtttgtagcctagtagcaacaggctytatcacacagccgggtgtgtagtaggcccggccatctaggtttgtgtgagtactctccagtatgttcaagcaatgatgaaactgcccagccacacgtgtcccagaaggtaccccgttgttaagcgaggcatgactgtatgaggaagataatattatttattgc

SEQ ID NO: 939022 - DNA, 519 bp, Homo sapiens
gtggggacacagacaaaccatattagagtcgtattattttgcctaggctggagtgcagtggcacaatcatagctcactgtaaacttgaactcctggactcaagccatcctcccaccttagcctcctgagtagctaggactacaggyacacaccaccattaccagctaattttttaaattttttgttgaaataataaactcctggcctcaaattttatcctccagcctcatcctcccagagtgctgggattacacatataagccacgatgtccagccttatttatttttatttttatttttatttttattgagacagagtcttggtctgtctcccaggctggaatgcagtggtgcaatctcagctcactgcacccttcccatcccgggttcaagcaattctcctgcttcagcctcctgagtagctgggattataggcacctgccactacacccagctaatttttgtatttttagtagagacggtgtttcaccatgtcggccaggctggtctcttttaacc

SEQ ID NO: 939023 - DNA, 626 bp, Homo sapiens
tccaaatagtctatttcttctgccaggcaaaaaaagtagtattagcaaaatctattcattctcattgcataacttctacttcatactattgtatttaaatccattcacaaagttcatgggttaaaagagcacccatttgagttatattactctaactaaagccagaattctaagtattcttgctttcaactttcatataattcttaacttacagctttggccataaaggctacttacaataatggtaaatgcttaagagaatcatttggtattttaatgaacatttattgtgaactctagacatgagagtggtttagtgtgttgcrtatcaagtatcctgagatgataactttttgtagttgtttcttcatgctttcttttttagctgtaaccactgtcagtatgcttgtaggacaataacataggcagttcaagattcggattctgaaaaatgtaaaatatacagatttaaaaggcttattttaataatgtgaaaccatctgttaagcattttcagaaataagtagtaaattttgttatgagagtaaagcaactgtcttaacaaagtgccaagttttattcacatgcaggggaaaaaaagagtgacactataaccagattttaat

SEQ ID NO: 939024 - DNA, 625 bp, Homo sapiens
cagtcacattataagtatcattatatatgttaaagttcaaaatatgtggacccttctatttcggagatgctcacatcctctgctgcatggtaaatcactgttccatggaacttgcaattcctctcccttttcctctttccaggatcattttgagggttatgcatttgcccttcagcagtgatgaatggagtgttgtgctaatgctggactctaccattattcatgtccccatcctctgtccaggccgttaattgcagcatcctggaagtggaagcaaaaactgtattacagaggaaactttcatcttcctgattataatacctgrcaaaaggcaggcttttctattaatctcagataccttccaccggagaggcatccattcactcactgtacatacacagggcccacatccaggcatcatcacacagaaacagaatatgtggctcatgggatctataacttcggtctgaagaagctgagctgataatcatatcactccactgccacatccttaatcagcctattatgggcataaattaagagttttagtgaagaaaatctgtgtcccagaatttctgattgccaggacccagatgagctctgctgaatataaagtattccacca

SEQ ID NO: 939025 - DNA, 730 bp, Homo sapiens
gagcagcagtggcaactgagacatggggaccaggaatttgcatggagtagggcaggagccactcctgaaggaatggccaggccaccacagtccgggcagaagccaggcctggggccagtagccagcaagggaacgaccgccccagctccagacacccagcacacctcccagccttgctgccggagccctcatcctgccttcaaggaaggctctccaccctgtccacgacattcccacagctccccacatgccccgtgtcctccttaaacctccatgagggacggaaccgcatctgcctcctccatggtccttggggtctccttggagcctggcagagcaagtgctcagtaaacgttcgtgggacagattcacagccattattgggctcagtgggtagaaatgtccacactgagcygggcacagtggctcatgcctgtaatcccagcactttgggaggccaaggtgggtggatcacctgaggttaggagttcgagaccagcctggccaacatggtgaaaccccgtctctactaaaaatacaaaattagccgggtgtggtggtgcacaccagtaatcttggctacttgggaggctaaagcaggagaatcgcttgaatccaggagttgggggttgcagtgagcagagatggcaccactgcactccagcctggatgacacagcaagactcttgtctcaaagaaaaaaaaaagaaagaaagaaagaaagaaatgt

SEQ ID NO: 939026 - DNA, 663 bp, Homo sapiens
cacgcctgtaatcccagtcccagcactttgggaggccaaggtgggtggagaagtgacctcaccagaggtcaggagttcgagaccagcctggccaacatggtgaaaccctgtctctaccaaaaacactaaaattagccaggtatggtggtgtgtgcctatagtcccagcagaataatcgcttgaacccaggaggtggaggttgcagtgagccaagatcatgccactgcactccagcctgggcaacagagtgasactctgtctcaaataaataaataaattgccaggctggtggtgcacacctgtagtcccaggtactggggagtggggagatgcagaggtgagaggatcacttgggcccgggaggtcaaggctgcagtgggccaagatcacatcactgcactgcagcccgggtgacaaagcaagaccctgtctcaaaaaaataaatatataaataaaaataacttaaaataaatttttaaaaaagagatggagtcttgctacgttgcctaggctggtcttaaactcctgagctcaggcaatcctccccctcagcctccaaaagtgctaggattacaggcacgcaccactgcacctgtctacacttcccttttaaagtgtccacacactccctctcctcaaagtccaggtcccttggcttacatg

SEQ ID NO: 939027 - DNA, 594 bp, Homo sapiens
aagggcccaggtacagctcagcctgctgcttcacagcgttcaagccccaagccttggtggtttccatgtagtgttaagcctttaggtacacagagtgcaagagatgaagcttgggagcctctgcctggatttcaagttgktatttttttttttttttttttttctgagataaggtcttgctctgtcacccaggcttgagtgcagtggagtgatctcagctcactgcaacttctgcctcctgggttcaagcaattcttttgcctcggcctcccaagtaactgggattatagacacccaccaccatgtctggctaatatttttgcacttttaatagagatggggttttaccatgtggccatgatggtttcaaactcctgacctcaagtgatctgcccacatcagcctcacaaagtgctgcgattacaggcgtgagctgctgcacctggccctctacctagatttcagaggatgtaatggaaaagcctggatgtctaggcagaagcctgctgcaggggcacagccctcatggagaacctctactagggcagtgcagaggggaaatgtgggttggggccaacacacagagtcccctct

SEQ ID NO: 939028 - DNA, 594 bp, Homo sapiens
aagggcccaggtacagctcagcctgctgcttcacagcgttcaagccccaagccttggtggtttccatgtagtgttaagcctttaggtacacagagtgcaagagatgaagcttgggagcctctgcctggatttcaagttgttatttttttttttttttttttttctgagataaggtctygctctgtcacccaggcttgagtgcagtggagtgatctcagctcactgcaacttctgcctcctgggttcaagcaattcttttgcctcggcctcccaagtaactgggattatagacacccaccaccatgtctggctaatatttttgcacttttaatagagatggggttttaccatgtggccatgatggtttcaaactcctgacctcaagtgatctgcccacatcagcctcacaaagtgctgcgattacaggcgtgagctgctgcacctggccctctacctagatttcagaggatgtaatggaaaagcctggatgtctaggcagaagcctgctgcaggggcacagccctcatggagaacctctactagggcagtgcagaggggaaatgtgggttggggccaacacacagagtcccctct

SEQ ID NO: 939029 - DNA, 615 bp, Homo sapiens
tgagaatctcaattttctgagttctgttttggtgaggcaagatgcaaaaggctagaaatatcccaaacataataagagttttcagaaagcgtaggccacccaaaaagaatgacaaactgtctgcaatatcctcttccttcttaatccttgcaatttggcttctgtctaaattccactaaagcygcttctcagtggtctccagtgatgttacatgggccttcccacccttggatcattcctgcacctagtggggaaattaacttggccagcatcttaggtcaagttccccagaagtggacactgagtgaattcatgcctttgattttttttttttttttttttttttgagatggagtctcactgtgtcgcccaggctggagtgcagtggtgtgaactcagctcattgcaacctctgcctcctgggtttaagtgattctcctgcctcagcctcccgagtagctgggattacaggcatgcaccaccatgcccagctaatttttgtatttttagtagagacagggttttgccatgttggccagggctggtcttgaacccctggcctcaggtgatccacccgcctcggcctccaaaagtcctgggattacaggtatgagc

SEQ ID NO: 939030 - DNA, 631 bp, Homo sapiens
tattaggcaagggggtgctccaaggcaggaatttggagtgccagggttccctaacttattgaatcttattttgtccagggacatgagaacaacaagaaacactaaatattggcagactactttgtatatctttcagctccatggttctgaatatagccacagggatacattcttgtttatgygctatttctaaggcaatttaggcagatataaatataggtaataccacttctatggaaattatgactgtatataccagagtactcccaaatttggaaactttctcttagaatattaagcatccgtggctgggtgcggtggctcacttctgtaatcccagcactttgggaggccaaggcgggcagatcacgaggtcaggagttcgagaacatcctggccaacatggtgaaaccccgtctctactaaaaatacaaaaattagctgggtgtggtggcaggcgcctgtagtcccagcttcttgggaggctgaggcaggagaatctctcgaaccgaggaggcggaggttgcagcgaaccgagatcacatgactgcactccagcctggtgacagatgagactgcatcttaagaaaaaaagaaaaaaaaagaaaaaaagaatattaagcatccctta

SEQ ID NO: 939031 - DNA, 593 bp, Homo sapiens
agacaataaaaggaaataaatgatgttcatattggaaaggaagaggtaaaactgtccctagttatggatgatatgactgcctatatagaaaatcccaaggcatctacataaaataatattcaaaaatcctattactaataagtgagttcagcaagctcccaggatatactattgatgtggtttagatgtttatcccccaaaacctcatgttaaaatttgatcccagtgttggagatgagacttaatgggaggtgtttaggtcatgggggtggacccttcattaatagatgaatgccctccctattgggggaagggagtgaatgatttctcactctagtagttcctgtgaagcaggttgtttaaaaaagacaggcacctcccctctccctttcttgcttcccctcttgctatgtgatctctgtacatgctggcacccttcaccttctgcgacgaatkaaagcagcctgtggatgtcaccagatgtagatgcccaatcttgaacttttccaggtatgagaatcatgaaccaaatttcctttataaattacccagcctcaggtactcctatatagcaccagtaagtggactaagac

SEQ ID NO: 939032 - DNA, 573 bp, Homo sapiens
tctcggaaccaagtacttcctaatcttttcttgtttcttctccttccccaacccctagcgcacccccttccccgccctgccaagtgtaggagagggatctctctggaatttccttatctgactaaggaaacttctctccaaaagaaatgcagtrgtcttaaaccatcttcccaggaatctcatcaagtaaccaggaaagattaacacctgaaaaagaaaaaagactaaaagttatcaccatgtctagacagacttttatttttcttttgagacagggtctcgctctcttacccaggcagaagtgcagtggcatgatcacagctcactgcagcctcgacctctcaggctcaagcgattctcccacctcagccacctgagtagctagaactgcaggtgcgcaccaccatgcccacctaatttttgtattttgggtagagatggggtttcatcatgttgcccaggttggcctctaactcctgggctcaagtgattcacccacctcagcctcccaaagtgctaggattacatgcatgagccactgcgcccgtcccagatatggttttcatctattct

SEQ ID NO: 939033 - DNA, 651 bp, Homo sapiens
cctggtcaaaatgaacaaacttaagaatgacctccctttaaagtcagtaatctggtatcctttctgtatttatcattttattcatttctttgcgtttatgttcagaggggaaatccaaatgcctctaaccctgtgaagcaggtgttggtttgattatttaacattctgaattctaggatggaaagaatgactgtgaccatctgattgtcttcctctgccagcttttagagcttggaatcttaatactttttcaaaactgtacagcctctagttgtgatctattaggcaattgcaatttgttaaatgtctggggccgggcgcggtggctcacgcctataatccaggcacttttggaggcgggyggatcacatgaggtcaggagttcgagaccagcctgaccaacatggagaaaccccatctctattaaaaatacaaaattagctgggcatggtggcgcatgcctgtaatcccagcgactcgggaggctgaggcaggagagttgaacctggcaggcagaggttgtggtgagctgagattgcgccattgcactccagcctgggcaacaagagtgaaactctgtctcaaaaaaaaaaaaaaaaaaaagtctggtaatcttgcctattcttcctcatggtgtgaatctggaggcat

SEQ ID NO: 939034 - DNA, 651 bp, Homo sapiens
cctggtcaaaatgaacaaacttaagaatgacctccctttaaagtcagtaatctggtatcctttctgtatttatcattttattcatttctttgcgtttatgttcagaggggaaatccaaatgcctctaaccctgtgaagcaggtgttggtttgattatttaacattctgaattctaggatggaaagaatgactgtgaccatctgattgtcttcctctgccagcttttagagcttggaatcttaatactttttcaaaactgtacagcctctagttgtgatctattaggcaattgcaatttgttaaatgtctggggccgggcgcggtggctcacgcctataatccaggcacttttggaggcgggcggatcacatgaggtcaggagttcgagaccagcctgaccaacrtggagaaaccccatctctattaaaaatacaaaattagctgggcatggtggcgcatgcctgtaatcccagcgactcgggaggctgaggcaggagagttgaacctggcaggcagaggttgtggtgagctgagattgcgccattgcactccagcctgggcaacaagagtgaaactctgtctcaaaaaaaaaaaaaaaaaaaagtctggtaatcttgcctattcttcctcatggtgtgaatctggaggcat

SEQ ID NO: 939035 - DNA, 541 bp, Homo sapiens
agcctccctgtgcccttccgggagggccaggagcaggcaggatctgccttccctggtgcggctgccacgccctcccaggctcaggagccgggtgtctctgcagcctgcaccctcggggccccaggaggaacctctgtccctgcaggttccggggtgtcttctcctgctgcctggcccctctccactcccggsacctgctctgatcttggagccggggttggggccgagcctgggggctatgaatggcagcagaaggcagattgattcctgggcggggaagagggggagtccccagtaaggccccacctttgggtcagggagggcctgaaggctgggggctgggctgccagtcctgctgactggaatggggactcgtggtgcctcttctgggctgccattggccacccctggacctatcagcatggacgcacttcctccccgctgaggtccataaaaaccctgggctcagccagagcagggcagaggatggccagaagacgaaaagggcagagagactgggatggacagagagacggatatg

SEQ ID NO: 939036 - DNA, 753 bp, Homo sapiens
ccaggttaaattttatgggaacagactataagacagtgtccctccattctggatggtgaacatctagcttggaagacagatgggtaaagaaatagctgtgatgttattctgcatttgatgtgtgctaacagaggagtgtacaatggaaagggcattccaggcagaaggaagagtttgaacaagtgcctggaggcatgaaaatcaattggagaatgtatcaggtaggcataggcttggcagccaacaatagagaactcaaaatagcagtgacttaagtaagctagaggtttatttctttcatacacaagagaagtgcagagctaggcagcccggggctggtgtggtaggtagttcctgagtcatgaggaacccaggcaatgcaagatgactgcttagagcacrgactccagagtcacactggcctgagttttagtcctttctcaggccatgagattttgaggaagttacctttcctctctgcttcctcatctgtaaaatgaggataataaaagtatctatctttgaggactgctctgaggattaaatgatttaataaaggaaatgcgttttgaacagaacctggtgcaaaatggtgccatatatattttaatattccgcttttctgctccacatccttagcacatggctttcattctcaaggtcatctcacggtccagaatggctgcaggagctccagccaacacatcccagttctgggcagcagaaataagaaagggagagaaggacaaaggc

SEQ ID NO: 939037 - DNA, 574 bp, Homo sapiens
aggtgatgggtacgtggcaaaatctgaattctatgggcatgaacctattactgttctatttttgtattaaaatgagtccctttgtcagaggcaatgttgcataagataccataatgatgagattctgtaggtcccctgatgatagtgttggcagaagagttttgaacaaagaaggtaaatctacatacagaatgtgtatctattcccgtgaagacaaagccctgcccctccaaggtggaaggaattcgtaaagtgaggtgataggctggttcccacagggattctgtgtgagcagagctcagtgttttgctctgctactggcaagctggggactcaacagtggtgattgacagggaagccctgtgaagggaagtgagtgaccatttctgcacaatggccactatacacatgggctgtggagcaagcagcaaaktggctggggaaagaagtcgaccacagctacaagggctgtcatctgatctaacttgtttttggaagcttcctctgcagtgagtgctctcggcttaacgtttcccagggtcataaatgtcttcaccaccttcacctactccaa

SEQ ID NO: 939038 - DNA, 573 bp, Homo sapiens
aattgataaaatatgtagtattttagatagcaagaagtactaagtagaaaaaaaaaagagtatgaagtgtcagggggttttgaactttttaaatgacaaggaaggcttcactaagtcaagaactgaagtaggtgacggagcaaactatagagacacctgggcaggaagattctagaccgaagaaacagctaggtggaagtgtgtcttatatgtctgatgaatggcagaggaacaaagaggctggagaagagtgagtgagaggaagtgaagtagatgaactcgggggcttagtggggacaggtcacccaaggtcttgtaggtcagtgtttctgaaaaattggtgtgygtgcacatgacttggtcttgtgaaaatgcagattctgatttgtagttgggagttgggttctgcacttctgcatttccaagttaccagatgatgccactgttgtggtcttctttaaatagcagtctttgtaggcagttgtaaagagtttggcttttattctgagagacacaggaagtcattggagagaacgcagcagaagagtggcatattctgatttatgttttaac

SEQ ID NO: 939039 - DNA, 831 bp, Homo sapiens
gccccttttagccacactgggacagggcaccaagtcccaagactgcacaaagcagcaaggccctgggcctggcccaagaaaccattttttcctccagggctgtgatgggaggggctgccgtgaggatctttgacatgctctagagacattttctccattgtcttggtgattaacatttggctcctcattacttatgcaaatttctgtagccagcttgaatttctccccagaaaatgggtttttttcttttctactgcaccattgggctgcaaattttccacttttatgctctgtaacctcttgaatgctttgctgcttagaaatttcttctgccagataccctaagtcatctttctcaagttcaaagttccaaagrtctttagaacaggggcaaaattccaccagtctctttgcatagcaaaagtgacctttactccagttcccaacaagtttctcatctccatctgagaccacctcagcctggagtttagtgtccatatcactattagcattttggtcaaagccattcaacaaatctctaagaagttccaaactttaccacatcttcttgtcttctgagccccttcaagtctctaggaagttccaaactttcccacatgttcctgtcttcttctgagccctcccaactgttctagcctctgcctgttacacagttccaaagtcactttcacattttcaggtatctttacagcagcaccccactacctgctaccaatttactgtattagtctgttctcacacttctataaagacatacccaagactgggtaattttgaaagaaaagaggtttaattttctctgccgggctg

SEQ ID NO: 939040 - DNA, 695 bp, Homo sapiens
gcgcagtggctgacgcctgtaatcccagcactttgagaggctggagtagatggatcacctgaagtcagaagtttgagaccagcctggccaacatggtgaaatcccgtctctactaaaaatatgaaaattagccaggcatggtggcgtgtgcctgtagtcccagctacccggaggctggggcacgagaattgcttgaacctgggaggcggaggttgcagtgagccaagatcgtgccactgcacttctgcctggatgacacagcragactccatctcaaaaacaaaaaggaacaactttgggaggccaaggtgggcggatcacctgagatcaggagttcaagaccagcctggccaacatggagaaaccctgtctctactaaaaatacaaaattagctgggtgtagtggcaggcgactgtaatcccagctactcaggaggctgagacaggataatcgcttgaactcgggaggcagaggttgcagcgagctgagatcgtgccattgcactccagcctgggcaacaagagcgaaactccatcttaaataaaaaaaaagaggaacaaataggccaggcgtggtggctcacgcctgtcatcctagcatcctagcacaaacgggccaaggcgggcagatcacaaggtcaagagatcgaaactattctggccaacatggtgaaaccctgtctctactaaaaata

SEQ ID NO: 939041 - DNA, 566 bp, Homo sapiens
cagtgtatggaggggaaatgcagatggagccagtacattcactgagttgaagaaatggagctaagagtctaaaaagaccaagacagagtttgaataagagagaactgtagaggacagagaattccagaaatctgcaaaggtaccattttggaattagcagagtactcatcagcacacacacataaggaactactcaggctggggaaagaactctctaaaaggattagaggaagtagtacctggcattcatacagattaggtagaaacagttcctgatcctatcagccaractagaaaaccgtaattcatgggatgctgggtaaaatgctcagaaggatttggcctcaatagcaggaaaatgtgccccagaccaaacattgcttaggtcccacttaacaattattaaaagacaaaataggatcaaattattttaaaataacataactacatcccagaacaaaatttaagaatatttgtaaattatacaagaccttctagtaacaaacaaggtaaaattcatgtctggaatccacaaaagttaccaggcttgcaaaaaaacaagaaaa

SEQ ID NO: 939042 - DNA, 585 bp, Homo sapiens
tgttgctgcaaaggacatgatttcgttcttttttatggctgggcagtatttcatggtgtatgtgtaccacatggtctttatctaacccaccactgatggacccctagattgattccatgtctttgctattgtgaatagtgctgcagtgaacatatgagcacacgcgtctttttggtggaaacatttgttttcttttgggtatgtaccmagtaatgggactgctgggtcaaatggtagttctaagttctctgaggcatctccaaactgctttccacagtggctggactaatttatgttcccatcaacaatgtataagcattacattttctctacagcctcaacagcatctgttattatttttttgactttttaataatagccattctgactagagtgagatggtatctccctgtggtttaaatttgcatttctctgagtagtgatgtggaacattttttcatgtctgttggctgcttgtatgtcttcttttgagaagtgtctgttcatgtcctttgcccactttttaatggggttaattattgtttactcattgaaatgtttaagttccctatagagtctggatgt

SEQ ID NO: 939043 - DNA, 585 bp, Homo sapiens
ttcacaacccattttatccccaacccagacagtagcagctccttccttccagtagctcaggccaaaagtctcccagtcgtccctgcctttttacttctcagaccacatatgcaatcactcatgaaatctttttgactctacattcaaaaaatatccagaatccaagcacttatcaccacctcccctgccaataccctggtccaagccaccatgccctctctcctggtcactgcagtgctgtccctcctcactggtcttcccgctctgcgcttgccctcaggcaatcaggcaatctgttcctaaccttctcgggggagtaggagcagcaytcccaacctaaaattgcaacctctcactccaacactttctgttgctctttcctgccttatttttatccgttgcacttatcaatacctacatgccacaaatcaacttatcttgtttagtgatgggcttccccacgtgaatgtatattccatgaagacaggaatttttctgtttcctttcctaccccttgtagggtgcctgacacatggtagctactgaataaatagaccagtgtgtgttatgaggatcttgtgggct

SEQ ID NO: 939044 - DNA, 585 bp, Homo sapiens
ttcacaacccattttatccccaacccagacagtagcagctccttccttccagtagctcaggccaaaagtctcccagtcgtccctgcctttttacttctcagaccacatatgcaatcactcatgaaatctttttgactctacattcaaaaaatatccagaatccaagcacttatcaccacctcccctgccaataccctggtccaagccaccatgccctctctcctggtcactgcagtgctgtccctcctcactggtcttcccgctctgcgcttgccctcaggcaatcaggcaatctgttcctaaccttctcgggggagtaggagcagcactcccaacctaaaattgcaacctctcactccaacactttctgttgctctttcctgccttatttttatccrttgcacttatcaatacctacatgccacaaatcaacttatcttgtttagtgatgggcttccccacgtgaatgtatattccatgaagacaggaatttttctgtttcctttcctaccccttgtagggtgcctgacacatggtagctactgaataaatagaccagtgtgtgttatgaggatcttgtgggct

SEQ ID NO: 939045 - DNA, 566 bp, Homo sapiens
tttgtgtcctcacatggcagaaacagagctagtttgctctctggcctcttttaagagcactaatcccattcatgatagcttcatcctcataacctaattaccttcttagtccatgttgtgttgtttaacagaacaccacataccagctaatttataaggaaataaaatttatttctcacagatctggaggctgagaagcccaacatcaaggtgccaacatctggccagggccttcttgctgcatcatcccatggcatcaggtggaagggaaagagagcgtgcctgagagcaagagggcaagagagtgccaaattcgcttttataacaacccactctggcgatatctaacccactcctgcaataatgagatataatccatcaatgagaacagccctcatggtctaatcacctcrtaatggtcccactttttgatattatcacaatgcaattaaatttcaacataagttttggaggggatattcaaacgacagcacctcccaaaggccctacctctaactaccatcgcattgggatagggttttaacttatgagctttgtggggacac

SEQ ID NO: 939046 - DNA, 553 bp, Homo sapiens
agggaagaggaagagctgggaggtggcaagtgatagctgtggtgacaacagaggaggcccttgtggcaaacttatcagcagaagtcatcacagggaggggggcagggtggcactcactcatcctccgttactccaggtgagcatccgagggtcggcccttctccatcccccgcagtgttatgggctagggggagggcagggcatggcagggccaggtgctgacagatcctgcaggcagacagcatcagccatccttctagggcacgggcagagagggatgtcagacagcaaccactcagaggaaagccctctcccagggacccaggcctgagatrcagataacattgactatttctccccacccttctcctccaattcacccagtgtcagccatgcattaggcagacaggctgggccagtccctgtcatggcagagctgccctcctagggcgatgatggacactgaacaagtgaaatggaagaacaggggacccaacttatttagggaggtctgtttcaaggaaagcctttttgcaagccaaatgtaaactaa

SEQ ID NO: 939047 - DNA, 681 bp, Homo sapiens
agaatgaaaactactaaaccgatgtggctgtttctttatgtatagacagatgtgactgatgatgtagtgatacagatacaaagataatataaataatacatgcttgtgcttggatagctagaaaccaagactattatgatattttaaatttggggcacccaaacaaaattctcctatataccttaaycattcacaatagtcaaagctgcctttctctatgggctttcaaatactagatgatgctcgaaaaccgatcttttctagggtttatatcattgattttctttatcaatacatgtaactggtgatttcatttatattagacatgactggttgcaagctgaaaatgacagtaaattcaatctcaaccagtttaaaatcacagaagaaatttattggagtaactggaaaccccaggagttgtttggcttcaggtgcacaatgttgctaaatattgggtttctctccctggatctgcgttgtattcattctcggcaagatcccctcttgtggctcaaggtaacggcaacaactccaaattcatatcattgtatttcaaaggttctgatcagaagtcccatggcaaatccaaacagccactgttgtaaggggtaggcagtgccctgaccccttacatctatattaccttctccaaccctgaactgggatggattccccagc

SEQ ID NO: 939048 - DNA, 766 bp, Homo sapiens
gtaactctggaggtgggtggaattagataaatctagtgttttataagttcctcaggtgattcttttaatcaggtaaggctggcaagtaccagtctaattcaatacatctgaacctcccgggaagcttttcaaaccaggcaaacccatttttatctccatctgccttcagagattctgagtaagtctagaatatgtattgaaaaaacttcttaggtgattcttatgcttccctttcccatcccttcctcagttaaaaacccatttctacttgtttcacgtataatatatacactgtggtccacaacttcrcacttccaccccaaaagagactgaaatatggatgctttgggaggccaaggcgggcggatcacgaggtcaggagatcgagaccatcctggctaacacggtgaaaccctgtctctactaaaaaatacaaaaaattagccgggcatggtggtggagcctgtagtcccagctactcgggaggctgaggcaggagaacggcgtgaacccgggaggcggagcttgcagtgagccaagatggcgccactgcactccagcctgggcgacagagcgagactccgtcgcaaaaaaagaaaaaagaaaaagaaaaagaaaatgaaatatggatggtaagctctgtgtcttataattttgaatccaacacatgccaaggacataatggcataatggttgttcagttgaattaaaatttctgttttatttccttatccatccctgggttcaagtttaaactatgattagc

SEQ ID NO: 939049 - DNA, 612 bp, Homo sapiens
gaacaactggatatctaggaacatctaaaatggtcaatttaagtgaattaatttcaacaattagtttttaagttaygtaatgcatttttctagtttccaaccagatattttgcagcccggtcatttagcatttcctctgagccatctcaggctcacctgggtttagactattccggcaaagaatggctccatagctgctacggcttgctttattcattttccagtttttaaaagtaacttgttagtaaaagtttttggttgtgtgcaacagaaaaagattctggctaacttaagcagaaaaggatttattgacaggttaagaggggctcatgaacacagtgggaggacaatgaccaggcttgggaaagggcaaggaccaaggaagtcccagaggatgggacactgtcagcagagtcacattaccaaccccacccactccccacccacagtgctgccaggatgctaacaatgccctccaaaatatccaccattcttgtagcacagcctctgggatcaaagccttgtggcttccgtaagtgagaggtggatatgagatgtggaagccaaaaatcgcctttctggcagaggggaatggattattccacataagaa

SEQ ID NO: 939050 - DNA, 415 bp, Homo sapiens
gagactgcctctcaaaaaaacaacaacaaaaaaacccaatcatcagctgtcacatcatgttgaacaactggatatctaggaacatctaaaatggtcaatttaagtgaattaatttcaacaattagtttttaagttacgtaatgcatttttctagtttccaaccagatattttgcagcccggtcatttagcatttcctctgagccatctcaggctcacctgggtttagactattccggcaaagaatggctccatagctgctacrgcttgctttattcattttccagtttttaaaagtaacttgttagtaaaagtttttggttgtgtgcaacagaaaaagattctggctaacttaagcagaaaaggatttattgacaggttaagaggggctcatgaacacagtgggaggacaatgac

SEQ ID NO: 939051 - DNA, 565 bp, Homo sapiens
tggtgttgagtgtctgtggcttttccaggcgcatggtacaagctgctgatggatctaccattctggcatctggaggacagtggccctcttctcacagcaacactaggcagtgcctcagtagggactctgtgtgggggctctgaccccatatttcccttccacactgcactagcagaggttctccatgagggctctgcccttgctgcaaaacttctgcctagatatccaagcatttccatacatcctctgaaatctagacagaggtttcccaacctcagttcttgacttcagtacacccacaggcccaacaccacatgtaagccaccaaggcttggggcttgcatcctctgaagcaacatcctgagctttaccttagccccttttagccatagctggaatgcagggcaccaagtcccaagactgcrcaaagcagcagagccctgggcccggcccacgaaaccattttttcctcctaagcttctgggcctgtgatgagaggggctgccaagaagacctctgacatgccctgaaaacattttccccattgtcttggagattaacattt

SEQ ID NO: 939052 - DNA, 540 bp, Homo sapiens
ttgtctatttctgcgaagacttgattttgttttttgttttttgttttttgagaaggagtcttgttcttgtcacccaggctggagtgcagtggtgcgatctcggctcacagcaacctccgcctcccgggttcgagcaattctgcctcagcctcctgagtagctgggattacaggcacccaccaccacatcyggctaatttttgtatttttagtagagacggggtttcgtcatgttggccaggctggtctcgaactcgtgatctcatgatccacccacctcagcctcctaaagtgctggaattacaggcgtgagccatcgcacccggctgacttgatttttaatacagtaagaactgtcagtttgtgcccttccatcaactgcttttttctttatcaaaaatgaaacaaaaccaaaaccaagtggctgaatagttaaattgaaaggcagacaacttgaaattcattttcagcaaacaatttcccagagttcagatacttccaccttctctaagtgataggcatagtaaactcctcctagatg

SEQ ID NO: 939053 - DNA, 618 bp, Homo sapiens
aaatcagacactgcctcttaaagctcagctatagaacccctgcatttcaccatggaccagaaacccattcaggacccctctctttgcaggagagagctcttctcttttctttcactgttaaactttctgctcttaagctcgctccttgtgtgtccccatcttagttttctgtggctttgagacaacaaatcttgggtaatttccccagctgaaggatgccgcttcactagcatggggttcaaacacagcagaccctcaatgagagcttactagattgtttcatagactcttctgtcaccttctttacatgtccccaaggtggtgtttcctggcttgcatccctctgtgtgtcygtggccaccagtgcgccagcaacagagccctttgtggtcccacacttggaatcccacacaagcctccccacctgtctcctgaatttccacctcctcctcccccaccatcgcagtccctaattgaagaagagcttcttgaacatctccctgaatcctggaaaacagctatctcgacctttgtagaactgaccaatttagataaattcacaaagctttggaacataagaagggtcacattttctaagaaagtttcaatgccaattca

SEQ ID NO: 939054 - DNA, 731 bp, Homo sapiens
ttctccacatgctgccagacagagtctaagaaacacgggctggctgagcgcagtggctcatgcctgtaatcccaacacttcgggaggctgaggcaggcagatcacctgaggccaggagttcgagaccagcctggccaagatggtgaaaccccatctctattaaaactacaagaattagatgggtgtgatggcacacgcctgtaatcccagctacttgggaggctgaggcatgagaattgcttgaacccaggaggcagaggttgcagtgagccgagattgtgccactgcactccagcctgggggacagagcgagamcttatctaaacaaacaaacaaacaaaaaaacatgagctgggtcacgctcctcccctgctccacagcctccagggctcctactgccttcagaataaagattggcctccttatccagacccacaggtgctgcacagtggcggccccctcccctgatctctggccactctcactgtcacttgccctgctagagccaccttggttttctttccattgcacccagctcccacctgccacagggccttggcacactttgctttctctactggaacactttcgtttctcctcttcacctagttaatgccagatctcagatcaggtggacctctggtagcaggtgctgtggggattccccagagcctctttggtgggatctgcatgcatcttcctgctgccacacagtgttggctgctgtgggc

SEQ ID NO: 939055 - DNA, 647 bp, Homo sapiens
cagttcacctcagtttacttcagctcagcgccactcactgcaatcccacccacctcagctcagctcaagtcaatcctgctctgttgaatgctcagctcagctccacccagctcctcaacacacctcatctcaacttttacaagtttttttttttttttttttttgagatggagtttcgctcttgttgcccaggctgaagggcaatggctcgatctaggctcactgcaacctccgcctcccaggttcaagtgattctcctgcctcagcctcccgagtagctgggattacaggcatgtgccaccacgcccggctaattttgtatttttagtagagacagggtttctccatgttagtcaggctggtctcraactcccagcctcaggtgatctgtccaccttgggctcccaaagtgttgggattacaggcgtgagccaacgcacctggccaagtttttatttatttgttacctttttagagatagggtcttgctctgtcacccaggttggagtacaatggcaagaacatagctcactgcagcctcgacttcccgggctcaaggaatcctcttgcctcagcttcttgagtagctgggactacaggtacatgccaccatgcctggttaattttcaaattttatttgttgtagg

SEQ ID NO: 939056 - DNA, 649 bp, Homo sapiens
accctggcccttgcccctgctctgttcctctctgtagcaaataccataaaagagctatctatgtttgctatgtccaattctctcttaaaccaatttcaaatgagctttcaccctcaccatgtcataaagaagaccctgtctagatcaccagttacctccatgttgctaaatccaatgataaattctcaaccctcattttttatgacccatcagaagtatctgacactgctgattaccctttccatcttgacagactttctttgcttggctctcagaataccatgcacttgattttcttcatctcacactcgctggygcttttccatctcttcttttggcttttctatttcttcctttctttttttttttttctgagatggagtcttgctctgttgcccaggctggagtccagtggtgtgttcttggctcactgcaacttctgccacccgggttcaagtgactctcctgccttaccctcccgagtagctgggactacaggcgtgtgccaccatgcctagctactttttttctatttttagtagagatggggtttcaccatgttggccaggctggtctcaaactcctggcctcaagtgatccacccacctcggcctcccaaagtgctgggattacaggcgttgagtcaccg

SEQ ID NO: 939057 - DNA, 649 bp, Homo sapiens
accctggcccttgcccctgctctgttcctctctgtagcaaataccataaaagagctatctatgtttgctatgtccaattctctcttaaaccaatttcaaatgagctttcaccctcaccatgtcataaagaagaccctgtctagatcaccagttacctccatgttgctaaatccaatgataaattctcaaccctcattttttatgacccatcagaagtatctgacactgctgattaccctttccatcttgacagactttctttgcttggctctcagaataccatgcacttgattttcttcatctcacactcgctggcgcttttccatctcttcttttggcttttctatttcttcctttctttttttttttytctgagatggagtcttgctctgttgcccaggctggagtccagtggtgtgttcttggctcactgcaacttctgccacccgggttcaagtgactctcctgccttaccctcccgagtagctgggactacaggcgtgtgccaccatgcctagctactttttttctatttttagtagagatggggtttcaccatgttggccaggctggtctcaaactcctggcctcaagtgatccacccacctcggcctcccaaagtgctgggattacaggcgttgagtcaccg

SEQ ID NO: 939058 - DNA, 443 bp, Homo sapiens
gttttataatgcagaataataatactttgttataattaaaaataaagtatgtcattatatgaagctaaawtaacattaacattcatttgagcattaactcaactgtcaagaactgttctatattttattgagactacatatagtaaaaagcataggtcttaagtgtattgatcagtgagttttgacaaatatatatatatccatgcaaccagcacctaatcaagatacagagcagaggctggcaaattgctatctgtgagccaattcgaccctgtggaatgttttctgtgtggcctatgagtgaagagtgttttttttacatttttagaaggttattctttaaaaaggcaaagaagaatatacaacaaaaaactatacatggccctcaatgcctcagctcatcaagtggcctcaaggggggcaccattttctattaataattt

SEQ ID NO: 939059 - DNA, 612 bp, Homo sapiens
aatctcagtgctgctggcatctaatgggtagacagcatgatgctgcaatgcacaggacagccccccacagcaaagatttctcccatccaaaatgcaggaatgctgaatttgagaaatcctgttctagatctgtatgtggcccccgcttcattaatgaaaaagaacaggtctgccaggcactgttcatatgtgatctcatttgatctttaccttatgtgaggtaggcattagcattccctattctacaaatgagaaaactgaggctcctcatgataaaataacttgtctgtggttacatagaaagtggcagagcttggttaattcatcaactgtctgctgcccmtgatctttgtaagacaccatgctgtgtccccagatcgatgctaaggcatttcaaagactacagccctctctccaaggtagaagctctagcccagtgcatcttaaagccatgtaaactctttgaaactgctatggtttgtatagaagtgtcccttccaaaattcttgttgcaacttaatcctcagtaccacagtatcaagaggtgtggcctttgagaggcacccttatgaaaggtcttgaagttgaaaggagcactatcctgccttttcg

SEQ ID NO: 939060 - DNA, 681 bp, Homo sapiens
cctcacctcctgcagctacacaattctgagggaggctatccctaaggagtaaattgcagtctgactaaatggataacagcacagagttatcctggagtcagacagttgcagttggacttctggctccaccacttctgagctgtgtgaccttcatcaggttactaaatgtctytgtgcttcaaaatcctctactgtagaatcaggataataatagtttctacttcataagattgctgtgaggccgggcgtggtgactcacacccataatcccagcactttgggaggccgaggcgagtggatcatatgaggtcagaagtttgagaccagcctggccaacatggtaaaaccccatctctactaaaaatacaaaaatttgctgggcatggtggtgcgcacctgtagtcccagctactcgggaagctgaggcaggagaattgcttgaacccaggaggcggaggttgcagtgagccaagttcatgccactgcactccagcctgggtgacagagcaagactctgtctcaaaaaataagaaaaatagattgctgtgaaaattaaattagctagtacatgcaaagtatggagacaccggcaggcacccagtgcctctcccatgtgtctgctatcatcatcattcttaggggaccaaagagtaacaaaatctgtggacacacaaaaaaagc

SEQ ID NO: 939061 - DNA, 559 bp, Homo sapiens
ctagcctcaagcattcctcatacctcagcctcactgggattacaggcatgcgccaccacacccggctatcccatacatttatttgtaagtctgacaataagattaggattaaacaaaggtcttatttctacaagaaatattttgaaaattaaaagaatttaaatttcctttctggaaacttttccctcttttttttcyttttttttttttttttttttttttttttttgagacggagtctcgctctgtcgcccaggccggactgcggactgcagtggcgcaatctcggctcactgcaagctccgcttcccgggttcaccccattctcctgcctcagcctcccgagtagctgggactacaggcgcccgccactacgcccggctaattttttgtatttttagtagagacggggtttcaccttgttagccaggatggtctcgatctcctgacctcatgatccacccgcctcggcctcccaaagtgctgggattacaggcgtgagccaccgcgcccggcctacttttccctcttaactggctatcaacagagtatagagacac

SEQ ID NO: 939062 - DNA, 625 bp, Homo sapiens
tgagtgttacagttcttaaaggcggcgtgtccggagtttgttccttctgatgtttggatgtgttcagagtttcttccttctggtgggtttgtggtctcgctggctcaggagtgaagctgcagaccttcgcggtgttacagctcacaaaggcagtgcagacccaaagactgagcagcagcaagatttattgcaaagagcgaaagaacaaagcttccacagcgtggaagggaaccggagcatgttgccactgctggctggggcagcctgcttttattcccttatctggccccacccacatcctgctgatyggtccattttacagagagctgattggtctgttttacagagagctgattggtccgttttgacaaggtgctgattggtgtgtttacaatccctgagctggacacaaaatttctccaagtccccagagagcactgattggtgcatttacacaccttgagctagacacagggtgctgattggtgtatttacaaaccttgagctagacacagagtgctgattggtgtatttacaaaccttgagctagacacagagtgctgattggtgtatttacaatcccttagctagacataaaggttctccaagtcccctctagactcag

SEQ ID NO: 939063 - DNA, 759 bp, Homo sapiens
ccctcctagtgtctatgcatttttcttgttataagctcccacttataagtgagaatatgtggtgtttggttttctgttcctgtgttaggttgcctaggataatggcctccagctccacccatgttgctgcaaaggacatgatctcatccttttttatggctgcatagtattccatggcgtatatgcaccacattttctttatccagcctacagttgatgggaatttaggttgattccatgtctttgctattgtgaatagtgccataatgaacatatgtgtgcatgtgtctttatggtagaacaatttgtattcctttgggtatatacccaataatgggatttttgggttaaacagtaagtctaggttttgttttgttttgatttgtttgagacggagtctcgcactgtcgcccaggctggagtgcagtggtgcaatctcagctcactgcaagctccgcctcccagattcaggccattctcctgcctcagcctcccaagtagctgggactacaggcgcccaccaccacgcccggctaattttttgtatttttagtagagacggggtttcactgtgttagccagkatggtctcaatctcctgacctcgtgatctgcccgcctcagcctccctaagtgctgggattacaggcatgagccactgcgcccggccttgttttgtttttttgggacagagtctcactctgtcacccaggctggagagcagtggcgtactctcggctcactgggacctccacttcct

SEQ ID NO: 939064 - DNA, 573 bp, Homo sapiens
tcaggacagggtggaaggaactggactggaaccatgcctatagggctgtggacccaggctacacaggtgtccagggaagcagggcacagggtcatgtgacatgcaacactggcgcagggatcacaagtaagtgcaaaaacaagtaagcacagactcacaggccaaagggtcacccagccacgactaggctggtcatgtggacacaatggtggtgtcacatacagctcacaggggagctgcctgagtggcaggttttgaatcagaaagagtttgctgaaaagcatgctttctaaaatgatrggaacgattctccagacacacctacagattcagtcagcctcctccccatggtctttggttcctctagggtttctttaactcctctgaaatgtgaagaaggtagcctctccctagggataaacgttttggacaaaagtggtagaactgaaaatgcttatgaggcccttagtgacctctagtgcaaaaataattgtcatccagactggggaacaaacttatctagaagttagacaaggcaattaaattcactttcttaatttgacacttatctgc

SEQ ID NO: 939065 - DNA, 567 bp, Homo sapiens
gatcgtgtgaggtaatacttaataaactccccccctttatatattttctttctttccttccttccttcctttttttttttttttttttggaatgacgttttgctcttgttgccctggctggagcgcaatggcgcagtatcgctcactctgcaacctctgcctcctgggttcaagcgattctcctgcctcagcctcctgagtagctgggattacaggcgcctgccaccacrcccagctaatttttgtatatttagtagagacagggtttcaccattttgaccaggctggtcttgaacttctgacctcaagtgatccgcccgcctaggcatcccaaagtgctgggattaagagccaccatgcctggctctttctttttctttttttttgagacagagtcttgctctgtcacccaggctggagtgcagtgacacgatctcggctcactgcaacctccacctcccgggttcaggcaattcttccacctcagcctcctgagtctctgggactacaggcatgggctaccatgcccggctaatttttgtatttttagtagagatggggtttcac

SEQ ID NO: 939066 - DNA, 734 bp, Homo sapiens
acctctagggaagcatacaaatgggcaggctgtggggctttgaccccacggcagtgtctagtggtgaatgtttacagatcctgaagccccagtgggtatgtattacagagtgctcttttagttttgccttctgtaggtggctcgtgttaactggctcagttagaccctatatcttgtcgcaaggacagagggctttctgtatcctgggttcttgccttggtgtaccagaagaattggatcacaccggggcttggaaaatgagtgcaaccttttattgagggaggtagctctcagcagatggaggaagccagaagggaatggattgggaaggttctcccccggagtcgggcagctcagtggcctagactctcctccgactgcccaggccaaactctgccttattccaccagtcgatatcctgcggtgtgccggtctctgtcgtgtgcccttctgccggtgtgctcccctcaatggcttctcgacatctagctgctcgtgtctttttctgctgatctgctcctcttgatgtccagcagcttgtgtgtctgcctgctagggtctcgggggggttttayaggcacaggatgggggcgcggcaggccagggtggccgtgggaaatgcaacatttgggcaggaaaaatcaaaatgcctgtcttcacttaggtccgtgggggtggagccctagccagggaccatgccctcctctacccagcacttcccttcccacattcag

SEQ ID NO: 939067 - DNA, 547 bp, Homo sapiens
cactgcactccagcctgagcgacagagtgagactccatctcaaaaaaaaaagaatgagatcatgtcctttgcagggacacggatgaagctggaagccatcattctcagcaaactaacaccagaacagaaaaccaaacactgcatgttctcactcataagtgggagttgaacaatgagaacacgtggacacagggaggggaacaacagaccgtggggcctkttgggggtggggggcaaggggagggagagcattaggacaaatacctaatgcatgcagggcttaaaacctagatgatgggttgataggtgcagcaaaccatcacggcacatctatacctatgtaaaaaacctgcacattctgcacatgtatcccagaacttgaagtaaaaataaaatgaaattagaaagaagaatggtctagttgagagagtagaatgggtatccagtttttattgtttgtttcttccttttaatctgcccatcaactcctttactctcttctactcacagcaacactctcctctggagaccttcccctgctccactc

SEQ ID NO: 939068 - DNA, 547 bp, Homo sapiens
cactgcactccagcctgagcgacagagtgagactccatctcaaaaaaaaaagaatgagatcatgtcctttgcagggacacggatgaagctggaagccatcattctcagcaaactaacaccagaacagaaaaccaaacactgcatgttctcactcataagtgggagttgaacaatgagaacacgtggacacagggaggggaacaacagaccgtggggcctgttgggggtggggggcaargggagggagagcattaggacaaatacctaatgcatgcagggcttaaaacctagatgatgggttgataggtgcagcaaaccatcacggcacatctatacctatgtaaaaaacctgcacattctgcacatgtatcccagaacttgaagtaaaaataaaatgaaattagaaagaagaatggtctagttgagagagtagaatgggtatccagtttttattgtttgtttcttccttttaatctgcccatcaactcctttactctcttctactcacagcaacactctcctctggagaccttcccctgctccactc

SEQ ID NO: 939069 - DNA, 547 bp, Homo sapiens
cactgcactccagcctgagcgacagagtgagactccatctcaaaaaaaaaagaatgagatcatgtcctttgcagggacacggatgaagctggaagccatcattctcagcaaactaacaccagaacagaaaaccaaacactgcatgttctcactcataagtgggagttgaacaatgagaacacgtggacacagggaggggaacaacagaccgtggggcctgttgggggtggggggcaaggggagggagagcattaggacaaatacctaatgcatgcagggcttaaaacctagatgatgggttgataggtgcarcaaaccatcacggcacatctatacctatgtaaaaaacctgcacattctgcacatgtatcccagaacttgaagtaaaaataaaatgaaattagaaagaagaatggtctagttgagagagtagaatgggtatccagtttttattgtttgtttcttccttttaatctgcccatcaactcctttactctcttctactcacagcaacactctcctctggagaccttcccctgctccactc

SEQ ID NO: 939070 - DNA, 554 bp, Homo sapiens
aagtttttatttaatttcaataaagtccaatttatctatttttttctttcgttgcctgtgcttttggtgtcatatccaagaagtcattgccaactccaacattatgaatgctttcccttatgttgtcttctaagagttttatagttttagctttttgttcaagtcttagatccaactttgtgtatggtgtgaggtaagggtccaaattcatccttttgtatgtggatacaaaagaaaacagttggcccagcattgtttgttgaatgtattttcattgttgttgtattttctcattgactgatcttggtagccttgttgaaacttagttgtccatagatgtatgggcttatttttgtactcttaactctatttcaytgatgcacatatctatccctgtgccagtaccacactgacttaattactgttgcttcacaataagttttgaaattgggaaatgtgagtcctcttactttattttttttttcaagattgcttgggctattcagggtctcttgcaattctatatgaattttagaatcatctatcgctttcta

SEQ ID NO: 939071 - DNA, 606 bp, Homo sapiens
tggagttgcctctgtagcaggtgccactccaaggcttcatactcagccagagtcagaaatgggacattgatctgagctcgttgatggtcagatggagacatccagtttggggaaagtggggaagagggtggggctgactggggtgaagttttagggagcagttgggggaaggagagctcattgaagagaaaaggatccttcaaggggggcttgggcacattttcaatcttgggraggccttgagatcccatgaaagtggcaaccagggactcactgtgcagagaagggagcccacagaatagctggctgtatttctgctggagatcactccctgagtcattatcttgtcccccagactgtggatgggggccacttagggctttaagggctggagagggcaaggctagagccatagggtttggagtttgctgacagtggtgtctttgttctgggttcattgtggaccattcagaaacccagaaggtctggatgggctggccagccacacatgaacaccaggtctggagggaaatggtctcaaatctatgaagagagacctgaggagtattcttcaggttgaaagaaactggctggtcatttccaggt

SEQ ID NO: 939072 - DNA, 606 bp, Homo sapiens
atacagtcatgtgtcacttagtgacgaggatacattctgacaaatgagtcactggacaatttcattgttgtgccagcatcatagactgtatttacacaaacctagatggtatagcctactacatgctgaggctatatattgcgtagtctattgctgctaggctataaatctatacagcatgttactgtactgaatactgcaggcacttgtaacaaaatggtaagtacttgtatgcctgaacatagaaaaggtacagaaaaaatacagtttaatcttacgagaccaccattgtgtatgcagtccatcattaaccaaaaagttattatgtggtatatgactataattatagactcatggaaaattacaaagatagtacagagaggacatatawgccttttgcttgggttttccccaatggttacattttatataactataataaaataatcagaaccaggaaatttacatttatataatgtatgtgattactttatgccattttatcatatgtgtagatgtgtgtaaccaccactgctatcaaggtacagaactattccatcattataaataatcaggagaaagattttgattgtacattctagagag

SEQ ID NO: 939073 - DNA, 721 bp, Homo sapiens
tgtgtaagggttttctaactggggaaccaggacctggttcttcatggtttcccgaggataacgtggactaagtgtgtctacctggtttgttcttcccttgtgtctgctatgtcaaagagtctgagagtcaggacccttcaaggatggagccagcagtaaattgggggccctcagggagatgggtgtgtaggtgaaggatgaggctgctgaagagggcagtggactctcttcctgaccctgacattctttaagagcacacagccacattgttgagaccaggggtatgcacgtgaawccaaagctatcctattaaaggacaagcaataggacagaaacgacaaaccaggatttaaaggagagatgaacctggtctgaggtggcctagaggatttatggaggagagggtctttgcaggatggatttggactgcatttgtatctgtgggtctgttagatgggttctgtgtgcaaacctgtctttgtgtctgcatgtgtgtttgtgcccgtgtctgctcaggcatgtctgatgcagggtgttcatgggtccatgtgagtttgtcttccttgacgtgtttgtccttactctgaactagtttctgagtggcacggttgacttttgtctttttctgtatgtacctgtgtggtgggatgtctgtgtccatgtgtctttgactgtgtgtatttgattcttccctggccccttactgtatcttccacctccc

SEQ ID NO: 939074 - DNA, 620 bp, Homo sapiens
gttacaactgtaagatgttttatgtaagcctcatggaaatacaaagcaaaaacccataacaaattcccccaaaataaagagaaagaaatcgaataataccacaacagaaaatcatctaatcacaaaggaagacagcaaaaaaggaaaaawtaacaaaggaactacaaaaaagccagaaaacaatggacacaacagcaatggtaagtatttacttattgataatcacttgaaatgaaaatcgattaaattttccaaccaaaagacatagagggataaaaaaataaccaaactatatgcctcctacaaaacagactcacttcggctttaaggacacacatggataaacataaagaaatggaaaaagatattccatacaaatgaaaactaaaagagaacagaagtatagttatacttatatcagacaaaatggactttaaaaccagtaaagagagacatagaagttcacatataatttttttaaaggggtcaattaatcaagagaatagaaacaatcatatccaacacagtgaagcacccatatgaatataaagcaaatattaacagaactcaagggggaaatagcaatacaataatggtaggggattttaatagccactttc

SEQ ID NO: 939075 - DNA, 436 bp, Homo sapiens
actctggtgaaggtttcttccccaaagccactcctcaagctgacttatattgtacctgagttgcatgcctgtgctccaagagcagacgtccttccgcaggagcaggtcattaagagtcactgcgttgatcatgtagaagagctgtttgaatacctacaggatgatctcagsgtccaagccctggtcacacatgactgtatgaaaggcattcatctggcggatgatagcttccaggcggtatgagttatcctcatctgccatgctggaggagtgcttctgggagccagtgggcttcacaccagatagaccctgaatgctctaattttccaacatggcagaaactatcatcggctgtaacacaccctcggcaattttaaagaggtgctggtagatctgaatggaaaggtcgctcagtacctgacggtattcggtgagg

SEQ ID NO: 939076 - DNA, 589 bp, Homo sapiens
ttgggactacaggcgcccgccaccacacccgtctaattttttttttttttttgtatttttagtagagacggggtttcaccatgttagccaggatagtctcgatctcatgaccccgtgatccacccgcctcggccccccaaagtgctgtgattacaggcatgagccacygcgcccagccggttgttctattttacactctcacaagaaatagacatgacttctagtttccccacatatttgccaatattagtattatcattttaaatggtagtctttccagtttcaatgcattttggttgcatttccccttatctaataatattgagcatcttttcacattcctataagccacttgtatctcttgttttgtgaaatacctgttcaagattcttataactatttagtggatctcaggagtactctgtgcgttttgaacacgcaatttttttctcatacatatatggaataatttatcacagtctatggcttaaaattatattttcttacattttgcagttttattaggatacatttttaattaatatctacaatttatcaatttttactcttatgatagtgctttctctgt

SEQ ID NO: 939077 - DNA, 653 bp, Homo sapiens
ctagggaaacagggtcttcacaatgcctgggaaagaaggagagatgaagctcactagccacagaaaaacaggcagttaatttttaaagggctccagctctttctctttctcagggggaattgggttttctcacatacaactgagtttctgcttacacattctttaatttcttttaattcctgttccacttggaccagggccagggcatcactgtcctgtaccacccccaggagggtgttccttgcatcctggcccttctagctcyagccttggttcaaagggctgcagatagagctcaggtcatggcttcagtgggtgcaaactataagccttggtggcttccatgtggcgttaagcctgcaggtaagcaaagtgcaagagtgaaggaggcttggcattctctgcctaaatttcagaggatgtatgagaaaggctggatgcccagggagaagactatgcacggctggagctctcaaagaggacctcttctaggacagtgccaagtggaaatgtggggttggaggccccactcagggtcctgactgggggggcggcctagtggagctgtgggaggggggctgctgccctccagatcccagaatgatagagccaccagcagctcatgccttcagtgtagaagagctgtgggagca

SEQ ID NO: 939078 - DNA, 571 bp, Homo sapiens
ctcttaagcaccttctactggactgaagcctgaattacaccaccaaacaaaaatacatcaccacaccaagccactacaggagcctatctgcaaccaaggaacttgtacagagccttggtcctctgaaagtacccagaaatgaagcaaaatgatcctatacaacatacaccacagtcatacccttaagagaaagaaagaatgaaaaattaaaaaaaaaaaactctttccaaatgatagcaaattcaacaaaggaarcatcaagtctctcagatgagaagaaaccatcacaagaactctggcaatacaaaaagccagaatgttccatcacctccaaaggattacaccagcaatctagcaatgagtcctaaccagaatggaacgtctgaaatgacaggtatagtattcaagatataagtggcaaaaaaaaatcaccaaaatccaacagaaagttgaaatccaacaacaaccccataacaacgatcctggatttgaatgacaacatagccattttgagaaagaaccaagcagagcttcttgcattgaaaaatttactataggaatttcaaaaaac

SEQ ID NO: 939079 - DNA, 610 bp, Homo sapiens
cttccagtactttaaagatgttgcttcattatcttctaattttctttgtttccaataaaatgtttgctggcattttttgttcctctgtgcaaaccgtgtttttgtcattggctgctttgagaatttttctttatcactagttttaagcaattttattttagtgtattttgtrcacaagacaaggatgccctctctcaccactcctgttcaacatagtattggaagtccttgccaaaacagttaggcaagagaaagaaataaaggtacccaaataggaagaaaggacgtcaaactatccttgtctgtagattacatgatcctatatgtagaaaactttataggcccaaaagcttaaggcccgaaagctccttaagatgaaaaacacctttggcagagtctcaggatacaaaaagaacatacaaaaatttactcgcattcccatacaccaacaagagtcaagcggagagccaaatcaggaatgcaatctgattcacaattgctgcaaaaagaatcaaatacctaggaatacagctaactagtgaggtgaaagatctctgtaagaactaaaaacaccaaagatatcagagaggatgaaacaaatgaaaaaaca

SEQ ID NO: 939080 - DNA, 544 bp, Homo sapiens
ttattaaaacctccccttctgaggtcatgctttggtgagtatttacatgggacacagatatcttcatatctttgcccattcatagaggtctattcacattgctcttccccaggtatctttgtcatcaattttccaatcatgttgcttccaaatccctgatcacccagaatgtgtttcctctaaaatccaaatagatgcaccaggcatagtgcctctctcttgggtgtaagaggggccagacacctatccttcaccttaaaagggctatctggacaggtctcacaccaytggaccctataaatttcacgaggaagtataagtcccttgaattttagccagatttatttgtactttttgacacacaaatgtcctaccaatgagttcagactcactaggtctaattggcacaatgttatcaatataatggaccagtgtggcatcttgtggaaggacaagtggtcgagaattctgtgaacttgattatgacatggggctgcagaattgatatactcctgaggtatgacagttaaggtgtactgctggc

SEQ ID NO: 939081 - DNA, 547 bp, Homo sapiens
cgggcaggagtgggggccacaaggtgctcaataggggagcttttgagccaggatgagccagaaggaatttcacaagataatgtcatcagtgaaggcaggaacaggtcattttcacttcttttgtggtggaatatcatcagttaaggcaggaactggccatccggatgtgtacgygcaggtcacaggggatatgatggcttagcttaggctcagaggcctgacattcctgtcttcttatattaataagaaaaataaaatgaaatagtggtaaaatgttgggatggtgaaaattttttgggggtggtatggagagataatgggcgatgtttctcaggtctgcttcaagccggattaggggtgagcgtgggaacctagagtgggagagattaagctgaaggaagattttgtggtaaggggtgatattgtggggttgttagaagaaacatttgtcatttagaattattggaaggaggttcagcatagccttgccagcaaagattgtttatttactttaagagttaagagtggcggtttggggatagcacca

SEQ ID NO: 939082 - DNA, 545 bp, Homo sapiens; identical to SEQ ID NO: 933823

SEQ ID NO: 939083 - DNA, 586 bp, Homo sapiens
gatctcaccttaactggtgagttgtgaaaggggatgaatttgtcccaaaccgtgtaggtctggggtgctaaggctctccctaatgggaaataaacaagggtggtagggtgctgccaccactccgtgcagtggctagaaggctcacgcctgtaatcccaacattttgggaggccaaggcgggcagatcacttgagatcaggaatttaagaccagcctggccaacatggcgaaaccctgtctctactaaaaatacaaaaattagccaggygactaatttttggtgacgggcacctgtaatcccagctacttgggaggctgaggcaggagaatcacttgaacccaggaggttggaggttgcggtgagctgagatcaggccactgtactccagcctgggtgacaaagtgagaatccatctaaaaaatatatatagatatatagatatagatatatacctcaataaaattgtttaaaatttttttaaagacatacaaatggccaagaagtatatgaaaaaatgttcagcatcactaatcatcaggaaaatgcaaatcaaaaccataatgagatatctcatctcagttaaaa

SEQ ID NO: 939084 - DNA, 586 bp, Homo sapiens
gatctcaccttaactggtgagttgtgaaaggggatgaatttgtcccaaaccgtgtaggtctggggtgctaaggctctccctaatgggaaataaacaagggtggtagggtgctgccaccactccgtgcagtggctagaaggctcacgcctgtaatcccaacattttgggaggccaaggcgggcagatcacttgagatcaggaatttaagaccagcctggccaacatggcgaaaccctgtctctactaaaaatacaaaaattagccaggcgactaatttttggtgacrggcacctgtaatcccagctacttgggaggctgaggcaggagaatcacttgaacccaggaggttggaggttgcggtgagctgagatcaggccactgtactccagcctgggtgacaaagtgagaatccatctaaaaaatatatatagatatatagatatagatatatacctcaataaaattgtttaaaatttttttaaagacatacaaatggccaagaagtatatgaaaaaatgttcagcatcactaatcatcaggaaaatgcaaatcaaaaccataatgagatatctcatctcagttaaaa

SEQ ID NO: 939085 - DNA, 586 bp, Homo sapiens
gatctcaccttaactggtgagttgtgaaaggggatgaatttgtcccaaaccgtgtaggtctggggtgctaaggctctccctaatgggaaataaacaagggtggtagggtgctgccaccactccgtgcagtggctagaaggctcacgcctgtaatcccaacattttgggaggccaaggcgggcagatcacttgagatcaggaatttaagaccagcctggccaacatggcgaaaccctgtctctactaaaaatacaaaaattagccaggcgactaatttttggtgacgggcacctgtaatcccagctacttgggaggctgaggcaggagaatcacttgaacccaggaggttggaggttgcggtgagctgagatcaggccactgtactccagcctgggtgacaaagtgagaatccatctaaaaaatatatayagatatatagatatagatatatacctcaataaaattgtttaaaatttttttaaagacatacaaatggccaagaagtatatgaaaaaatgttcagcatcactaatcatcaggaaaatgcaaatcaaaaccataatgagatatctcatctcagttaaaa

SEQ ID NO: 939086 - DNA, 562 bp, Homo sapiens
acaaaaaaatcacagccaaggtcagcttacctagaacagaagctgttggagccataagctggtatctaccctcaaatggtaactctgatgaattgctagaagtatagactagcatgaaaatgagaaactcctcagagctgcagttttgggggcctcaaactttctcagttttacctccatgaacctcatcaaattgtcatggtgaagagtcaattttttaaaatcccatgtttttggatgggataaaggraaagtaacaattttgaaatatatccagagtattctccttaacaaaggcccagtcatcaatggaaatgactttaatcagagctttgtctgatgtggggaaagggaaattatctaactccaaccccctttagacttcctctctcatctaaggagaaaaaaagctgaggaacacttgtgatggtcacagttcagggacacaggcccaataaaagactgacacttagttatagaattataggaccctataatttttaccccatacctcaccaacatatcaacagggttccagtgtaataacagtagattatataca

SEQ ID NO: 939087 - DNA, 617 bp, Homo sapiens
ggatctcatgagtgcctgcatgcatacttccctgggaattttctaaatttgaattctcatggtatttcaagtggcatagttgtctctttcttttgcctacagccacatacataccaccaaatcctgcactccaagcttctccttcctcaccctgaactcccaacctccagttagacaatccacatcttcccacacctgcctcaggctccatcaggccactgtgcctcccgcagcaaccaggccagggggaatctggattcctattacacttctgaggaaggtgatcagggggcgtggaggatgtgggtgggaaggggtgagaatttgaaggcaggagtacactgtggtcttctgtcttctacctcrttggcccagtgctgctcttcctccggttgtctgctttcagccctgtgtagggaatcaggtctgcgccctcatcttcctgactctcattttctgaggaacctgaatggatgagccgtcgctcttgtcccacacattgtgtccaaaggtgccctcctctctacttgctccggtgcctgctctctgagctctgacactcaggctgggatgccgcccagtacagaagctctgcagccctgcagggctctgactgt

SEQ ID NO: 939088 - DNA, 603 bp, Homo sapiens
gggacaccaggcaccaagtcctgaggctacacacagcaggggccgccggatccaacccaggaaaccatttttatctcccggacctctgagcctatggtggaagaggctgccaggaaggtctctgacatgcactggggacattttccccattgtcttggcaataaatattaactcgttagttatgtaaatttccgctggcttgaatwtctcctcataaaatggggttttcttttctctcacattgtcaggctgcaaattttccaaacttttatgctctgcttcccttttaaaaataaattccaattctaaagcatatctttttgtgaatacataaaaccgaatgtttttaacagcacccaagtcacatattgaatgctttgctgcttagaaatttcttccaccagatgccctaaatcatctctctcaagttcaaagttccacagatctctggggcaggggcaaaatgctgccagtctctttgctaaagtataacaagagtcacctttgctgtagttcccaacaagttcctcatctccatctgagaccacctcagcctgcactttattgtccatatcactagtattagaattttggtggaaacca

SEQ ID NO: 939089 - DNA, 548 bp, Homo sapiens
gtcggaccgcacgggaaagccccgattctccagctccgcgcgagctagaattccacctggaggtgaatctgcgtctcgcagttggaccgaacagcctcaaagtccacgttgccctccgcggtctgtagttcagaccagtattggttttaatgaccaaayaccaaggcgtggcaagtggcctgttatgagctttaattttgttattaatgtttatatccatggtgactgttaggatttcctcaagggtgaacgcggagatgggagggggttacagcgtttttaaaatatggcattaaatgggcatgttccaatttcactagagggtcgttccaaaacaaagctttaaatgacttacgggttaagaaaacacaagcaaaaggacgctgcccgtgcagcactcagtcgttacagcctgcctaatgcccgagtagaggctcgctgtgtgcccttggctagattcgcaagaccatccgttcacgcagcgggaaacgcaggcccggggtgcaggacttgccccacgcacagccgggtggcgtggagacccaccc

SEQ ID NO: 939090 - DNA, 619 bp, Homo sapiens
caacaaaaacatgcactggggaaatgacacccttttcaataaatggtgctgggaaaaatggatagccataattcagaagaatgaaactggacccatacctctcatcatatgcaaaaattaactcaagatggattaaagacctaaaagtaagactgaaaactataaaaatcctagaagaaaacctaggaaaactcttctggacattggcctaggcaaagaattcatgactgagtccgcaaaarcaaactcaactaaaacaaaaatagacaaatgggacttaaactaaaatgtttctgcacagcaaaagaaacgattgacagagtagacagacaatctaaaggatgggagaaaatatctgcaaactatgcatacgacaaagagctaatatccagaatctacaaggaaccccaagaactcaaccagaaaaaaacccattaaaaagtgggcaaaggatagatataaacacattattcaaaagacagacaaactgccaataaatatatgaaaaaatgttcaatgtcagtaatcaccagagaaatgcaaatcaaaaccacaatgagataccatctcacaccagtcagaatagctattattaaaaagtcaaaaaatggggccaggt

SEQ ID NO: 939091 - DNA, 555 bp, Homo sapiens
tataccacccaaccatagcagaatatgtagtattttgatgcacacataaaacattcatcaaaatagactatttgctgggtaataaaacaaatctcaacaaagttaaaataactgaaattatccaaagtacgttctctggccaaaaaraaattgaacgagaaatacgtaatagaaagatatcaagaaaaaaggaaacatctggattaaaacacacacacacacacacacacacacacacacttttaaatgacccataggtgaaagaagaaatcataacgaagttataaaaatattttgaactgaatgaaaatacaagaacaacataccagaagttgcaggacacagctaaagtggtataaagagaaaaagttatggcaataaaggcttatactggaacacaggaaaggtctccaatcataatctaatcctagtttatgctttcatcttaagaacatagaaaaaagaaaagtaaatgcaaagtaagcgaaatagaaataatagagatccttctgcatggatgggagctgcaagcccagcgcttgtgtctgagcgtgg

SEQ ID NO: 939092 - DNA, 591 bp, Homo sapiens
atggatcagaagcgtgacacaaatctcactggacaaagatcgaggtattggcagggctgagtttctttctgaaggtcctaggggagaatggatttccttgcccttcccagcttctagaggccacctgccctcctcggctcrtggctcccttcctccatcttcaaggccagcaacactgggctgagtctttctcaagatgctgcctctctggttctctcttcatattccatcttctacttttaaggtcgtttgtgattacattgggcttacctgggtaatccaggctaaacttcctgtcttaaagtcagctaattagcaactgaattaatttcatctgcaaacttaattcttctttgccaggtatgctaacatattcacaggctctgaagttcaggacatagacatctttaaggggacattattctgtctaccacatcacacaattcattcacgtaaaatgtacaattcaatgatttttaatatattcacagggttgctggcaaccaacacgatcaggtttagaacattttcatcacctggaaaagagacatgcagcgattagcagccactcctatttcctcccacctcccc

SEQ ID NO: 939093 - DNA, 537 bp, Homo sapiens
caatttactaaagaaagaggtttaatggtttcacatggctgaggaggcctcacaatcatggcggaaggcaaggaggagcaagtgacgtcttacatggatggcagcaggcaaagagagagaacttatgcaggggaactcctctttataaaaccatcagatctcataagagttattcactttcacgagaacagcacgggaaagacttgtcccatgattcaattatctcccaccagstcactcccacaacacatgggaattcaagatgagatttgggtggggacacagccaaaccgtatcattcactttgagttaattttgcatatggtatgagttaggggtccaatttcattctttagatgtgcatatccagttgttccagcaccctttgtgaaaaaggtgattatatcttcactggcacttttgttgaaaatcaattgatcataaaagtaagagtttatttctggactattgattctgttctgttaatctattatttgaaatcagaaggtgtgagttctctaattttgttcttctttt

SEQ ID NO: 939094 - DNA, 562 bp, Homo sapiens
agaggggtcctgccctatacctggaggccaaggagaatctgagcaaagaagccttgctaaatttccctcagtttattaccattaggtcaaccccccgttttgtccagtcatacttctacaagacttctctttcttttttttttttttttttttttgagatggagtctcactattgtcacctaggctggagtgcagtggtgcaatctcagctcactgcaacttccrcctcccaggttcaaatgattctcctgcctcagcctcccaagtagctgggattgcaggtgccctccaccacccccggctaatttttgtattttgcgtagagatggggtttcaccatgttggccagcctgctctcaaactcctgacctcaagtgatccacccacctcagcctcccaaagtacctgacttttcaatcttcatcaaacctaagcatacaaatatacagttttccctgagtttgggggtcttttctgaaggctcccgttcccataattttttttttttttttgtcatccaggccggagtgcaatggcacaatctctgctcactgcaacctcc

SEQ ID NO: 939095 - DNA, 562 bp, Homo sapiens
agaggggtcctgccctatacctggaggccaaggagaatctgagcaaagaagccttgctaaatttccctcagtttattaccattaggtcaaccccccgttttgtccagtcatacttctacaagacttctctttcttttttttttttttttttttttgagatggagtctcactattgtcacctaggctggagtgcagtggtgcaatctcagctcactgcaacttccgcctcccaggttcaaatgattctcctgcctcagcctcccaagtagctgggattgcaggtgccctccaccacccccggctaatttttgtattttgcgtagagatggggtttcaccatgttggccagcctgctctyaaactcctgacctcaagtgatccacccacctcagcctcccaaagtacctgacttttcaatcttcatcaaacctaagcatacaaatatacagttttccctgagtttgggggtcttttctgaaggctcccgttcccataattttttttttttttttgtcatccaggccggagtgcaatggcacaatctctgctcactgcaacctcc

SEQ ID NO: 939096 - DNA, 793 bp, Homo sapiens
tattggtagtgattcaattgtctttctggaaaatactaatttcagttcactaattttaacccatccactttctcttgcagatacaaagagaatgtgcagggagaaagcagagttttctttaatcctggagctgtggatgatggacagagaaactggctgctttctctctgcaaactctctgaaaaagccccagtccctcctccctgcagtccctgcagcccctctctttaccctcccaaaacctttagtgcttgtgatttatccagctcatgtaggtactattcacagtaaccaaaatctcccaccattattaacacaaaaggaaaagaggataaatccattccccatctctacccctctcagagcaagacagccaccccaaacattccttaatctccagaattttcccactagtgataatgaatagttaagatcaaccctttgggtgcatattcctaacctcatttcccaagtgtagctgactgatttgaaacattttctaaagtcaaaaacttgcacttgaatttgcagataatttgctggagatacctcgtggtycccagtaccatatctgagagtaaatcacgcagtaaagtaattagccattgtgaaagatgggggtggtagctgcttgttattagggattctataaatttgagatctctctctcatatatgcatgtataatgtactctatatatataataatggaagtaaactacatattaagcaacatataatgcatatattcatgtacatgtataatatacagatatattatacataactaaata

SEQ ID NO: 939097 - DNA, 552 bp, Homo sapiens
aagggctacctggagccgggcgcggtggctcacgcctgtaatcccagcactttgggagggcgaggcaagcggatcacctgaggtcgggagtttgagatcagcccgaccaacatggagaaaccccgtctctactaaaaaaaaaaaaaaaaaaaggcaaaaaatgagccgggcatggtggcacatgcctgtaatcccagctatttgggaggctgaggcaggagaatcacttgaacctgggaggtagagattgcggtgaagcgagatcacgtcattgcactccagcctgggcaaaaagagcaaaactcagtctcaaaaaaaaaaaaacaaaagaaaaaaaaggctacctgggggccaggcatgtacacatagagggtctatcttccstggttttgttatcacatgcacagtaacagagaaatgagcactatgacgcagctcaggcagagaactcacctgaagaataaaagattagggtggggccaccagaaattcacaccctatgcaaatgacacacctggtctaaccagtttgtccatgacttatataaatcag

SEQ ID NO: 939098 - DNA, 650 bp, Homo sapiens
catgatgacaggatcaaaatctcacatatcaatacaaatcctaaatgtaaatgatctaaactccacaattaaaaggcacagagtgccaaactgaataaaaagacaagacccaagtgtatttggtcttgagagatccatctcayatataatgacatccaaaggctcaaagtaaaggatggagaaagatctaccatgcaaataaaaacaaaaaaatgcaggagcatctattcttacataagataaaaaagactttaaaccaaaaacaataaagaagagcattacaaaatgataaaggttcaattgaacaagaaggcttaagtaccatggtaccatatctatgtatcctttacgtaatgatatttctcagcctgttctgtcttgctaattatggctatactgtagtatatttttgttggttctatagcttttgattttaataattttacatgtttattcatttaattatttacatatttcttgaatatctctcatatcatcagactgtttcttattcctataatgaatgagaagaactatcattggcattccctttttgtaatttacaaacttgaaaaaaagacccaaattctgttaggagttttacaggggaaatgtatgagccattcttgacatctgagaccttgtctagt

SEQ ID NO: 939099 - DNA, 650 bp, Homo sapiens
catgatgacaggatcaaaatctcacatatcaatacaaatcctaaatgtaaatgatctaaactccacaattaaaaggcacagagtgccaaactgaataaaaagacaagacccaagtgtatttggtcttgagagatccatctcatatataatgacatccaaaggctcaaagtaaaggatggagaaagatctaccatgcaaataaaaacaaaaaaatgcaggagcatctattcttacataagataaaaaagactttaaaccaaaaacaataaagaagagcattacaaaatgataaagkttcaattgaacaagaaggcttaagtaccatggtaccatatctatgtatcctttacgtaatgatatttctcagcctgttctgtcttgctaattatggctatactgtagtatatttttgttggttctatagcttttgattttaataattttacatgtttattcatttaattatttacatatttcttgaatatctctcatatcatcagactgtttcttattcctataatgaatgagaagaactatcattggcattccctttttgtaatttacaaacttgaaaaaaagacccaaattctgttaggagttttacaggggaaatgtatgagccattcttgacatctgagaccttgtctagt

SEQ ID NO: 939100 - DNA, 753 bp, Homo sapiens
attttttgattagaccctttcactttttttttttttttaaatgtttaggatcagaggtatatgtgcaggtttgcggtacaggtaaattgtttgacgcaggtgtttgatgtacaacttatttaatcatcaggtaatgagcatattacccaataggtagtttttattcatatagaaccaaaatagagctcaaatagtcaagacattcttaagcagaaagaacaaaactggagaaacatcacattacccgacttcaaacgatactgcagggctacagtaacaacaacaataacaaaaaagcatagtagtggtacaaaaayagacacatagatccaatggaacagaatagagagcccagcaataatgctgcacccctacaacatctgatcttcaacaaaagccataaaaacaaacaatggggaaaggacccctcccattcacttatgtttttaaggttcttccacattgtagcatttgtcactacttcatttcctttaattttcaaataatattccattgtaggataagacatgttttatttatccatctataagttcacacacatttgagttgttttcactttttaaaattatgagtaaccctaccatgaacatgtctgtgcaagtttttatgtggatttgtgttttcaactatcttcagtatataactcagaatggaagttctgggtcatacagtaactcaatgcttaacctaatgaagaagtgccagcctgtctttcaaagtgaccaaaaccat

SEQ ID NO: 939101 - DNA, 601 bp, Homo sapiens
tacttgctgcttcatcttgcacttttatgctgtggacatgacttcttttcttaaacctcatgaagcaacctccactagcttcagacttttcttcagtagcttcctaacctctctcagccttcatagaattggagagttagggcctcacaatgaattaggattcagtgtaaggaaatgttgtggctagtttgatcttctatccagactactcaaactttcttatatcagcaacaaggctgtttcttttttatcattcatgaatttgtaactggctcaagtctggctgctcgctcctcagaggctgaaaacatgagaagctaggtgtggtgaaaccaaagcagctttattgttcaaatgctaaagaygggaggatggactggctcaagccttaaagaaaccatctcgactttttgaactcagtgaacgggtttaaggaaaacgtgggaaatatgcaaaggtggtgcaggagggtgcaggtctgtgtgtcttattcccatggatatcttgagtaatcgcttgtccagaggtggggtttgtgtcatcctgaattcaacccagcaatggtagggtactgttcataactcaccctaagccagaagat

SEQ ID NO: 939102 - DNA, 615 bp, Homo sapiens
atataagtatagctactcctgcttgtttttgtcttatgtttgtctggtatatctttttcacccctttattttgagtctgtgtgtgtatttatctgttaggtgggtctcttgtcggcagcaaatggttgaatcttgttgtgttttgttctatccaattttccagtctatacctattaactggagcatttaggccatttacgttcaaggctaatattgatatgtgaggttttgttcctgtcataatgttgttacctagttgctttgtaatcttgattgtgtaatttctttgtaggrtgtgacctttgtacttatgtgtgcttttataatcctgagtacatcctttcccttcatttttatgtttagaattcatttgagcatttcttggagagccagtgtactggtaataaattccattagcatttgcttatctgagaaagatttcatttctccctcattgatgaagcttagtttagcaggatatgaaattcttggctggcattgttttcttcaaagaggctgacaataggaccccagtcctttctggcttttaaggtttctgctgagaagtcaactgttagtctaatgggatttcctttataggtgctttgatgcttc

SEQ ID NO: 939103 - DNA, 453 bp, Homo sapiens
ggcaaaaccctgtctctacacaaataaataaataaataaataaataaataaataaaaatacaaagcttaggagggcatgatggtgcaagcctatagtcccaggtacccagtactataggaaactacaaacctctattgttagatttgtcatctattattccgtacaaaagcattctatgrattccattgctacagtcatgttttgcacattgggatatataaaatagtggaggaattttctgtttcagtggaaatttatgcatatttacagcacactcttcctggtacttctgactctatgggggctctgcactttttttttttttcccagacagagtctcaccctgtaacccaggctggagtgaagtggcatgatcatggctcactgtggcctcgacctcccctgggctcaggcaatcctcccacctcagcttcccgaatcaggcacatgcc

SEQ ID NO: 939104 - DNA, 623 bp, Homo sapiens
atggtaatgtcaagcaaataaagagaatgtaaatgaggaactggtgaggaggccaccctttgagaagatggaggtgagaggggaaagagaggagttagcacacgccaggcaacggagtgggggtaatcactcactctgtctctctccatcagtctggggttgccagggtctttgaatggcaragaaaagagagtggagagaactgggatggggggacacagggccctggccctcagtgactgctccccaaaggcattaattagatatcactgcaaaatagcaaaaccagagtaaaacctcccccaggacttcactcacacaatgaccaggctctttcaccaagccctcccaggtccctccctccctgcttttacatcttacataaggaggcttctattgtgctaatatccaaggaaaaaagtgactaagggtgagtgtgcgactaaggaaaataaagaaggaagagagcctccaaggcttgcccccacccccagtttcttggctcactccacgattccgtcagttcgcaggctctgacataaaaggcaggaagctacacacgctaaacaaagctccttagatgtcaggaaattaacctgggaaatcggagccaagagagatta

SEQ ID NO: 939105 - DNA, 623 bp, Homo sapiens
atggtaatgtcaagcaaataaagagaatgtaaatgaggaactggtgaggaggccaccctttgagaagatggaggtgagaggggaaagagaggagttagcacacgccaggcaacggagtgggggtaatcactcactctgtctctctccatcagtctggggttgccagggtctttgaatggcagaraaaagagagtggagagaactgggatggggggacacagggccctggccctcagtgactgctccccaaaggcattaattagatatcactgcaaaatagcaaaaccagagtaaaacctcccccaggacttcactcacacaatgaccaggctctttcaccaagccctcccaggtccctccctccctgcttttacatcttacataaggaggcttctattgtgctaatatccaaggaaaaaagtgactaagggtgagtgtgcgactaaggaaaataaagaaggaagagagcctccaaggcttgcccccacccccagtttcttggctcactccacgattccgtcagttcgcaggctctgacataaaaggcaggaagctacacacgctaaacaaagctccttagatgtcaggaaattaacctgggaaatcggagccaagagagatta

SEQ ID NO: 939106 - DNA, 735 bp, Homo sapiens
tgagatggtgaggagctatctatttccgcacagcccccaccactggtcccctgtaacacccctctttactcactcatctgacctgactggcatctgcaggcatttggggctgtcatcctagcataggggggcagacttgggcaaggtgtctctgtgaggggccgggatarcagcacagagctacctgtgagtctggaggcccaggacatgctgttggggagacggtagagaaagggggtgctgaaatggagtgagggatagagggagagagctgaaacacactaaaatgtgacgggaccacctccatactccacctcctaccttacttgcattgattactgccagatgtttcttggaacatcttgatctccagcccccaaacccttttcttctactttcttccagtacttagaacaatgccaaccacacagaaagaactcaagaaatgtgagttgttcacaataaaatgcactcgattcagaatgcctccatcagactcccccggctattgcttcaacttgtcactctccccgctgaacgcttctgtattctccctccttcttaagctcacactgaatctctgctgtcatgtcccactgagataggttttttaattccaggccttcacccaagtggctggctgacccagccaaatgctggcacaacatgggatgcaatttgctcgctattctcagcatggtcctggaagctgagtcaaaattattatccaagcca

SEQ ID NO: 939107 - DNA, 735 bp, Homo sapiens
tgagatggtgaggagctatctatttccgcacagcccccaccactggtcccctgtaacacccctctttactcactcatctgacctgactggcatctgcaggcatttggggctgtcatcctagcataggggggcagacttgggcaaggtgtctctgtgaggggccgggataacagcacagagctacctgtgagtctggaggcccaggacatgctgttggggagacggtagagaaagggggtgctgaaatggagtgagggatrgagggagagagctgaaacacactaaaatgtgacgggaccacctccatactccacctcctaccttacttgcattgattactgccagatgtttcttggaacatcttgatctccagcccccaaacccttttcttctactttcttccagtacttagaacaatgccaaccacacagaaagaactcaagaaatgtgagttgttcacaataaaatgcactcgattcagaatgcctccatcagactcccccggctattgcttcaacttgtcactctccccgctgaacgcttctgtattctccctccttcttaagctcacactgaatctctgctgtcatgtcccactgagataggttttttaattccaggccttcacccaagtggctggctgacccagccaaatgctggcacaacatgggatgcaatttgctcgctattctcagcatggtcctggaagctgagtcaaaattattatccaagcca

SEQ ID NO: 939108 - DNA, 579 bp, Homo sapiens
caccaagtctgtgtttcattatactgaattagaagataataacacgagaaagaaaaaaatggtgattggcagccctggctgcacattagtttctccttgggagcttttttaaatcatgatgtccaggctgcaccctagactgattaaaccagaatacgtaggagtggaacccagacatcaggatttgcttaaagctcctcaggtgactttagtgtgcagccaagtttgagaatgactaagagatgtttcaaaggaagacttggtaatagttggctagcaagcgggaagaccgagagagaaggaggaaagaggtgactttaagattttyaacttggatgaaggcagaaagggatgtgagtggggaaatgaggagtttattctcacagtcatttactttgccatcatagtgtgacatccaggtggaaatacccaatagatgccttggcaaagtgaaccacgggcttcagaggagtcaaggctatatcaaggtcaacacctcatccagtgctgtgctgggggcagctcacaccagctccagggaagcaactattaaatattctgaaattttgcaagccagtt

SEQ ID NO: 939109 - DNA, 580 bp, Homo sapiens
cttcaattcttcatttttaaaaatttctgtcttccatccagatgctgtaatttctcatctggattctttagctcttataaaagcattttttttgcatgaatagttgttttaaattgatgtttccaagagaggataggagctgaaaacttctgttccatcgttgccttagtatattttgagctgttataacagaatgccacagactggatgatttataatgaacagaattttttttgkcccacagttctggaggtcagtaagtccaatatcaaggtgccagcatcaggtgagtgccttcttgctccatcataacatggcataaagcatcatgacaaaagggcaaagtgagagagagagagagagagataaaaggggactgaattcattcttttataagaaagccattcccatgataataaatccactccatgcaataatggcattaatccacttatgagggccaagcctcatggcctgatcacctcttaaaggtactaccttttaatactgttacaaatggcaattaaatttcaggtgagtttgggagaggacaaacattcaaaccatagtggctattttg

SEQ ID NO: 939110 - DNA, 580 bp, Homo sapiens
cttcaattcttcatttttaaaaatttctgtcttccatccagatgctgtaatttctcatctggattctttagctcttataaaagcattttttttgcatgaatagttgttttaaattgatgtttccaagagaggataggagctgaaaacttctgttccatcgttgccttagtatattttgagctgttataacagaatgccacagactggatgatttataatgaacagaattttttttgtcccacagttctggaggtcagtaagtccaatatcaaggtgccagcatcaggtgagtgccttcttgctccatcataacrtggcataaagcatcatgacaaaagggcaaagtgagagagagagagagagagataaaaggggactgaattcattcttttataagaaagccattcccatgataataaatccactccatgcaataatggcattaatccacttatgagggccaagcctcatggcctgatcacctcttaaaggtactaccttttaatactgttacaaatggcaattaaatttcaggtgagtttgggagaggacaaacattcaaaccatagtggctattttg

SEQ ID NO: 939111 - DNA, 625 bp, Homo sapiens
ctcccagagtttggaattgggacttagatagtttgagttggtgtttggctaagggagtgtcaagaagaacttatagaaagaggtcttcaaaatcaaaaagccttctcagagagcaagtatgtgtcccttacctgaatcaaatctctcctctccctctcctcctcctaagtagagaaagctggcagccatttgccaaggttcttggtctgagggattcacatatcagaaaattatttcaatcacataaaaccgttaaagaacctacaaactctgagaggctgtagtacawgatgatgtcaggtgattccatggatggattcttttactttaatgcttatgttgattagtttattttcatgtatttcagtaaaagaaaaaaaaatacttctaggacatcaagctcatgaattaatgaatattgtttagaaaaagggctaattggaggagccaagatggccgaataggaacagctccggtctacagctcccagcgtgagcgacgcagaagacggtgatttctgcatttccatctgaggtagcgggttcatctcactagggagtgccagacagtgggcgcaggtcagtgggtgcgcgcaccgtgcgccagatgaagcagggcgaggcat

SEQ ID NO: 939112 - DNA, 587 bp, Homo sapiens
cataggagctcagcatgggtgcaaacagtagacagccttttgggaacactttagggtgactgcatccccacagaaggagtaccctccaggttcagacttgcatgaggaatagagatcaccatccctctctacatggaatatcracattcctgcaaatgaaaagaggtgcctgtctgatctgaatagccagaacactgggtcaggagtttgactggaaagtggatagctttcctgctggactggcagggaagctgaggtggctcccacttttcctcctgataagacctcagtgtgtttcactgagaactcccccagccatttctgtcaaggctgggacctctgcccaccattgggtattgcgtttacccaactgctttagccacagccaatgtttaaccatggacacctgctctactggcctgaagcctgaactgttcaacccagtaaatgaaatactgggggaaaaataaataaataaaaagtgcacaccactggggagtgagataagcttcaagaggcctctgccattcccacaggagacagtgaatctgctcacacaccatgcatattgctactacacccagcat

SEQ ID NO: 939113 - DNA, 653 bp, Homo sapiens
tagaatggtgggaaagccttttgaagtcacaattacaaggccaactaggtgacaatactttgcagggctagggcaaagttctccaaaaggctgtgtatcctctgaatcaatgcccaatatatggtactgtttctcccatagccaggattcacgggtccaggaatcaaggtgtggaagtgtgacaccactcacgatcacccttagtgagtcactagcaacattttagctttctgttcccacaacattacgttctgctggcctagaggtcttagttccagagggagaaactctgccaccaggagacaaaacaatgattccattaaactggaagttaagattgccacctggacaytttggactcctcctacctttaagtcaacaggctaagaagggagttatagtgttggctgggatgattgacccaggctatcaagatgaaatcagtctcctacttcacaatggaggtaaggaagagtatgcatgaaatacaggagatcattagggcatctcttagtattaccattccctgtgattaaggtcttccatcatggaaagggcagaggtttgtcatcactggaatagacacttactctagatatgggtttgcctattctgcatgcaatgcttctgccaagactatcatctgtgaactc

SEQ ID NO: 939114 - DNA, 512 bp, Homo sapiens
cttgattgagaactccccccaggtattctgagttcaccagagctcatctgggttcagactgggctcagaaagctggccacggcaggcagagggacactggtgaaattccaccggcccctctggcaaggctcctgagaatgctgggaagaggtcaggtcggtccttggaggactcagcacagccctggaatctggccgttttggcctgaagatggcacagcaaccatctgaggccccaagaaggaactggcagctcctccacccaccctccccagttagcaggaaccctggcctctccttgaggtctcttgctgcaaatgccctgctaaaactcaggatgggctagtctcagaaagtactggtctcccctgagtgaaggggctaccagggacttcgaggactgcctctgcaaagctgatgcttcgtgcagagtacaaagccccttracatgcattgcccccattcgacctgtctacatccctgggaggtgagcagggcaggcaggagccagca

SEQ ID NO: 939115 - DNA, 800 bp, Homo sapiens
gtgctgtgggagaattagaaagggagaggaggaatccaggaagactccctggaggaggaagagttactcctagtcttgaaggatagggccatagagttgttagataaaatacagtatgatcaattgaattcaaatttcagagaacaacaaatatgtcccaatattgaatggggcgtacttagctaaaaaaaaatctggtgttggccgggcgaggtggctcaygcctgcaatcccagcactttgggaggtcaaggtggtggatcaagaagtcaggagttcaagaccaacctggccaagttggtgaaaccctgtctttactaaaaatacaaaaattagccggacgacaaaaaatacaatattttttgtattgtatatatatatatataaagtatttatatattgtatatataaaaaatacaaaaattacaggatgacactcctgtaatcccagctactcgggaggctgaggcagagaattccttaaatctgggaggtggagtttactgtgagccgagatctcgccactgcactccagcctgggcaacagagcgagactccatctcaaaaaaaaaaatttgttgtttatctaaaattccaagtcaagtgggtgcagagaatcaccagcagaagggagagtactagcaaaagcaggagcagctatgagcaggggctgtttgtgtagctggagcagagaagctgttgggagggggagtgcaacaacactggtgaggtggggccagcccagggaaggcctgtgaagccaggctctgggtttggatttggctgtacaagccactgtc

SEQ ID NO: 939116 - DNA, 571 bp, Homo sapiens
tgaaaggcatttcttctctatgtatttgatgtttttagcatactggctgggctttaaattcctgttgaatttcaataggaatgaagagattaccaaatcattttcactctggattctatttttgtttttattggcaatgtctcccagctttgtgtcatctgcatccttyatatgttttgatctccggcattgatgcaatctgaataaaaaggaaagccaacagaaaaaaaattacatcaatttacttctgccctcccatcagtttgatagtaagttattaacaaaaattcattgagtattctgataccactagttttgcatgcaaacaaaatgtcaccatcttatctcaaaggaggtcatttgaattacttttttgaaagtaaaatatacctttattatgttctcacctgatataccaggctttctgctatttaaaaagtatatgttcacacattcttagataatatatgttgattcttagtgcctatagtttctaaattttcttaaaaatcattaaataaaaaatgtctatttttttccatggttgagttttctcttaatcaacttgtat

SEQ ID NO: 939117 - DNA, 571 bp, Homo sapiens
tgaaaggcatttcttctctatgtatttgatgtttttagcatactggctgggctttaaattcctgttgaatttcaataggaatgaagagattaccaaatcattttcactctggattctatttttgtttttattggcaatgtctcccagctttgtgtcatctgcatccttcatatgttttgatctccggcattgatgcaatctgaataaaaaggaaagccaacagaaaaaaaattacatcaatttacttstgccctcccatcagtttgatagtaagttattaacaaaaattcattgagtattctgataccactagttttgcatgcaaacaaaatgtcaccatcttatctcaaaggaggtcatttgaattacttttttgaaagtaaaatatacctttattatgttctcacctgatataccaggctttctgctatttaaaaagtatatgttcacacattcttagataatatatgttgattcttagtgcctatagtttctaaattttcttaaaaatcattaaataaaaaatgtctatttttttccatggttgagttttctcttaatcaacttgtat

SEQ ID NO: 939118 - DNA, 591 bp, Homo sapiens
ttgtaatagctaaaaactggaaacaaggctgagggcagtggctcatgcctataatcccagcactttaggaggccaaggcaggagaatcatgcccaggagtttgagaccagcctgggcaacatagcaagaccctgtttctacaaaaagttaaaaatttgccaggcatgatggtgaatgcctgtagtcccagctacttgagaggctgaggttggagaatcacttgarcctgggaggttgaggcttcagtgaacagtgatcatgtcactgcgctatagcctaggcagtagagcaagaccctgtcttaaaaaaaaaccagcaacaacaaaaatggaggttaatgcccagcaacacctgaatgattaaacaaattatggtatgtggaatattactctgccacaataagaaatgaattactgatgcacacataaatgaatctcagtgaagctgagtggaagaaaccagaccaaaagagagcatacactatataatttcagagcttttgaaggtgatagatatgtttattatcttgatggtaatagctttacaggtgtgtatatttgtcagaattcatcaagttgtctcctttaaata

SEQ ID NO: 939119 - DNA, 762 bp, Homo sapiens
ctgtgttttgtagttttcagtgtacaagtccttcactttcttgatttaatttattcctaagtattttattatttttgatgctactacaaatacaattgttttgttaatttcatttttttcgcattattcattactagtgcatagaaatacaataagtttgtatatatttatcatgtatcctgcacctttgcagaatttgcttatagttctaagttttggttaagtttttttgtttttttaagttttttggttaagttctaagttttggtttaagttttttggtttgtttgagaattatttagggtgttttacatataagaacctgccatttacaaataggatarttttacttcttccttctaatctggatgccttttacttctctttcttgactaattgccctggctagaacctccactacaatgctgaatagaagtagtgagagtggacatcctttcttgttcctgatcttagagagagcagtttcagtttttctccattaagcatgctgttagttgtgtgattttcataaatgctgtttatcaggttgagaaatttttcttctgttcctaggttgttgagtgcttttatcatgcaagggtgttggatttcactaaatttttttttaatctattgagatgatcatatagggtctttcattcttgctaatgtggtgtattatgttgattaatttttgcatgttgaaccacccttgcattacagggataaacctcacttggtgttatgatgtacaatccttgt

SEQ ID NO: 939120 - DNA, 733 bp, Homo sapiens
tctggatggcttcaactggaacaacttggttctgcttcacatggtctctcagcctgtagcaggctagcccatatttgtttatatgacagcaggacaggggtccaaggcagtgggagctgctgggcctcttgatcaactggcacaggattgcttttgctgcatcgtattagccaaagtaagtcaaaagtctgtccagattcaaggggtgggaaatagacttgatctcttgaaagggatttctgcaaagttgcattgcaatgggtgtacctacaggaaggtacaaaaaatggggttacaatctcccttgctttctcatccctgaaaacccctacttttcacccaaagtcatcccacaaatctatcctctgcccctcatccttcctgtaatcaatycactgatgcccatgtcactccttggttattgattttagctcctggcttgttatttctctcttcaacactactactgttttattctgatgatttcaatatgcctggagatgatccttatgacatcccgggctctcagtgcccaagttcctttcctccatgatctccatcctatctgggcccctccctcccatggtcatcctctagactttgttattaccagtagtccctccatcctttccatcttattcaccctcctccctgaacaccaccttctgtgcttccaactcattccttctagtgcctcatccctagctatcctttgaccccctagagacctaca

SEQ ID NO: 939121 - DNA, 571 bp, Homo sapiens
aattatagtggcttaaaagtacatacttcatgttatatgccaggcactattccaagtattttacatatattgcttcattaagttctcacagtatcaatatacagttgagaaaactgaagcagacagatataggttaaatgacttgtccaaggtctcacaaatgcttaggggtagaactaggacttaaactctgatgggctggctcygaagttgccattcttaatgactatggtatactctttttcaacatatggagtaatgggtattgtaaaattctatttttgtataaaaacaaaataaaaaataaccatatatatgtgtatgtatgttaacaagtgatcttcttaataagagccttgatttaaaaaaaaaaaagtataggccatgcgcggtggctcatgcctgtaatcccagcactttgggaggctgaggtgggcagatcacctgaggttaggagttcaagaccagcctggccaacatggtgaaacctgtctctactaaaaatgcaaaaattagccaggtgtggtggcgtgcgcctgtagtcccagctactcgggaggctgaggcagga

SEQ ID NO: 939122 - DNA, 612 bp, Homo sapiens
ttgagctaagactatcgggcttttcagatattgaatcatgtctgcaaacagagatagtttgacttcctgtcttcctacttggagattctttatttcattctcttgcctgattgctcttgttaggacttccaatattatgttgaatagaagtggtgagagagggtatccttgtcttgctggttttcaagggaatgcttccaggttttgcccactcagtataatgttggctttgggtttgtcatagatgactcttattattttgaggtatgttcattcaatacctagtttactgagagtttttaacataaaggaaagccttttctgtatctattgagaaaatcctgtrgtttttgtctttagttctgtttatgtgatgaatcacatttactgattttcgtatgttgagacaaccttgcatcctggggatgaaggctacttgatcatggtggattagctttttgatgtgttgctggatttggtttgcaagtctttagttgaggatttttgcatcaatgtttctcaaggatattggtctaacgttttcttgtgtgttgtctctgccaggttttggtgttaatatcatgatggcctcatagaatgaattggggagaa

SEQ ID NO: 939123 - DNA, 634 bp, Homo sapiens
cctttgttgtcctacctcaggggtgtatcaactctctggctttgtgtcataatcttatttagagagaacttgatcactttttgcttctgcaagatatcacactggtccattacattaatgacattatgctgattggatccagtgagcaagaaggagcaaacacactggacttattggtgaaacatttgcatgccagaggatgagaaataaatctgactaaaattcagggaacttctacctcagtaaaatttctaggggtccagtggtgtggggcctgttgagatatttcttctaaggtgaaggayaagttgctgcatttggcctctcctacaaccaagaaagaggcacaatgcctagtgggcctatttggattttggaggcaacacattcctcatttgggtgtgttactccagcccatttatcgagtgatcggaaaggctgccagttttgagtgggatccagaacagggcaagggtctgcaacaggtccaggctgctgcgcaagctgctctgctgctcggaccatatgacccagcacatccaatggtgttccaggtgtcagtggcagatagggatgctgttttgagcctttggtaggcccccataggtgaatcacggtgcgggcctctaggact

SEQ ID NO: 939124 - DNA, 474 bp, Homo sapiens
tcttgatgtcatctagataacaacaacaaaaatgggttgtaattaggaatagggctcatgttcatataggcagtagtacagtgaacagaccattagagcccaatcaacaattaagtaggcttgcaattcaaattctgtttttggcctttctctctcatattttgaaatcacatttgagttgttattccaggcaatcatttctttcactattatagtattcagactctgtgcttgcaaaatataggataatgattkcattgttttcctttccctacaagagactctttgagaagcatggcaaataggaaaaaaatgaaaattcatggttttgagttcatcttcaggttataccacaggagacaaagctttgcatacaggtggttgtcatactataaaatcttcaaatcctcatggttgggacaaaacttcttgtattcctcattaagcaggattcatcgttcagctagctccgtg

SEQ ID NO: 939125 - DNA, 474 bp, Homo sapiens
tcttgatgtcatctagataacaacaacaaaaatgggttgtaattaggaatagggctcatgttcatataggcagtagtacagtgaacagaccattagagcccaatcaacaattaagtaggcttgcaattcaaattctgtttttggcctttctctctcatattttgaaatcacatttgagttgttattccaggcaatcatttctttcactattatagtattcagactctgtgcttgcaaaatataggataatgatttcattgttttcctttccctacaagagackctttgagaagcatggcaaataggaaaaaaatgaaaattcatggttttgagttcatcttcaggttataccacaggagacaaagctttgcatacaggtggttgtcatactataaaatcttcaaatcctcatggttgggacaaaacttcttgtattcctcattaagcaggattcatcgttcagctagctccgtg

SEQ ID NO: 939126 - DNA, 565 bp, Homo sapiens
tgtctctaagtctgtgaaactggttcccttggaacctgctcttatcacttctacccatatgcaaatgaccaccaaccctacgttgagatcagggcagtttttatttttattttttttaattttgttattattatactttaagttttagggtacatgtgcacawcgtgcaggtttgttacatatttatacatgtgccatgttagtgtgctgcacccattaactcgtcatttagcattaggtatatctcctaatgctatccctccctgctccccccacaccacaacaggccccagtgtgtggtgttccctgccctgtgtccatgtgttctcattgttcaattcccacctatgagtgagaacatgcggtgtttggttttatgcccttgcgatagtttgctgagaatgatggtttccagcttcatccatgtccctacaaaggacatgaactcatcattttttatggctgcatagtattccatggtgtatatgtgccacattttcttaatccagtctatcattgatggacatttgggttggttccaagtctttgctattgcgaatagtgc

SEQ ID NO: 939127 - DNA, 682 bp, Homo sapiens
tccgggcctcagtttccccatttctagaatagttggtagcaagaggatggagaaggcgtctggcaactcccaatgggtggtgacacagtacggccccgccttcctggtctgccacgccctctcctctccttcccttctaggttggggtctgcaggctggcttcctcccgccttcccttcctccctccctgcagggctcctgcagccgcccctccctccctccctccctcccctcccctcccctsccctcctggcaggcgcagagctgactgcgggagggagccataggcacggagccagcagagcgtcaagtcaacccctggggaagacggggttggggcgctgctggctgctgctgaggcgctgtcagaggctgcagctctgcgctggcaggggcagagtccgtaggggttatttgtgtccaaggtaactggtgtccgagcttgctgctagcatcctccctgtccctagagaccaggggaactgctctgggagtcatctggagtcctccctctccctcactgcccacgagcactcaggcaccaagtctgggcctttctccccttaaatatctctcatcccgtttcctcagccactgtcccctgatctcccagggactctaaactgtcccctcaaggccttcctccaacactgtctgggaacctctcctgtgaagcccggcc

SEQ ID NO: 939128 - DNA, 766 bp, Homo sapiens
tcacacctgtaatcccagcattttgggagtctgcggttggtggatcatttgagctcaggagttcaagaccagcctgggcaacatggggataccccatctctataaaaaaaatacaaaaaattagctgggcatggtggcacgtgcctatagtcccagctactggggaagctgaggtgggaagatcacttgagcctgagaggcagaagttgcagtgaactgagatcatgccactgcactccagcctgggtgacagagtgagaccccacctcaaaaaataaaaataaaaaataaattatccagtctcaggtatttctttatagcaatgcaagagcagattaatacagcatgtctaaccaccttattctttagaaatgccttggctattttyttgatctttattcttatacacatatttcagaatcagtatgtcaagttccttagaaatccctgttggaatatcagattggagttgcattaaatttatttatttatttatttatttatttatttatttatttatttattcatttatttatttattttttagacggagttttgctcttgttgtatttttggtagagacagggtttcttcatgttggtcaggctggtctcgaactcctgacctcaggtgatcggcccacctcggcctcctaaagtgctgggattacgggcatgagccaccgcccccggctatctattcatttaaggagaatttatacctttatcattgttaagtctttctcaccatttatttaagtcttttt

SEQ ID NO: 939129 - DNA, 854 bp, Homo sapiens
acagatgcctgggagcttcagatattcatgctcttcaggcttcctggcaaaagtagctgcaactctggcaaagcaggaggttagatccccgtaacatatctctgggaagaggctgaatccagggggctgagcagccacggtctgcaggccccacttccatggcgcctcacaggataagatccacttgcttggaattccagccagccacggtagcagcattgkgcctccctgatatggagctcccagggggaaaggtgggctgccatctttactatatgggcaacttaactgttccagcctttgggttttggagcatctgaggtgaccagagactgaagtgaacccccagaacagcacatctgctctatgaaaatatggccagactactttcataagcagacccccaatcccattcctcctcactgagcaagatctcccaaccagggtctccagccacctcctacagatgcattcaggccagcaacagctccatacctccctgggaccaagatcccagagggaggggcaggctgctgtctctgctgttttgcagccttcactggtgatacctccaggtcctggaaaatccgaggtgactagggactggagcgaaccccccagcatactgaaacagccctatagaaaagtggccagactgttacatgggtgctcgttcccctatctccttcacaggtcctccaggcctgggcctctagccacctcccacctaacgaaggagtagcaactcagcaactccctggacagagcctccaggagcaactgaaagcctctctgctactgcttctacgatggaactttccttgccacccttggactaacaaaggagcaaagac

SEQ ID NO: 939130 - DNA, 557 bp, Homo sapiens
actaatccagaagctagcttaaaaaaaaaaaaaaatgaagtagatggctgggcactgtggctcacacttgtaatcccagcagtttgggatgccaaggcaggcagatcatgaggtcaggagttcgagaccagcctgaccaacacagtgaaaccccatctctactaaaaatacaaaaattagctgggcatggtggcattcacctataatcccaactacttgggagacrgaggcaggagaatcacttgaacccggaaggtggaggttgcagtgagccgagatcatgccactatactccagcctgggcaacagagctagactccatcaaaaaaaaggaagtagatagaccactagctggactaatgaggaaaggagagaagattcagataaacacaatcagaaacaacaagagagatattaccgctgatcccacataaatacaaacagccatcagagaatattatgaacatctctatgcatataaactagacaatctagaagaaatccctagacacatacaccctcccaaaactgaatgagaaataaattgaatccctgaa

SEQ ID NO: 939131 - DNA, 563 bp, Homo sapiens
accagaatctctgggatgcagctaaagcagtgttaagagggaaatttatagcactaaacggccacatcagaaagttagaaagatctcaagttaacaacctaacatttcaactaaaagaactagagaactaagtgcaaacaaacctcaaagctagcagaagacaagacttaaccaagatcagtggtgaaatgaagagagagacataaaaaacccttcaaaaaaatcaacgaatctaggagctggcttttgaaaaaattaataaaatagaccactagctaggctaataaagaagaaaagagagaagaatcaagtaaacacaatcaaaaaygacaaggaggatatcaccactgaccccatggaaacacaatcatcagagaatactataaacacctgtatgcacataaactagaaaatctaaaagaagtaggtaaattcctggacacatacaccctctccccagactgaaccaggaagaaattcaatgcctcaatagccaagcaatagttctgaaattgaggcagtaataaatagcctaccaacaacaacaacaacaaaaaccgagg

SEQ ID NO: 939132 - DNA, 621 bp, Homo sapiens
gcaaaatatctcaagagctggtcttaggctttacagtagtgatgttatcccctggagcaatctggaaagaacctcgtagcctccagctgcatgactcctaaaccataatttctaatcttgtgactagtttgttagtcctacaaaggcagtctagtccctaagcaagaaagggatttgttttgggaaagagctgtcattatgttcattttaawctataaattataaactaagttccttccaaagttagttcagcctacgccaaggaatgacgaaggacagcttggaagttagaagcaagatggagttggttaggtcagatctctttcactgcctcagttataattttacaatgacggtttcatgtgtagcattcctttctccaggtaaggggcaggactcctctggaatgagggtcttatgagctctcaggggaggtaggtaaaagataacctttctagattttatggcttgtttcaggagacagaaggatgggagaaggccaaagagaactacttgcttctaaacccctcctgtctcctttagtgcaacaatccacacatgccaaggcaccatactttggggtactgtgctctgagctccgataatgcaaagaagtagaac

SEQ ID NO: 939133 - DNA, 621 bp, Homo sapiens
gcaaaatatctcaagagctggtcttaggctttacagtagtgatgttatcccctggagcaatctggaaagaacctcgtagcctccagctgcatgactcctaaaccataatttctaatcttgtgactagtttgttagtcctacaaaggcagtctagtccctaagcaagaaagggatttgttttgggaaagagctgtcattatgttcattttaaactataaattataaactaagttccttccaaagttagttcagcctacgccaaggaatgacgaaggacagcttggaagttagaagcaagatggagttggttaggtcagatctctttcactgcctcagttataattttrcaatgacggtttcatgtgtagcattcctttctccaggtaaggggcaggactcctctggaatgagggtcttatgagctctcaggggaggtaggtaaaagataacctttctagattttatggcttgtttcaggagacagaaggatgggagaaggccaaagagaactacttgcttctaaacccctcctgtctcctttagtgcaacaatccacacatgccaaggcaccatactttggggtactgtgctctgagctccgataatgcaaagaagtagaac

SEQ ID NO: 939134 - DNA, 621 bp, Homo sapiens
gcaaaatatctcaagagctggtcttaggctttacagtagtgatgttatcccctggagcaatctggaaagaacctcgtagcctccagctgcatgactcctaaaccataatttctaatcttgtgactagtttgttagtcctacaaaggcagtctagtccctaagcaagaaagggatttgttttgggaaagagctgtcattatgttcattttaaactataaattataaactaagttccttccaaagttagttcagcctacgccaaggaatgacgaaggacagcttggaagttagaagcaagatggagttggttaggtcagatctctttcactgcctcagttataattttacaatgacggtttcatgtgtagcattcctttctccaggtaaggggcaggactcctctggaatgagggtcttatgagctctcaggggaggtaggtaaaagataasctttctagattttatggcttgtttcaggagacagaaggatgggagaaggccaaagagaactacttgcttctaaacccctcctgtctcctttagtgcaacaatccacacatgccaaggcaccatactttggggtactgtgctctgagctccgataatgcaaagaagtagaac

SEQ ID NO: 939135 - DNA, 781 bp, Homo sapiens
ctatgccatcctcatggacatgaatagtcttctttggtctgaagattattcttggttgctttatatactgcttaataataagaagacatttgccccctttgaattccaaataagataaaagaagtggctggatgttatcacaagtacaacatttctgtttgggaagtatggaatacttctcagccataaaaaagaatgaaattatattttttgcagcaatatggatggaactggaggccattatcttaagtgatataactcagaaacagaaattcaaagactgcatgttctcacttataagtgagagataagtaatatgtacccatggacatgaaaagtggaatagacattgaagactcattggagattttggagactccagtagacactggaagggtgagagggaagtgagggatgagaaattacctgaaaggtacactgtacactatttgggtgatgggtacactaaatgctgaggtttcaccagcacacaatatatccatgtaacaaaactgcacttgtacccctaagtctatttttaaaagtgattaaaatccatatgttctccccaaccagcatttgccagaacaatggyccccatgcgcctgcagggacttgaccaactattagggcaaaggcctgctacttatctacttccatggtgaagaaaaccacaacagctttggtgagcaagaatgtggaatcctttgaggaacctctgctagggtccaacctgcagaccctgacccagcgatggatgaatgaagtacactgacacaca

SEQ ID NO: 939136 - DNA, 592 bp, Homo sapiens
gtttatattctgaaatttttttctattccttcttagagctgataagcatctttgttgattatctgcttgtgttactccatcaggcttccatagcccatctgattccaccagattattcaaatgagctccttatcacaccgtagctcaagccctcagatatgttcttctctcctatacagacttgccacattttttcaggtgtgtaggcatttgctcatgtcttaaatgttcatctttatccatctgcctattcaaatccatctacacaatgtattctaggaagcatatcttgattatactatgcatcattgacttcctcatttagatgagcctctataacatttgtaggctgtattacaaaattcaatgacaaatatatgtatattatcttgcatttgtttcttgtgyttcaagtgtattagtcttgtcttctcagatagatggttaaggccatgatttatattttgatggttttcacagcaccatctttggtaaaatgactaccgaaaacatatccttcatcaccatagatgctcagtgccactggattaatctagagctaaggatacttgtttttatttgaatctcaaag

SEQ ID NO: 939137 - DNA, 453 bp, Homo sapiens
cagtttgaaatgcttctcctactttcgggactcttcagcatcaaaatttctcccagataacctgacaaaactgtagaacatcagacctggaatgactgaaagaccaccaggctcagtgtttacctgaggtgggcaagtggctgagcagctcaggagtgggccccctkagtcttgtcccatcttactttgtactacactgttctttagagaaagcttccttttggagaccaaccaggactccttagaagcagaggtgacaaagcaagctttctaaatgatttggggaaaaggacaagtcttcctttcacatttttggaaggaaatatttttaataaggcagggattctccaatgaactggtctaaaccactgcttgcggcctcatgcctggcctgcttcacccactcaacagaatcacctcgtctctgaaggtggttgtgtttgaaacacctgc

SEQ ID NO: 939138 - DNA, 633 bp, Homo sapiens
aatatcctgtcagtcttttcacacactagaagttagcctgttcatatacgggccaatggatcagaaaatcagggaagaatccatggaaatcaaatcaccatgtgtagttaataaactcgtatttattgcttatctatcagcagatgcttctaaaaacatccatgcccaggccccaccacagtcccattaaattagtgtctgggggaagggctcaggcctcagtatgtccagagctctcctggtgataccagtgagcagccagggctgagaaccactagccagggtgtgcctactgttatgaaggtgttttcagagatacacagaaagcacctcagataaattctgtaaacacctgtgtaattgaaaaaagttatagttataatgtgtgagagggagaacactaattcaactcattttttactaactggaccaattattttactaaaacaagtgtatattgtaggcttkgtcgtaaggtttctgtattgaaagaatgtagagcatctgtgagatggaatgtcttttgggtttggtgggtgtggagtctaacctaaccatattttgagtaaaagtaaagaatggagacactgactttgttaaactctatttctcatcattgatgtgctggagata

SEQ ID NO: 939139 - DNA, 715 bp, Homo sapiens
tgtccctaaaatatgaggccccttagccatccagcccccatccagttattgagaaacaagtattacctgtttgaaatcataaacgggtggtttatgatgcagcaaaaactaacttacatacaacatgacctcatgtgggtttcttaatttctctcagtctcagctttctcatctataggatggagataaggcaatcaacctcgctatttagaggattaaatgagaaaatatatgcaaagtgcttggcatagcataaatactcaacacatatggtaattttttaaaaaccctctatattaktcccttttaattaaaattttaattaaaacaaaagaaaaacaaaacaaaacaaaaacctctgctgggtggacgaggggcagccctcaggctagatgcactgatttagtacttttaatagtggcaggagtcagacaagcccctaggcagatagtggcatgtccccaacgaaatccaactttcaaaccgaaggcagtttaaagcccgaaagctaagctacaagtcttggataaatccatggactgagctgagaacatctcttcctgttggtgcactttcctctgactgatccccacccttcacttactttacatatatctacccttccctaggtggttttctacactgtcatgccacctttgaatggttcctttgttttagccttttttgtatactcgtaaaccaatcagcatgcagt

SEQ ID NO: 939140 - DNA, 742 bp, Homo sapiens
ccccaacgaaatccaactttcaaaccgaaggcagtttaaagcccgaaagctaagctacaagtcttggataaatccatggactgagctgagaacatctcttcctgttggtgcactttcctctgactgatccccacccttcacttactttacatatatctacccttccctaggtggttttctacactgtcatgccacctttgaatggttcctttgttttagccttttttgtatactcgtaaaccaatcagcatgcagtcyccacttctgagcccataaaagccccggacccagccacgctgggagagagaccacccgacttcaggtcagggaccaccctcgcatcccctctccgctgagagctgtttcattgcttcataaaactcttctctgcccttttcacccttccattgtcagcaaagggtacgaagaaggcagtaacaccatagccctccacccctcccccactacctgtgcccagtggcagccccttgccatgagaggcagtgcagggccaggccagccagggagcctccagcaggagcaggcaacaggactgacagagttgttaacacaccccccattcattgttaacatgcccgtttgtcaggctgctgacggtgggactaaaagagctgttagcatggctgtaacatcccctctggggcttcagagtcgagtgctttcctgtttgggtgccaccaagttcccttcatctgcatgccagagttcacccccggagtca

SEQ ID NO: 939141 - DNA, 730 bp, Homo sapiens
aaccgaaggcagtttaaagcccgaaagctaagctacaagtcttggataaatccatggactgagctgagaacatctcttcctgttggtgcactttcctctgactgatccccacccttcacttactttacatatatctacccttccctaggtggttttctacactgtcatgccacctttgaatggttcctttgttttagccttttttgtatactcgtaaaccaatcagcatgcagtccccacttctgagcccataaaagccccggacccagccacgctgrgagagagaccacccgacttcaggtcagggaccaccctcgcatcccctctccgctgagagctgtttcattgcttcataaaactcttctctgcccttttcacccttccattgtcagcaaagggtacgaagaaggcagtaacaccatagccctccacccctcccccactacctgtgcccagtggcagccccttgccatgagaggcagtgcagggccaggccagccagggagcctccagcaggagcaggcaacaggactgacagagttgttaacacaccccccattcattgttaacatgcccgtttgtcaggctgctgacggtgggactaaaagagctgttagcatggctgtaacatcccctctggggcttcagagtcgagtgctttcctgtttgggtgccaccaagttcccttcatctgcatgccagagttcacccccggagtcacttccgacag

SEQ ID NO: 939142 - DNA, 742 bp, Homo sapiens
ccccaacgaaatccaactttcaaaccgaaggcagtttaaagcccgaaagctaagctacaagtcttggataaatccatggactgagctgagaacatctcttcctgttggtgcactttcctctgactgatccccacccttcacttactttacatatatctacccttccctaggtggttttctacactgtcatgccacctttgaatggttcctttgttttagccttttttgtatactcgtaaaccaatcagcatgcagtccccacttctgagcccataaaagccccggacccagccacgctgggagagagaccacccgacttcaggtcagggaccaccctcgcatcccctctccgctgagagctgtttcattgcttcataaaactcttctctgcccttttcacccttccattgtcagcaaagggtacgaagaaggcagtaacaccatagccctccacccctcccccactayctgtgcccagtggcagccccttgccatgagaggcagtgcagggccaggccagccagggagcctccagcaggagcaggcaacaggactgacagagttgttaacacaccccccattcattgttaacatgcccgtttgtcaggctgctgacggtgggactaaaagagctgttagcatggctgtaacatcccctctggggcttcagagtcgagtgctttcctgtttgggtgccaccaagttcccttcatctgcatgccagagttcacccccggagtca

SEQ ID NO: 939143 - DNA, 774 bp, Homo sapiens
cctaggcagatagtggcatgtccccaacgaaatccaactttcaaaccgaaggcagtttaaagcccgaaagctaagctacaagtcttggataaatccatggactgagctgagaacatctcttcctgttggtgcactttcctctgactgatccccacccttcacttactttacatatatctacccttccctaggtggttttctacactgtcatgccacctttgaatggttcctttgttttagccttttttgtatactcgtaaaccaatcagcatgcagtccccacttctgagcccataaaagccccggacccagccacgctgggagagagaccacccgacttcaggtcagggaccaccctcgcatcccctctccgctgagagctgtttcattgcttcataaaactcttctctgcccttttcacccttccattgtcagcaaagggtacgaagaaggcagtaacaccatagccctccacccctcccccactacctgtgcccagtggcagccccttgccatgagaggcagtgcagggccaggccagccagggagcctccagcaggagcaggcaacaggactgacagagttgttaacacaccccccattcattgttaacatgcccstttgtcaggctgctgacggtgggactaaaagagctgttagcatggctgtaacatcccctctggggcttcagagtcgagtgctttcctgtttgggtgccaccaagttcccttcatctgcatgccagagttcacccccggagtcacttccgacagg

SEQ ID NO: 939144 - DNA, 554 bp, Homo sapiens
ataagcatagggtaatgaggtgtgatctgattgaattctgcaatgagatgattccaggaggcatgatctgattcgatcccacaatgggctgatgccagagctcaatttgattggatcctggatccttccatactgcgtctgcttcttaagtcagtccctgctcyttggtcttctccttggtctgggcacttctcttccccttgtggttgcatacttggttcatctgggcatgctcagtttacatgaccttcagcctgagggctcagaccaactcataactttgttggattaaagtttagccagatttgtctggcgctgttgcaggtagagcagttgtgacagagactatgttgccctcaaagctgaacatatttacagtggtgcacccttatccacaggggattccttccaagatcctcagtggacacctgaaatcttcagtagtacaggacactatacatattgtgtttcctttacatatatacttataataaagtttataaattaggcacggtaagagattaacaacaatagctactaataacatagaacaa

SEQ ID NO: 939145 - DNA, 682 bp, Homo sapiens
agggttttataagcatagggtaatgaggtgtgatctgattgaattctgcaatgagatgattccaggaggcatgatctgattcgatcccacaatgggctgatgccagagctcaatttgattggatcctggatccttccatactgcgtctgcttcttaagtcagtccctgctccttggtcttctccttggtctgggcacttctsttccccttgtggttgcatacttggttcatctgggcatgctcagtttacatgaccttcagcctgagggctcagaccaactcataactttgttggattaaagtttagccagatttgtctggcgctgttgcaggtagagcagttgtgacagagactatgttgccctcaaagctgaacatatttacagtggtgcacccttatccacaggggattccttccaagatcctcagtggacacctgaaatcttcagtagtacaggacactatacatattgtgtttcctttacatatatacttataataaagtttataaattaggcacggtaagagattaacaacaatagctactaataacatagaacaattctaacaataagcgagcatcactattcttgtgctttggtgccattattaagtaaaatgagggctccttaaacacagcactgtgatacctcaacagtcaatctgataactcagaaggcta

SEQ ID NO: 939146 - DNA, 682 bp, Homo sapiens
agggttttataagcatagggtaatgaggtgtgatctgattgaattctgcaatgagatgattccaggaggcatgatctgattcgatcccacaatgggctgatgccagagctcaatttgattggatcctggatccttccatactgcgtctgcttcttaagtcagtccctgctccttggtcttctccttggtctgggcacttctcttccccttgtggttgcatacttggttcatctgggcatgctcagtttacatgaccttcagcctgagggctcagaccaactcataactttgttggattaaagtttagccagatttgtctggcgctgttgcaggtagagcagttgtgacagagactatgttgccctcaaagctgaacatatttacagtggtgcacccttatccacaggggattccttccaagatcctcagtggacacctgaaatcttcagtagtacaggacactatacatattgtgtttcctttacatatatacttataataaagtttataaattaggcacggtaagagattaacaacratagctactaataacatagaacaattctaacaataagcgagcatcactattcttgtgctttggtgccattattaagtaaaatgagggctccttaaacacagcactgtgatacctcaacagtcaatctgataactcagaaggcta

SEQ ID NO: 939147 - DNA, 702 bp, Homo sapiens
aaacttcaaattaggatgcaaactcaatgtcactcaagaagtggtcatgaggctggacttagtcattggtaattattctggattcatcagcagggcagagctgattttaccatttcataaccaaccacttctgaacagtttcctcccaggtgcttaagaatgaagaagtggctgtcaggactgcactggcaatatttttcaaaatgtggatccctggtcatattaaaataaaagtttttcccccgtcaggttagcagaaatgtaaaatggagattggaatttagatgtagaattttgtgtcagaaccacgtttgatagtcagttacacacatctggcccacagttaagaatgtaaactaacagcattaagagccagacatcctgggttcaaatcccagctctgctatataaggcttggcctttctgtgcctcagttgtctcacttgcaaaatcaggatgatatcatcctccaaggattactgtgaggawtaaattgttaatatgcttaaagtgcttggaacagaacacacattctgtgaagtcattactattatcattacattaacacttctctttttgaaaaaggacactttttctattagttaagacaaagcaagccatatatttgcaaattcctaaaacaatgattgaaattaaaattctataggagaatgacttaaattttctttgtaataagaatag

SEQ ID NO: 939148 - DNA, 807 bp, Homo sapiens
catcctgggttcaaatcccagctctgctatataaggcttggcctttctgtgcctcagttgtctcacttgcaaaatcaggatgatatcatcctccaaggattactgtgaggattaaattgttaatatgcttaaagtgcttggaacagaacacacattctgtgaagtcattactattatcattacattaacacttctctttttgaaaaaggacactttttctattagttaagacaaagcaagccatatatttgcaaattcctaaaacaatgattgaaattaaaattctataggagaatgacttaaattttctttgtaataagaatagatatgcctccagttccattcttgaagcaggatacatgccaaggtcagaaggaaggtgacttctgctttcacaagcctgtgagagaatgggatccgggrtgagtcctccgactcaggggctcacctttcccaccatgtcaggcaacgcatcaaggaagctcatgttctttcaatttaaggaatgcatatttcattgcttgaaagaggaaaatttaaatgtttcttcaaaggttatacagaatattatgacagacttaggacaacaaacgacgcttctgttaactgttagagttctctttggcagtgttattatgagttaactgctcagtaagaagatggttaatattgagtgtcaacttgattagattgaaggatgcaaagtattgttcctgggtgtgtctgtgagggtgttgccaaaggaaattaacatttgagtcagtggtctgggagaggcagatccaccctcaatctggtgggcaccat

SEQ ID NO: 939149 - DNA, 807 bp, Homo sapiens
catcctgggttcaaatcccagctctgctatataaggcttggcctttctgtgcctcagttgtctcacttgcaaaatcaggatgatatcatcctccaaggattactgtgaggattaaattgttaatatgcttaaagtgcttggaacagaacacacattctgtgaagtcattactattatcattacattaacacttctctttttgaaaaaggacactttttctattagttaagacaaagcaagccatatatttgcaaattcctaaaacaatgattgaaattaaaattctataggagaatgacttaaattttctttgtaataagaatagatatgcctccagttccattcttgaagcaggatacatgccaaggtcagaaggaaggtgacttctgctttcacaagcctgtgagagaatgggatccgggatgagtcctccgactcaggggctcacctttcccaccatgtcaggcaacgcatcaaggargctcatgttctttcaatttaaggaatgcatatttcattgcttgaaagaggaaaatttaaatgtttcttcaaaggttatacagaatattatgacagacttaggacaacaaacgacgcttctgttaactgttagagttctctttggcagtgttattatgagttaactgctcagtaagaagatggttaatattgagtgtcaacttgattagattgaaggatgcaaagtattgttcctgggtgtgtctgtgagggtgttgccaaaggaaattaacatttgagtcagtggtctgggagaggcagatccaccctcaatctggtgggcaccat

SEQ ID NO: 939150 - DNA, 696 bp, Homo sapiens
gattactgtgaggattaaattgttaatatgcttaaagtgcttggaacagaacacacattctgtgaagtcattactattatcattacattaacacttctctttttgaaaaaggacactttttctattagttaagacaaagcaagccatatatttgcaaattcctaaaacaatgattgaaattaaaattctataggagaatgacttaaattttctttgtaataagaatagatatgcctccagttccattcttgaagcaggatacatgccaaggtcagaaggaaggtgacttctgctttcacaagcctgtgagagaatgggatccgggatgagtcctccgactcaggggctcacctttcccaccatgtcaggcaacgcatcaaggaagctcatgttctttcaatttaaggaatgcatatttcattgcttgaaagaggaaaatttaaatgtttcttcaaaggttatacagaayattatgacagacttaggacaacaaacgacgcttctgttaactgttagagttctctttggcagtgttattatgagttaactgctcagtaagaagatggttaatattgagtgtcaacttgattagattgaaggatgcaaagtattgttcctgggtgtgtctgtgagggtgttgccaaaggaaattaacatttgagtcagtggtctgggagaggcagatccaccctcaat

SEQ ID NO: 939151 - DNA, 573 bp, Homo sapiens
caggtaagtagaagttgctctgctgtggccagagagccccttccccaaggcacacccgtggctggtgaggatgggggctgggggctgagcccacagtcaggcccctgtgtccagcaggccctggtcgcccagtgcgctcgggccaggggarccaggacaaacgggcccttgtggttgggaggctgcctgccgtgccagggacactgtgtgcccggtgccgccaccagcctgctgcctgcctgaaggggctgagggcctgggaagtggggctactgtttccaaagggaacctcctaagctgccctggcctctggagagggcacagggccttggctggctgccaggaggtggcagggctggtgcccgctgccctctttctcacagtcctttgcctgcaagaagttccccagggctagagaagcgcaatcccttgggactctagggccctgggtctgagggacactgctgtgtcccaccctcctgccacccactgtcccgttaatccctgggcttggctccttccttggcttctcccctggaaggcgaggctcaagggcctctcctatctgcctca

SEQ ID NO: 939152 - DNA, 630 bp, Homo sapiens
tgtatttgtagtagagacagggtttcaccgtattggccaggcagctctcaaactcttgacctcatgatctgtccacctcggcctcccaaggtgctgagattacgggcatgagccacagcgcccagcccaaagtcccatttcttatgtaaratatatattcacaagttcttaaaagttggtcatgcttgggtggccattattctattgaccgcacaagacatacaaaaatgttaggttagcattctacactgagaattaatagcatttctaattatctggtatttaaaaatctgccaatttaatataaggctaaggcacaatatatccatcaatcttattatcacaatcaaaaatctttgaagaatcaactggttgtatttatactcacagatgtaaaattaaatcaaccttttaaaaatattgtttaaattatctttcatttgaatgggaaaagtattctacggtcaaagttcatgtttttgttataaacacagattcctaaggaaatttgttctgatttttagcagtaataaattccaggaaactaattcatttaaagtaggttataacacttaacttcatggtaatcattttcagttcacaccaaaaaccaacgtacagaaatggatt

SEQ ID NO: 939153 - DNA, 606 bp, Homo sapiens
aattttggcctatggggaaatacatcaaatgaagattatagaaattcagtggtaggggattgatgaagaaattgcttagtcaaatgagtgaactacctagctcattctttgatctatttaattttaggagatttggtttatggggaccctggataaggagcatattccaaactcttggtattatcctcccaatagtcatagtaatagtctccctgctgcactgtattctctcaaarattttaaatgcttgcatgcagccatctctagaatgtcatatagtctgtctccaatttgaacgacaagagctgaaagaaatgtgcaaccgtgaggacaccgtaacctatgaatgacatgctgaaatcggaaacccaaaatgatggtaactgagagtggcactaaggccgtaagttttggtcacactctcatgtaagtaagaacctgaccaaaaaaagggggaattaaaaaaaaaattctgggaggccattgttttggattgagctcatacactaggccccaacaaaccaaaccaaaatagaattgctcatgctaagactttaaggaagcacagagattctagaacagtccaggttttgtttttttcctgct

SEQ ID NO: 939154 - DNA, 791 bp, Homo sapiens
tccatgttgctgcaaaggacaagatctcattgtttttttatggctgcatagtattccgtggtgtgtatgtaccgcattttctttatccggtccaccgttggtgggcatttaggttgattccatgtctttattattgtgactagtgctgtgataagcatacatgtgcatgtgyctttatggtagaatgatttatattcctttaggcatataccaagtaatgggattgctgggttgaatggtagttcagttttaggttctttgagtaatcgccaaactgctttccactgtagctgaactagtttacatttctgccagcagtgtataagcattcctttttctccacaactctcgcagcatgttatttttttaccttttataatagccattctgactggtgtgagatagtatctcattgttttgttttgttttgttgagacaggtgctagctctgttgcccatgctggagtgcagtggcacaatcagagcttactgaagcctcgaactcctgggctcaagcaatcttcccacctcagcctttcaagtagctgggaccacaggggtgtgccaccgtgcctgactaattttttaatttttttttgaagagatgaggtcttgctatgttgcccaggctggtctcaaattcatgggctcaagtgatcctcctgccttggcctcccacagtgctgggattgtaggcatgagccaccatgcctgggcctcactgtggttttgatttgcttttctctaatgattatcaatgttaaacattttttcatatgcccaaaagctcc

SEQ ID NO: 939155 - DNA, 746 bp, Homo sapiens
gcatccatgttgctgcaaaggacaagatctcattgtttttttatggctgcatagtattccgtggtgtgtatgtaccgcattttctttatccggtccaccgttggtgggcatttaggttgattccatgtctttattattgtgactagtgctgtgataagcatacatgtgcatgtgtctttatggtagaatgatttatattcctttaggcatataccaagtaatgggattgctgggttgaatggtagttcagttttaggttctttgagtaatcgccaaactgctttccactgtagctgaactagtttacatttctrccagcagtgtataagcattcctttttctccacaactctcgcagcatgttatttttttaccttttataatagccattctgactggtgtgagatagtatctcattgttttgttttgttttgttgagacaggtgctagctctgttgcccatgctggagtgcagtggcacaatcagagcttactgaagcctcgaactcctgggctcaagcaatcttcccacctcagcctttcaagtagctgggaccacaggggtgtgccaccgtgcctgactaattttttaatttttttttgaagagatgaggtcttgctatgttgcccaggctggtctcaaattcatgggctcaagtgatcctcctgccttggcctcccacagtgctgggattgtaggcatgagccaccatgcctgggcctcactgtggttttgatttgcttttc

SEQ ID NO: 939156 - DNA, 693 bp, Homo sapiens
ctgaagcctcgaactcctgggctcaagcaatcttcccacctcagcctttcaagtagctgggaccacaggggtgtgccaccgtgcctgactaattttttaatttttttttgaagagatgaggtcttgctatgttgcccaggctggtctcaaattcatgggctcaagtgatcctcctgccttggcctcccacagtgctgggattgtaggcatgagccaccatgcctgggcctcactgtggttttgatttgcttttctctaatgattatcaatgttaaacattttttcatatkcccaaaagctcctagatctgataaacaacttcagcaaagtttgaggatacaaaaccagtgtacaaaaatcagtagcatttctataatcaaaaatgcccaagctgagagccaaatcaagaacacaatcccattcacaatagccacacacacaaaataaaatacctatgaatacagctaatcagggaggtaaaagatctctacagtgagaattacaaaacactgctgaaatcagagatgacacaaacaaatgcaaaaacatgccatgctcatggattggaagaatcaatattgttaaaatggccatactgcccaaagcaatttacagatttaatgctattcctattaaaccaccaatgacattcttcacagaattagaaaagaactattatagtattcatatgga

SEQ ID NO: 939157 - DNA, 693 bp, Homo sapiens
ctgaagcctcgaactcctgggctcaagcaatcttcccacctcagcctttcaagtagctgggaccacaggggtgtgccaccgtgcctgactaattttttaatttttttttgaagagatgaggtcttgctatgttgcccaggctggtctcaaattcatgggctcaagtgatcctcctgccttggcctcccacagtgctgggattgtaggcatgagccaccatgcctgggcctcactgtggttttgatttgcttttctctaatgattatcaatgttaaacattttttcatatgcccaaaagctcctagatctgataaacaacttcagcaaagtttgaggatacaaaaccagtgtacaaaaatcagtagcatttctataatcaaaaatgcccaagctgagagccaaatcaagaacacaatcccattcacaatagccacacacamaaaataaaatacctatgaatacagctaatcagggaggtaaaagatctctacagtgagaattacaaaacactgctgaaatcagagatgacacaaacaaatgcaaaaacatgccatgctcatggattggaagaatcaatattgttaaaatggccatactgcccaaagcaatttacagatttaatgctattcctattaaaccaccaatgacattcttcacagaattagaaaagaactattatagtattcatatgga

SEQ ID NO: 939158 - DNA, 604 bp, Homo sapiens
tagacacatggtaggtgttcagttaatatgaaaaataagagtattcattattggtaaagggagcatcaattttgtaagtgctaagaacaatgtctgactaaaaataaacacattcaacaatttaggtatttggttccttttaatcactatttttattatcgaactttactaggttgcagaaagtgtcctttgacattatcaattcccttgtttcttgtaagagatgtgataagaaaaatattgatctcttgagtttatttatacactaagggagaacttggtacatcatcacytacctattatgcagagagtatattgtactctcaaatttttgccttttttatgtataaactcttgtggttggtgtgtgtcccatgactctctgtgaaggctggattcagcaaagctgaaaacacacccctgaccaggaatgattactattcttccagcccatgctcatttgctccctttgatctacatctcttccacaattttgcttctgctcttccccttcctttaatttccatcgtgactggaattaatgtaggtaaattctatttcatcattatttttttccattaagatattttttccttttaacatt

SEQ ID NO: 939159 - DNA, 604 bp, Homo sapiens
tagacacatggtaggtgttcagttaatatgaaaaataagagtattcattattggtaaagggagcatcaattttgtaagtgctaagaacaatgtctgactaaaaataaacacattcaacaatttaggtatttggttccttttaatcactatttttattatcgaactttactaggttgcagaaagtgtcctttgacattatcaattcccttgtttcttgtaagagatgtgataagaaaaatattgatctcttgagtttatttatacactaagggagaacttggtacatcatcacttacctattatgcagagagtatattgtactctcaaawttttgccttttttatgtataaactcttgtggttggtgtgtgtcccatgactctctgtgaaggctggattcagcaaagctgaaaacacacccctgaccaggaatgattactattcttccagcccatgctcatttgctccctttgatctacatctcttccacaattttgcttctgctcttccccttcctttaatttccatcgtgactggaattaatgtaggtaaattctatttcatcattatttttttccattaagatattttttccttttaacatt

SEQ ID NO: 939160 - DNA, 627 bp, Homo sapiens
gttggcagaaaagcaatatacatttattttctggaaacaagtaactttttaaaaactcaagcaattatttctgagcaatagctgaaaacttaatctagccaatataaaaataactcagtcaaattaatgattaacctactgtttcatggataaactaaacaaaacagaacagaacagaatttctctattccatgtctctctgtctcaaataaatctcaaagaaggtttcatattagaattctcatacctcttaytgggtagggtcttgctctcaagattcttccagttaaacaatttctgccatattgcatattattccaagacaataaggtccatcaatatggggaagtagaaataggctgggaaaagaggtaagttggaaataagagtcatatttccttgcagtaatagtattcattctactacacagaaacttcagaaaatgtgatatctatctatcagtcaatctatctgtctatctctctatctatctatctatctatctatctatctatctatctatctatgtatctatctatctatctatctatgtatacttgcttagtatgtaggggaaatccaatatttcaaaatatatctttgatattttaaactttactaataaat

SEQ ID NO: 939161 - DNA, 595 bp, Homo sapiens
tactttattatgttgtatatcatcatatacatatctacaacacatccagttttctaatcatcttttttttttttttccttgaggcagagtctcgttctgtcgcccaggctggagtgcagtagcaccatctcggctcactgcaacctctacctcctgggttcaagtgattcttatgcctcagcctcctgagtagctgrattactggcacgtgcctccatgtccagctaattttttgcttttgcttttgtttatttgagacagagttttgctcttctcgcccaggctggagtgcaatggcgtaatctcggctcaccgcaacttccacctcctgggttcaagcgattctcctgcctcagcctcccaagtagctgggattgcaggcatgtgccaccacgcccagctaattttgtatttttagtagagatggggtttctccatgttggtcaggctggtctccaactcctgacctcaggtgattcgcctgccttggcctcccaaagtgctgagattacaggcatgagccaccgtgcccagccaattttttgtatttttagtagagacgtggtttcactattttgccaggctggtctcaaac

SEQ ID NO: 939162 - DNA, 596 bp, Homo sapiens
tactttattatgttgtatatcatcatatacatatctacaacacatccagttttctaatcatcttttttttttttttccttgaggcagagtctcgttctgtcgcccaggctggagtgcagtagcaccatctcggctcactgcaacctctacctcctgggttcaagtgattcttatgcctcagcctcctgagtagctgrattactggcacgtgcctccatgtccagctaattttttgcttttgcttttgtttatttgagacagagttttgctcttctcgcccaggctggagtgcaatggcgtaatctcggctcaccgcaacttccacctcctgggttcaagcgattctcctgcctcagcctcccaagtagctgggattgcaggcatgtgccaccacgcccagctaattttgtatttttagtagagatggggtttctccatgttggtcaggctggtctccaactcctgacctcaggtgattcgcctgccttggcctcccaaagtgctgagattacaggcatgagccaccgtgcccagccaattttttgtatttttagtagagacgtggtttcactattttgccaggctggtctcaaact

SEQ ID NO: 939163 - DNA, 631 bp, Homo sapiens
tggctcacgcctgtaatcctagcactttaggaggccgaggcgggtggatcacttgaggtcaggagttggaaaccagcctggccaacatgctgaaaccccatctctactaaaatacaaaaaaattagccagatgtggtggtgggagcctgtaatcccagctacttgggagactaaggcaggagaatcacttgaacctgggaggcagagrttgcagtgaactgagatcgttccactgcactccagcctgggtgacagaaaaaaaaaaaaaaaatgtttcctggtggagcaactccaaattcaggtctttttctcaccaaatgatctagtactgctaaatcctattctactcccaagaacttctgacatcattagtattgaatgaaattttatttaggttcccattgaagagatggaatcaacattctacataaaccagagcctagtcaatgttagtggaaatggggttaaagttataaaacttaccctggcttaaagttatgcccctgatggtgttaactatgggatgttaaagtgatttagcttctttaagccttaacattaatattttcccttcctctgtcctacaactgggtgctaatattaaactagtgacatgatgctaattagattg

SEQ ID NO: 939164 - DNA, 645 bp, Homo sapiens
ttgcaccctcaggctccatctggcttgagaaccatttgttgtagtgtgtgaaatcagatgagactcacatcctgttataccaggtaggaattcataacctgaattccctgaaattataggcttgtatgccaaaacagtgtgtgattatgcataggggtgtgtgtgtgtgtgtgtgtgtgtgtgtgtgtgtgtgtatttccacccctggggagcggattcatagtttttgtcacattttcaagaagtcttactattcctatgatgattatgagtcactgccttgtgaaatgcattaggctggggctatgttactatttctttcttttctttttytttttttttttttttgagacagagtcttgctctgtcgcccaggctggagtgcagcggcgccatcttggctcactgcaagctccgcctcctgggttcatgccattctcctgcctcagcctcctgagtagctgggactccaggcgcccgccaccatgcccggctaattttttttgcattttttgtagagatggggtttcaccatgttagccaggatggtctcaatatcctgacctcgtgatctgcctgccttggcctcccaaagtgctgggattacaggtgtgagccaccacgactggccactatgttattatt

SEQ ID NO: 939165 - DNA, 731 bp, Homo sapiens
gcagaaggcaaaaggcaggtatctctatagtcctatggctgtcacgctgtgcacagagaaagccagaggcataggtgcaaaagatgcattgtggaagatgaggtttcaggagtcagtaggaacccagccacgcagatcttcctggtccagaataaaaattttgctttttttcttcagttcaatggaaagcaactgagaagttttcagcaggagagcattgtgatcacatctgtttttttaagccatcttttttgttgcatttggattttggctgggaggtgcaaagtgggaagagacctttgaggaggctactgtaggaatccaggtgaaaggtgatagagcctggctaagtgtggtgtcgtggagacagagctatggttctaagagatatttagaaagtaaaattcatggggcttagggtcccagagagctctctatgtccccacccttgttcctgagcagccctcaactcctatagtggatttttcctggatgtgggcatcagttttaattaaggcaggctagttagggatatgggagactggattcaggrgcccattaactcctggagcactaggttagggtggggaaggaatcaggaagcctccctcaaggtgactgcagctagaaatgaagaccagtggtaaggccaaggggaggcttgtggatggacacaagggatgacagtgtggggagcagaggtgaggatggaggtagacccttgccttgaa

SEQ ID NO: 939166 - DNA, 743 bp, Homo sapiens
acggtaatgtgtactatctctacatgggcttccaagtagaaaaacaggaactgtctttctaggagtgtaattctccattgcaaatggcatagttgtgggagtttatggtccaagcatcagggacttttgcaccaaaatctagacctgctgtacagcactttctagctgcaagctcccctcaaacccggaagccttttgtatcagtcaatagtaatattcccagtgtggaatatactgcctccaaaacccaaagagggcagatatgcttccttctttgtggtgggaagtatgagatgcaatcattctaactacattttggagggaatgtctgagcatactcaataaattagacctctaagaatttttttgatgtagtaggcctatgagtcstcataggatttatctcctattccctggagtgcatgtctaatcagcccctctagtgtacttaacagttattgcttatattgcccaattatcacgacatcataaatacaccagtgtgatattttttctaatgttcagatggttcagatttcctcagacttacattatgacagaggtcaagagatttaacatagccctggggcaagactaaacatatactgctgtatgttccaagtgaatacaaactgcatttcattcccttttctaacaggaatggaaaagaacacgtttgtcataccagtggctacatgccatatatcagaccttgttaatttattctataaaacatgcaacat

SEQ ID NO: 939167 - DNA, 608 bp, Homo sapiens
tcttcgacaattttgttctcaaaatcagagataccaaaaagcagtctgagccactggaaataaccctacttgcccccgaacgtaccagggacataacaggtctcagagaggctactgaatacgaaattgaactctatggaataagcaaaggaaggcgatcccagacagtcagtgctatagcaacaacaggtactgtaaataaacaggagagaacagagaaaagtcatgactcaggggtcttcttctcacagggctgagtaatcacaggagctttggatgcaggcaggctggcgctctgatcctgactctttcaattacagactgtgttaccttggacaatttggctaagtccttatgcaaaaaaagtatgatgccatttacttaataggrttgtgaggattaaatgagataattcatataaagcccatagcggaaggcctggcaggtagcaagggcccagcaaatgagagctattcacgttgccattaatgcatcatcatcgttacaattatcatctttttttttttacgttccaaagattcttccttctatctattatctcatcatatctcatctcatcatatcatatctcatcattttatccagag

SEQ ID NO: 939168 - DNA, 612 bp, Homo sapiens
gcaaaacttcttaagtaatatcccacaagcataggcacccaaagcaaaagtaaacaaatggaatcacaacaaattataaccttctgcacaacaaagaaaacaatcaacaaaatgaggagacaacacacgaaattggagaaaatattttctattcatctgacaaggggttaataaccagaatatataaggagcttaaacaaccctatagaaaaaaatctactaatctgatttaaaaatgggcaaaatatttgaatagacatttctcaaatgaagacatataaatgaccaacatgaatatgaaaagatgctcaacatcattgttcatcagagaaatgcaaatgaaaactccaatgagatatcacctcacctccgttaaaatggcttatatccaaacgtcaggcaataacaaatgcaggcgaggawatggagaaaagggcaccctcatatgctgttgatgggaatgtaagttagtacaaccactatcagaatagtttggaggttcctcaaaaactaaaaatagagctaccatacaatccagctatcctactgctgggtatatatccaaaagaaaggaaatcagtatattgaagagatgtctgcactgtcatgttt

SEQ ID NO: 939169 - DNA, 612 bp, Homo sapiens
ttgcttattttaccgagaaaacacaggcaactagaggggaatttccatatgttcccatcacccccatctaactcctagctacatcagtgctcacacctctgctttctctgttaatgtggatgcagtctgtgatctagcagacccattcttattatgcagtagattccatcccttcccatcaactcaaagaaatttcccccagcaattcttccattctatattctgcatcaccaatattttttattttatttatttatttatttatttatttattactagatcaggaataattttgccatcccccttccacaagagacatttggcaatttctggagactcttgtggttatcacaacccaggaaagaagcagggcgcactactggcctctagtggacagaatgctaagaagctttctaaacatcttacaatgcagrggatggcccttcttaacaaagaattattctgcctaaaatgtcagtcccaaattgagaaaccctgtactaggccattcctataagcacataaacacacacacacaagtgctattatttctcccattttaaaaatcaccctcccgtgactccacatacccttccaatttcaatcctattt

SEQ ID NO: 939170 - DNA, 631 bp, Homo sapiens
tatatatatatatacacatatacacacacacaagtatatacatatgtaattgatatatacatatatgttttatatatgtgtatatacacacttatgtgaatatatgcatgtgtacataacattaattttttgaccaataaaaattgcataattatgtattgtgtatattataaaagtttgataggtatatatattgtaaaatgtttaatacaattaagttgatgaatatttatgtcaccttacatggttatgttttttgtagtgagagcatttgaggtctcctactgttgcagcaaattttaagcatacaaaacactgttattaactacatcttaaagctatacattagacccccaaaacttatttatcttataactgaaagtttgtactctgaacacctcatcattttttctacctccaggcctggtcattaccattgtactctctgcttctatgagttcaggctttttaaattctccatttaagtgagaacrtacagtgtttgtccttctgtgcctggcttattttgcatagcataatgtacccaggtccattcatgttgttgaaatagcagaatttcattcttttttatgggtgaataatattcagttgtctatttataccacatttt

SEQ ID NO: 939171 - DNA, 684 bp, Homo sapiens
aacaaaggggttacagggcccatgcaaatctgaaatccagtggggcagtcaaaatctaaagctccaaaatgatctcctttgactccatgtctcacatccaggtcatgctgatgcaagaggtaggttctcatagtcttgggcagctctgcccctgtggctttccggggtatagccyccctcttggctgctttcatgggctggcactgagtgtctgtggcttttccaggtgcacagggcaagctatcagtggatctaccatgctggggtctggccctgttctcatagctccactaggcagtgccacagtcgggactctgtgtgggggctccaaccccacatttcccttctgcactgtcctagcacaggttccccaggagggccccactccagcagcaaacttttgcctgggcatccagatgtttccatacatcttctgaaatctaggtggaggttcccaaacctcaattcttgacttctgtgcacccggaggttcaacaccacatggaagctgccaaggtttggggcttgcaccctctgaaaccatgggccgagctgtaccttggcaccttttagcaatggcaggagctgctgggacacaaggcacaaagtccctaggctgcacacagcatggggaccctgggcccagcccacaaaaccattttttcctcctaggcttccaggtct

SEQ ID NO: 939172 - DNA, 852 bp, Homo sapiens
tgacatcttaattacaaccccctaagagacctgtatcagaactacccagctaatctgctccaagtttctgactcacagaagctttgagaggataattgttttaagctgctaaatttggagctagcttgttacacaacaataataactaatacacttagtagaaataagaatgggttcacgaaacatttcagttgtatatgagtgtgtgctaggtctcagtgtaaaatgaaccccttcttataggttgcagtaaaaaacaaaatggaaaattgtgcacaaaacaaaccaagcaacagttttctactctgaggtcttgctgctgccttcctgaggtctacatgggaatcaagacgcaggtcctctttgctttcaggtgccccaaacttattagtggctcatgcagcctttattgccccatcattctatagctaggccagtcaccaagggtgggcagggatacacaggatacaaggacacttctcagagctctatttacatctaaattctccttgattttttttttttttgagatggagtctcactctgtcaccaggccggagtgcagtggtgygatcttggctcaccgcaatctccgcctccagggttcaagtgattctcctgcctcagcctcccaagtagctgggactacaggcatgcaccaccaggcccggctaattttttgtattttagtagagatggggtttcaccatgttggccaggatggtgtcaatctcctgaccacgtgatctgcctgccttggcctccctaagtgctgggattacaggtgtgagccaccgcacccggcctctccttgattttctaagctcctctcatccaacctgaaaacatctt

SEQ ID NO: 939173 - DNA, 586 bp, Homo sapiens
atggcacctctgctcaggcttcactggggctggctgggctaattccacccacttggcctggcaggctttgatcagcttatgctaccagcccagatcctgtgcctgctgtggctctaggctcagcctgtggttgatccaggcacactgtaactggcttccaccttgggccctggcatctggatgaagggtacatggcagggcccaaaaactcaaagatgccagcaaccgtagagccctgagggtgttacagctttagctcagggagtcccgaagtctgaacccccagtaggtgttacagcttttgtttgttcccaccacacacagcttggcaaatggrggtgtgtggcatccagcagtttttttcactctcatagcttggtaacaaggaacatgttacagctctttttgcactgactctttggctggttccaggttcttgtcctgtgaccaagaggaatgaggtacacagacactggagattgagctaggcaaagaagaattttattgagagacagaaaagctcttgacaaaaggggacttgaagtgagtagccccctttgtgagaggggcccaaagtgggtagcca

SEQ ID NO: 939174 - DNA, 566 bp, Homo sapiens
tgacatacaaatgaccaacatatatgtgaaaaaatgctcaacattattaatccttatggaagtgcatattaaaaccacaataagatatcatcttacacctgtcagaattattgttatccaaaagacaaaatataaaaatygttagctagaatgtggataaaaggaaaccctgaacactattgttgggaatgtaaactaatacagtcgttatagaaaaatgtacagagatttctgaaacactaaaaatagaattatcatatgatccagcaatcctacttgtaaatatttacctaaaacaattaaagtcaatttgtgaaagagatgtgtgcacttccatgttcattgcaccactattcacaagtcacgttatggagtcaacttatgtatccatcaattgatgaacacttaaagaaaaggtggtaaaggtacataatggaatactaggcagccttaaaaaagaagaaattctgtcatttgcaaccccgtatatgaaattttagagtattatgctaagtgaaacaagccaggcaaagaaagacaaatacctcatgttttcattataggtg

SEQ ID NO: 939175 - DNA, 566 bp, Homo sapiens
tgacatacaaatgaccaacatatatgtgaaaaaatgctcaacattattaatccttatggaagtgcatattaaaaccacaataagatatcatcttacacctgtcagaattattgttatccaaaagacaaaatataaaaattgttagctagaatgtggataaaaggaaaccctgaacactattgttgggaatgtaaactaatacagtcgttatagaaaaatgtacagagatttctgaaacactaaaaatagaattatcataygatccagcaatcctacttgtaaatatttacctaaaacaattaaagtcaatttgtgaaagagatgtgtgcacttccatgttcattgcaccactattcacaagtcacgttatggagtcaacttatgtatccatcaattgatgaacacttaaagaaaaggtggtaaaggtacataatggaatactaggcagccttaaaaaagaagaaattctgtcatttgcaaccccgtatatgaaattttagagtattatgctaagtgaaacaagccaggcaaagaaagacaaatacctcatgttttcattataggtg

SEQ ID NO: 939176 - DNA, 611 bp, Homo sapiens
  misc_feature 508, 594, 595, 596, 597, 598, 599, 600, 601, 602, 603, 604,605, 606, 607, 608, 609, 610, 611: n = A,T,C or G
gtgtctttcatttccagaagttgtgattgtttctctggagattttttgtccatatcctgtttttttttgttttttttaatttatttaagttgtttttcacctttctctggtgcctctttgagtagcttaataattgaccttctgaattctttttctggcaattcagagatttcctcttggtttggatctattgctggtgaactattgtgatcttgggggtgttaaataatcttgttttctcatatcaccagaattgtttttctagtttcttctcaattggatagattatgtcagagggaagatctggggttcaatggctgctgttcagattgtctcatgggataccmgcttaatgtggtgctctctccctacccatagggatggggggcttcctgagagctagactgcagagattcttattgctctccagtctagccacccagcagagctagcaggctctgggctagtactggggagtgtctgcaaagagtcctgtgttgcgaatctngcttcaggtctctcaaccagggataccagcacctattctggtgaaggtggcaggggattgaagtggactctgtgagggtctttggnnnnnnnnnnnnnnnnnn

SEQ ID NO: 939177 - DNA, 606 bp, Homo sapiens
tcatagataaccataacatatagtaataataaagaagtttgaaatattgaaagaaatgccaaaatgtgactcagagaaacaacgtgaacacatgctgctggaaaaatggagctgattgacttgttcaatttgggattyccttagactctgtatctgtagaacacgtaattttttccaagtgcaatgagtggaagaacaataaaacaaggtctacttgtatttatgaaagagtagctataaataaaatcttaaaaaccaaactagaaaatggaaactgcatctaagagatttgtacaattagagattatggactacattagagaaaatgaactatcatataggtagggtagtcagacatggtaaaaataaagaatgcctttattagtgattttttagccacttctgtttagcttgatgaaataatcctttgaccatccaagggaatatgttagactgctaaatgggaggttcacatggaagctgttccaaggaaattgaacgttatgaagtagaatgttgggaaagtgttaaaatcttcacagaataaaaggatttaagagagttggaatatgatgccatagaagaagaccatggcagttggtaggg

SEQ ID NO: 939178 - DNA, 564 bp, Homo sapiens
tttgtagaatgatgggattttttcctgaattttcaaatttcccgcataagatatagtagctataaaagcaagaaaaaaatatatatgaatttgcatgctgtttttcgaatgttgttattctatttttaaaaaatacttatattcagtggaatactttgctatggaaattcatacaattttaaacaaagtaattaaatcataaatgagaaatttatgccaaagataatattcataatgcttcattcatttattagagctctgtgatatttcttaaatgatgttttaaatttgacgccagaatgtcttccacgtttcaaaggttttcaggtatttgaaagttctgtgacacattagtgtgtggctttgacatttatccagaataaaagcagtcataatataaattcaaatttatatttrtatattagttattttctaacttaaacttgcctaaatagtaagtctttatgcacaaatataaaaacaaatctgttcttcattttgatgaattcaatataaataaatacactacagagcaggtgcccttttcttcattgtacttgtttt

SEQ ID NO: 939179 - DNA, 662 bp, Homo sapiens
atgagtgatgggccctgccatacagcactgacagaatccttggtttaaaaattcgtcacgtgcctgcagtgacattccttctggctgatgacgtgccaggagatgttaatgaattaaagccacacttgcctgaagaagctggcgaagttaccgactggttcaaaaataattatgtgcactgtaggataagaagacacctacacaggccgggtgccgtggctcacgcctgtaatcccagcactttgggaggccgaggcaggcggatcatgaggtcaggagatccagaccaccctggctaacacartgaaaccccgtctctactaaaaatacaaaaaaattagccgggtgtggtagcgggcgcctgtagtcccagctactcgggagactgaggcaggagaatggcatgaacccgggaggcggagcttgcagtgagccgagattgtgccactgcactccagcctgggcgacagagcaagactgcgtctcaaaagaaaaaaaaaaagaaaacaaaaaaaagaagacacctacacaacggttttgccgttctgtcgccagcgcggttcccaccaatccacggtctgcgtatgaaagcatccagatggatttcctcatacctaaaacaatgtggacgcatggcacagaagatgtgaaggttgaagagg

SEQ ID NO: 939180 - DNA, 662 bp, Homo sapiens
atgagtgatgggccctgccatacagcactgacagaatccttggtttaaaaattcgtcacgtgcctgcagtgacattccttctggctgatgacgtgccaggagatgttaatgaattaaagccacacttgcctgaagaagctggcgaagttaccgactggttcaaaaataattatgtgcactgtaggataagaagacacctacacaggccgggtgccgtggctcacgcctgtaatcccagcactttgggaggccgaggcaggcggatcatgaggtcaggagatccagaccaccctggctaacacaatgaaaccccgtctctactaaaaatacaaaaaaattagccgggtgtggtagcgggcgcctgtagtcccagctactcgggagactgaggcaggagaatggcatgaacccgggaggcggagcttgcagtgagccgagattgtgccactgcactccagcctgggcgacagagcaagactscgtctcaaaagaaaaaaaaaaagaaaacaaaaaaaagaagacacctacacaacggttttgccgttctgtcgccagcgcggttcccaccaatccacggtctgcgtatgaaagcatccagatggatttcctcatacctaaaacaatgtggacgcatggcacagaagatgtgaaggttgaagagg

SEQ ID NO: 939181 - DNA, 629 bp, Homo sapiens
atcacaccacgttcttatgttcaccttctgcttcagcaggtctcctctgacagcacaccatcaggagaggaggctgttgcctcattactgtcaattagccatagaagtctgggttcctccacaggtgccctgacacctggggtgttgggaggtgccttctgagtgcagggggtggaggtcagactctccatcaggtctctgctgatccacccatcaggagtgtgggcggggccacaacctctcctctggtgcttggctggaggaggccattgttgttgaaaaattttccttcctgctaagttgctccattcctttgacctagagagagaactggcttttctttggccttttgttgggtctgtgtctgttagtgttyctgcgtggctggactctccaggcctcagtgaggataaagaaaatgctacatgtttcctcaggtcctgctgtctctagtccgtctgccttctcgaattttcacagctttttcttgagtgtttgatgtataatacatacagttctagctgttcttagtgaggggaatagagagaaatggacctacttcatgttgtctggaaccagaagttccttaatctggttttgtggccgatgtgcaaaacatcatttatctc

SEQ ID NO: 939182 - DNA, 751 bp, Homo sapiens
tgaaaccacagaaagtcctgcttctcaacttgggggtttggcttgggcaacgcccttggtgagacaaatccagagcaaggatggtgaagaacgcccattagtcagtggccttcctttgtctcttagcttttcccttgcgatatggtttggctctgtgtccccacccaaatctcatcttgacctgtaatccctatgtgtccagggagggaggtgattggatcgcacaggcagttcccccatgctgttctcatcatagtgagttctcatgagagctgatggttttataagtgtctggaagttcctcctttgcgcttctgtctcctgccaccttgtgaagaaggtgctttcttaccyttgccttccactgtcattgtaagtttcctgaggcctccccacccatgaggaactgtgagtcaattaaacctctttcctttataaagtacccagtcttgggtatttcttcatagcagtgtgaaaacagactaatacaccttggaaataatctcatgcttacagaagagttgcaaaaatagcaaaactagtataaagtgtctgccctaccctccacccagcttccctgaaggctgcggttacgtaattcattgtgttaaacttacagtcacatagcagatgacactattaccagccggtctacaggccttgtgtgaatgctaccaatttccctgtgattgcctcttttctggtcccagacccatttcagggcccaggttgcttctagctgctgtgtcat

SEQ ID NO: 939183 - DNA, 758 bp, Homo sapiens
atgaaaccacagaaagtcctgcttctcaacttgggggtttggcttgggcaacgcccttggtgagacaaatccagagcaaggatggtgaagaacgcccattagtcagtggccttcctttgtctcttagcttttcccttgcgatatggtttggctctgtgtccccacccaaatctcatcttgacctgtaatccctatgtgtccagggagggaggtgattggatcgcacaggcagttcccccatgctgttctcatcatagtgagttctcatgagagctgatggttttataagtgtctggaagttcctcctttgcgcttctgtctcctgccaccttgtgaagaaggtgctttcttacctttgccttccactgtsattgtaagtttcctgaggcctccccacccatgaggaactgtgagtcaattaaacctctttcctttataaagtacccagtcttgggtatttcttcatagcagtgtgaaaacagactaatacaccttggaaataatctcatgcttacagaagagttgcaaaaatagcaaaactagtataaagtgtctgccctaccctccacccagcttccctgaaggctgcggttacgtaattcattgtgttaaacttacagtcacatagcagatgacactattaccagccggtctacaggccttgtgtgaatgctaccaatttccctgtgattgcctcttttctggtcccagacccatttcagggcccaggttgcttctagctgctgtgtcatttgtcg

SEQ ID NO: 939184 - DNA, 758 bp, Homo sapiens
atgaaaccacagaaagtcctgcttctcaacttgggggtttggcttgggcaacgcccttggtgagacaaatccagagcaaggatggtgaagaacgcccattagtcagtggccttcctttgtctcttagcttttcccttgcgatatggtttggctctgtgtccccacccaaatctcatcttgacctgtaatccctatgtgtccagggagggaggtgattggatcgcacaggcagttcccccatgctgttctcatcatagtgagttctcatgagagctgatggttttataagtgtctggaagttcctcctttgcgcttctgtctcctgccaccttgtgaagaaggtgctttcttacctttgccttccactgtcattgtaagtttcctgaggcctccccacccatgaggaactgtgagtcaattaaacctctttcctttataaagtacccagtcttgggtatttcttcatagcagtgtgaaaacagactaatacaccttggaaataatctcatgcttacaraagagttgcaaaaatagcaaaactagtataaagtgtctgccctaccctccacccagcttccctgaaggctgcggttacgtaattcattgtgttaaacttacagtcacatagcagatgacactattaccagccggtctacaggccttgtgtgaatgctaccaatttccctgtgattgcctcttttctggtcccagacccatttcagggcccaggttgcttctagctgctgtgtcatttgtcg

SEQ ID NO: 939185 - DNA, 594 bp, Homo sapiens
tttttaatagtagatccctgatttaatagtagtctattcttatgtatggtgtgagatagggatttggtcttatctattttcaattagtaaacctgttggcccagcaccatttattaaaagttaatctttaacctaattrtttaagatgtcattgtcaccatgtactaaagttctgtggttagtttgttctatttttggactattctattccattgtccatgatattgctgtaaaaatgcaccaaaactttcccatataagaaactttataagtaggtatgaaaattagcattttagataaattgcccaggtgattttcatgtccacacagttgttcctttccatcttcttcagaaattttaacaaattttcttattaccttaagaaagtagattgttaaaagatagcaaattgttctaccaaaagacatatgcatttgcctgttcattgcagcactattcataatagcaaagatgtggaatcaatctaggtgcctatcaacagtggattggataaagaaaatatggtacatatacattatggaatactatgcagccataaaaagaatgaaaccatgtcctttgtagcaacatgg

SEQ ID NO: 939186 - DNA, 623 bp, Homo sapiens
tctctgctcatggtgagcattgcagactgagaacagctctacctttggtggttgttttatgtttcctcagtgactgatttttattagtttcaaaagataacaatatatgcatgcacacacgctgatgtttctgaagggcattgtgatgaaagattagaatgctttttgccttcctcctgatcaaacagtgggtcttagggagtatgggtacatttactttgtcaccaaaragaataaaatctgttgacattgttacttgtcactcatcttcattcattcctttttctttttcaaattatactctaagttctgggatacacgtgcagaatgtgcaggtttgttgcacccatccgcccgtcatctacattaggtatttctcctaatagtatctctcccctagcccccaaccccttgacgggccccagtgtgtgatgtttcccctccctgtgtccatgtgttctcattgttcagctcccacttatgagtgggaacatgcagtgtttggttttctgtttctgtgttagtttgctgagaatgatggtttccagcttcatccatgtccctgcaaaggacatgaactcatccctttttatggctgcatagtattccatggtgtatatgtg

SEQ ID NO: 939187 - DNA, 623 bp, Homo sapiens
tctctgctcatggtgagcattgcagactgagaacagctctacctttggtggttgttttatgtttcctcagtgactgatttttattagtttcaaaagataacaatatatgcatgcacacacgctgatgtttctgaagggcattgtgatgaaagattagaatgctttttgccttcctcctgatcaaacagtgggtcttagggagtatgggtacatttactttgtcaccaaaaagaataaaatctgttgacattgttacttgtcactcatcttcattcattcctttttctttttcaaattatactctaagttctgggatacacgtgcagaatgtgcaggtttgttrcacccatccgcccgtcatctacattaggtatttctcctaatagtatctctcccctagcccccaaccccttgacgggccccagtgtgtgatgtttcccctccctgtgtccatgtgttctcattgttcagctcccacttatgagtgggaacatgcagtgtttggttttctgtttctgtgttagtttgctgagaatgatggtttccagcttcatccatgtccctgcaaaggacatgaactcatccctttttatggctgcatagtattccatggtgtatatgtg

SEQ ID NO: 939188 - DNA, 623 bp, Homo sapiens
tctctgctcatggtgagcattgcagactgagaacagctctacctttggtggttgttttatgtttcctcagtgactgatttttattagtttcaaaagataacaatatatgcatgcacacacgctgatgtttctgaagggcattgtgatgaaagattagaatgctttttgccttcctcctgatcaaacagtgggtcttagggagtatgggtacatttactttgtcaccaaaaagaataaaatctgttgacattgttacttgtcactcatcttcattcattcctttttctttttcaaattatactctaagttctgggatacacgtgcagaatgtgcaggtttgttgcacccatccgcccgtcatctacattaggtatttctcctaatrgtatctctcccctagcccccaaccccttgacgggccccagtgtgtgatgtttcccctccctgtgtccatgtgttctcattgttcagctcccacttatgagtgggaacatgcagtgtttggttttctgtttctgtgttagtttgctgagaatgatggtttccagcttcatccatgtccctgcaaaggacatgaactcatccctttttatggctgcatagtattccatggtgtatatgtg

SEQ ID NO: 939189 - DNA, 589 bp, Homo sapiens
aagcagagcaggagtttgttgaatagactgaactaatggagaactgaaataatttttatggctttttaaatttgaaatatcagtgattatttttgttttgcttttcagggtctggagaactttttttgagctatttatagcttttaaatacactttaggtatactgagtagastatacagaatttgaggcatatttatctctctttgcctaatttccccagaatttgtaaactatttgtgattcttaatttatggcaatgtgtttgtttgcatacatttaataagaatctgtttccttttataatgggacacagttgaaagaactgattattttcccatggttttgactgaaatgaccttgtgagaggttccagcaaagccaatttagaagagcctttgtggacaatgattcttgctgcactttgtgtgggtaatcagtccaagtatatgagactgaagattatttggtaagtaagttagtcctgctgtgattagtctttggtagaagtggaggactagagagagaaagattgtttttcagaagaaaactacagtattagattaacctttgattcctgggtggtcacgt

SEQ ID NO: 939190 - DNA, 589 bp, Homo sapiens
aagcagagcaggagtttgttgaatagactgaactaatggagaactgaaataatttttatggctttttaaatttgaaatatcagtgattatttttgttttgcttttcagggtctggagaactttttttgagctatttatagcttttaaatacactttaggtatactgagtagagtatacagawtttgaggcatatttatctctctttgcctaatttccccagaatttgtaaactatttgtgattcttaatttatggcaatgtgtttgtttgcatacatttaataagaatctgtttccttttataatgggacacagttgaaagaactgattattttcccatggttttgactgaaatgaccttgtgagaggttccagcaaagccaatttagaagagcctttgtggacaatgattcttgctgcactttgtgtgggtaatcagtccaagtatatgagactgaagattatttggtaagtaagttagtcctgctgtgattagtctttggtagaagtggaggactagagagagaaagattgtttttcagaagaaaactacagtattagattaacctttgattcctgggtggtcacgt

SEQ ID NO: 939191 - DNA, 765 bp, Homo sapiens
cttccaggtcaactggaagaaaggctaatttcaattatgaaaatagagaatcacagcccctcaatttccagacatgaaccagtttatacacccagaaccctttgaatgaaagggaggctggatcccttaaagaaggacccaactccactaccaacaatttatactgttaatcttttccaatccttcccaaggagacctccagccttttaccagggtaactgtgcattggggaaaggtaaatgatcagaactttttggaactatttgacactggctctgagctgatattgattccgggggacccaaaatgtcactgtggtcctccagttaaagtaagggcttatggaggtcaagtaattaatggagttttagctcaggtccaacttacagtgcatccccggactcatcctgtagtcatttccctagtgccagaatgcataattagcaaagacatacttagcagttggcagaatccccacattggctccctgattggtagggtgagggctaaaayggtgggaaagaccaaatggaagccattaaagctgcctctacttagaaaaatagtaaatcaaaaacaatatcacatcgctggtgggattgcaaagattagtgctaccgtcaagaacttgaaagatgcaggggtcgtgattcctaccacatccccattcaacactcctacttggcctatgcagaagacagatggatcttggagaatgacaatggattattgcaatcataagcttaaccaagcagtgactccaat

SEQ ID NO: 939192 - DNA, 559 bp, Homo sapiens
ggggaaaaagaatacaaaagtaattacttcaccaaagaattcaggttcccagcaatcctagtccctttgtgtggctggtgtatttggtgactatgcatgtggaaggtcttccactccctgtgaatacactccagttcttgagaggctatttaagtattcatcctttgtgtggttttgattttcctatgctggtagatattgttagcattttgattttctctttgcagagcactgctrtggctggtacagtggaggctggcactccaccttgatgctcactgtggggcttttgtgcagagtctgttatcctcaaagagccctctttaatgtttacagagaaggtgtgacctctagcagaatctcagagcttcacattttattagacacctaatgttctttctatacctactatttatatttatgtgcattggaatcctttggctatatagctgctatagaagagccaactgcattagcttgctcgggctgcagaataaaatatcacagactgggtaaattaaacaaacaacagcaatttatttcctcacagctctggagg

SEQ ID NO: 939193 - DNA, 585 bp, Homo sapiens
tccatcccatagttacaatggttagttcagagatgaacgcaggatccacgtgggtctggtgagacattcttcagcttgctttctttctgatgcgactaattgctaaggaggttggatgttaagactggagatgtaggtcttccctctgtttagagaaataaaaccagtgcagtgaaagcacaatgaagacagggagagaaattgagtcctgatgctctttgagtatctggagtaaaaaggatttctaagaacgtgtgtgtgtgtgtgtgtgtgtgtgtgtgtgtgygcgcgccagttctacttatgggatttataaacatatgaaccaataaattccaatgccctttgctgcaggttttgctaactcagtttgagttgtgtgctggccacatccaactatcctgacttcacttttgctcgctgataatctcctttcccatcttaaaagtttggtccaggcaagaccatgtctcctgcttttattgagcccagggcttatttcgtctccatctggttacagaagtttcttcaaccttttgtatagtctcctcttgccttattcttctacaagttcaacacaagtgc

SEQ ID NO: 939194 - DNA, 801 bp, Homo sapiens
ggccagatacaactaagctgctgactagttatcgatcatacaatctagtagcctgttagaatatggagtatgacagacagtttctggaagtcacattattagtatcaacctttagtgtttgtttttatagacactgacctacatataaataagattgtgaaatttgaaagaagtacaaaaacataacccataatcaaaagagaaaaagatcaatagaagaatattytgaaataatcaaaccaaacatttaaaataactatgcaaaatattagataaatgatctattagaaagttacatggataaacagatgacaatttttaacacataaaatgaagatataaaaagcaaatgggaatgttagaacggaaaaatgaaataatgttaataaaaacatctgtcattgaaattcacagtgaattagattcaatataaaaaagtatcattcaaattaaagccagtctataaattatctataattgaagagtaaaacaaaaaaataacaaaaataaaaatgataagaaacaattaaaaaatcaacagaatacacaagacctgtggaaaatgtaaaatggtttagcatgcatgttgctggaataccaggtggaaagcaatgaaaaaactgagcataagacacatttgaggaaacagtagccaagaattttcccaaaatattgtactgccttaactgtgagatctaagatgctcagtctatcccaatcaggataaatgcacagaaaactaaactaagcatattatagtcaaaggactgtacattaaataaaggaagaaatcataaaaac

SEQ ID NO: 939195 - DNA, 796 bp, Homo sapiens
tggcgcatgcctgtaatcccagctacttgggaggctgaggcaggagaatcacttgaacctgggaggcggaggttgtggtgagctgagattgcgccattgcactccagcctgggcaacaagagcaaaactccatctcaaacaaaacaaaaaaacaaaaacaaaaacaaacaaaaaaaaaaaaaggaraagtaacaggagcaggggtggaaccaggtaggtcttctagaacccaggtcttaactaagctccacagttaaggctatcaaccagaagactatgatctggttgggaccttattttattgaagaggagactaaagcaaggaactcaaagacagagaatgaccagttttaagccaatagaggaagcatgatcttctgatccgcaacagccacctcctgaaataaatcctccaaggctctcagaagaggagaatgcactgacgtaggcgttcaggagacaatggggtggtactccacaatctcttcagtggaacagagaacaatggctggctgccgagattcaggcttgctggcaaaggtggcagtggtgcagcagccactgccaggcccttacagaccttatgttcttggcacagaagggtctcatcacagggtttacattttaagtaagttcaagcctttggggatgtctgcatgctggctccatggactttcctatgacctcttctgtacctctccacagaagttagatgatgtacttaaccagatcagcaaatccagtaaactaatttttgtcccaatttagaaagaagtaagaatgtcaaaatgtacat

SEQ ID NO: 939196 - DNA, 390 bp, Homo sapiens
gtgtgagccaggccaggacatctttcagaactgtggcacctaacacagggtcaggggtctgaggtctgaaggaatccagctaacccccatttcagatagggaaggtgaggggcagagtggggtagacactttcctgaggtcttgcagccactcatgcagccactcrgaggtcagaaaatatggcctcctatccccagatgaggctggaagctacggaagcccagaaggccctacggagacggggcatgggaatggggcatgggaatggggcatggggatgggagtcttatcctgccccagcccaccaggatgctggttaggctccccctagcccttgccgacctctccctcctaggcccttgcagtcccgtttatttctcccatacagcc

SEQ ID NO: 939197 - DNA, 610 bp, Homo sapiens
ggtttctttttcccagttccacacccagcaggagagataaagtttctgatccctattagttcaaacaagactccatggccttagccttaggctaactcagccctgagtcagagctccattcctcaatatagtcttgggaccaaaggaacatggtgatctgattggctagaccagggtccctccctcatcctaccatgttcccccaagcttctggactacttagggcttcagctccaccgtaaacaaattgagagttagaaggtatsctgttcactgcagggacaagggatactgtcccttagcaagagcaacagacctgccttttatctgttatgttcttgagctatttcctgaaagcaatcaatacaacactcataagttaaattttattgaattcatagttacaaaagccaggaagtcgtttagttattaaccacatggtttgaaattgatggaattgagacagaaatcactttaaaaactgagagagggtgtcatagtctgttctggctgctgtaacaacatcccacagactacgtagcttataaacaacagacatttatttcttatagttctggaggccaggatgtccaagatcaaggtgccatta

SEQ ID NO: 939198 - DNA, 623 bp, Homo sapiens
ctcctgaatgactcctgagtaaacaattaaggcagaaatcaaattgttttttgaaaccaaggagaacaaagagtcaacataccagaatctctgtgatgcagctaaagcaatgttaaaaggaaaatttatagcactaaatacccacatcagaargctagaaagatctcaaatagacacccagcatcacaactaaaaaaatgagaaccaagagcaaacaaacccaaagctagcagaagacaagaaataaccaagatcagagtggatagagacacaaataacccttcaaaaaaatcaatgaatccaggagctggtttttgaaaaaactaataaaatagattgctaactagactaatgaagaaaagagagaagaatcaaatagacacaataaaaaatggtaaaggggatatcaccccgaccccacagaaatacaaccaaccatcagagactactataaacacttctatgcaaataagctagaaatatagaagaaatggatacattcctggacacatacaccctcccaagactgaaccaggaagttgaacccctgaatagaccaataacgagttctgaaattaggcaataataagctaccaacaacaacaaaaaaaaagcccaggacc

SEQ ID NO: 939199 - DNA, 623 bp, Homo sapiens
ctcctgaatgactcctgagtaaacaattaaggcagaaatcaaattgttttttgaaaccaaggagaacaaagagtcaacataccagaatctctgtgatgcagctaaagcaatgttaaaaggaaaatttatagcactaaatacccacatcagaaggctagaaagatctcaaatagacacccagcatcayaactaaaaaaatgagaaccaagagcaaacaaacccaaagctagcagaagacaagaaataaccaagatcagagtggatagagacacaaataacccttcaaaaaaatcaatgaatccaggagctggtttttgaaaaaactaataaaatagattgctaactagactaatgaagaaaagagagaagaatcaaatagacacaataaaaaatggtaaaggggatatcaccccgaccccacagaaatacaaccaaccatcagagactactataaacacttctatgcaaataagctagaaatatagaagaaatggatacattcctggacacatacaccctcccaagactgaaccaggaagttgaacccctgaatagaccaataacgagttctgaaattaggcaataataagctaccaacaacaacaaaaaaaaagcccaggacc

SEQ ID NO: 939200 - DNA, 738 bp, Homo sapiens
ccctaatgagagagacagcctgtcctttgaatttttgaagccaggcttctcctctctagcaatgaaagacctagatggcatcttcttccaatacaaggctgtttcatctacattgaaaatcggttgttggacatagtcaccttcattaattatgttaactagatgtttttgataacttgctgcagcttctattaatayatcagcacttgctgcttctccttgcacttttatgatacagagatggctccttttcttaaaacttatgaatcaatctctgcttaaactttccttccacagcttcctcacctctctcagccttcatagaattgaagagaattaggaccttgtcctagtttgggtttaagggaatattgtagctggtttaatttatccacacctctaaaacattctccataacagaaataaagctgtttcactttcttatcatttgtgtgttcacagaagtagcacttctaatttcctttaagaactttttctttgcattcacatcttgcctaactggtgcaagaggcccagcttttcatcagtcttggctttccacataccttcctcactaaacttaatcatttctagcttatgatttaaagtgagagatgtgtgacatttccttgcatttgaacacttagaggaaattgtagggttattaataggcctgatttcaatattgtggtgtctcagcaaacagggaggccttatatttaccaagtaagttggccg

SEQ ID NO: 939201 - DNA, 768 bp, Homo sapiens
aggcgacctccaccacacctggctaattttttgtatttttagtacagacagagtttcaccgtgttagtcagtattgtctcaatctcctgaccatgtgatccgcccgcctcagcctcccaaagtgctggaattacaggcgtgagccaccacgcccagccaggtagttctttatagcagtgtgagaacaggctcatgcaggtctggtggaaggtgattggatcatggtggctgtttctcatggtttaagagcatcccccttgatactgtcatcatgatagtgaattcttgtgagatcttgttgtctaaaagtgtgtggtacctcccccatctctctcatggtcctgctcctrccatgtcagatgtatgctcccactttgcttccaccatgagtagaaactccctgaggcctccccagaagcagatgtggccatacttcctataaagcctgtagaacggtgagctagttcaacctcttttctttatacattactcagtctcaggtatttcattgtaacagtgtgagaatagactaaaacagatggatatttcctgtgaggacatagtctaaaataaagcaggctttaagatcagctagacttgaatcctggctttgctcctactagctacgttgtcttgagcaggtaacttaacctctaggagcttcagtgtattcatctgtaaaatggagttagtaatcgtagtgacctcagcaagtcatcattcatcatttcaccaaatactcagtgaacacataccggggtcctggta

SEQ ID NO: 939202 - DNA, 775 bp, Homo sapiens
ccaaaaaggccaaggcattactagaagattggaactttcaaccatatcccttgacctttggggaggagttggagattgacttcatcaccaatgcagtggatccaacatgcctatgtaaagaatcctctgtaaaaaccctgaatggtgggtttggagtggttctgggttggtgaacacatcaaggtgcttagagggtggttcacggggaaagggtatagaaattttgcacctctctcatacctggccctatgcatgtcttccatttggctattcctgagttgtagcctttataataaactggtaatagtaaataaacggtttccctgagttcagtgagtcattatagcaaatttctgaacctgaggagggagtcatgggaaccctakgtttgtagccaagtcagacagaagtgtgggtaacctggggaaccactacttgtgattggtggcagaattggtcggggggtggatagtcttgtgcaactaaacccttaacctgtggggtctgtgataactccaggtagttagtgtcagaattgaaataaattgtaggacacccagttggtgtccagagacttggaggattggttggtgtagggaaaaccaccacgtttgctgtcagaagtgtgtgagtgtacagaaatagtgttttttccctttctaccctcattatcagttgttgtagcaaactacaacaactgtgagggtgaatggaataagatgggaagaggaaatgtgtgatttagggaagttttcatccaacaggaaggaaaagt

SEQ ID NO: 939203 - DNA, 573 bp, Homo sapiens
gggatttaaatatttatttaagccaggtgtggctgaggtgagaggatcacttgaggccaggagttcgagaccagcctgggccacacaatgagacccctgcctttacaaaacaattttttaaaaaaattagctgggcatggtggcgtgtgcctgtagccccagctactcaggaggctgaggtgggaggattacttaagcctgagaggttgaggctgcagtgagccttgattgcgccattgtgctgcagcctggatgacagagcaagaccccatctcaacatatgtgtatacatctatctatctatctatctatctatctatctatctatctatagctatatctgtctcatytctctctctctctgtctatatatatatatatatatatatatataaataaatatgttcttttttttttaatttaacaaaagcaggaagtagacagacacagtgggtggttcatgccagtaatcccagcactttgggaggccaaggcgggaggattgattgaagccaggagtttgagaccagcctgggcaatatagtgagacccctaactctacagaaagtttaa

SEQ ID NO: 939204 - DNA, 662 bp, Homo sapiens
cactgagagccttgaaaatacctgagatttgtttgaggaagaaaagaaaaaaggaaggagagaaatccagtcgttaccatgagtgtgacgagagtggggagaaccagtggagcttctgatcctgtcccagcagatgccagtggctcggaccaaggaggacagagggatgggcgtgcccacgtgaagcctcaccccagaccccagaccctgcttacatgccgggacgaaggtgggagagaaccgtgcatctcagcacggcggtggaaacgyggtccacctgcggagggcctgtttgcgtttattacacccgagcaaggcccgcacgcccaccagaggggccagggtgcccctgggagccgctgagagacgggggaggcacaggctccacgcgccgcttccctggactgcgaggaggcggcgatggcgagtcaggaggaagcctatttttagaaacgcttaagtgcccacgatcttctgaccatcaaacaagaaacgttgctgtttgaagctatacacggacggcagaacaagaagtggctgtgtcactggatacctgtacatttgaataccggccattagggagaatcgccctgtaaacattgatccagtgattgaggccggtcggcttgcttatgttctgccccgcggtgtaattcagctaa

SEQ ID NO: 939205 - DNA, 662 bp, Homo sapiens
cactgagagccttgaaaatacctgagatttgtttgaggaagaaaagaaaaaaggaaggagagaaatccagtcgttaccatgagtgtgacgagagtggggagaaccagtggagcttctgatcctgtcccagcagatgccagtggctcggaccaaggaggacagagggatgggcgtgcccacgtgaagcctcaccccagaccccagaccctgcttacatgccgggacgaaggtgggagagaaccgtgcatctcagcacggcggtggaaacgtggtccacctgcggagggcctgtttgcgtttattacacccgagcaaggcccgcacgcccaccagaggggccagggtgcccctgggagccgctgagagacgggggaggcacaggctccacgcgccgcttccctggactgcgaggaggcggsgatggcgagtcaggaggaagcctatttttagaaacgcttaagtgcccacgatcttctgaccatcaaacaagaaacgttgctgtttgaagctatacacggacggcagaacaagaagtggctgtgtcactggatacctgtacatttgaataccggccattagggagaatcgccctgtaaacattgatccagtgattgaggccggtcggcttgcttatgttctgccccgcggtgtaattcagctaa

SEQ ID NO: 939206 - DNA, 662 bp, Homo sapiens
cactgagagccttgaaaatacctgagatttgtttgaggaagaaaagaaaaaaggaaggagagaaatccagtcgttaccatgagtgtgacgagagtggggagaaccagtggagcttctgatcctgtcccagcagatgccagtggctcggaccaaggaggacagagggatgggcgtgcccacgtgaagcctcaccccagaccccagaccctgcttacatgccgggacgaaggtgggagagaaccgtgcatctcagcacggcggtggaaacgtggtccacctgcggagggcctgtttgcgtttattacacccgagcaaggcccgcacgcccaccagaggggccagggtgcccctgggagccgctgagagacgggggaggcacaggctccacgcgccgcttccctggactgcgaggaggcggcgatggcgagtcaggaggaagcctatttttagaaacgcttaagtgcccacgatcttctgacyatcaaacaagaaacgttgctgtttgaagctatacacggacggcagaacaagaagtggctgtgtcactggatacctgtacatttgaataccggccattagggagaatcgccctgtaaacattgatccagtgattgaggccggtcggcttgcttatgttctgccccgcggtgtaattcagctaa

SEQ ID NO: 939207 - DNA, 596 bp, Homo sapiens
agagtatttgtcatgtgcagatgggaagaatgtatgttttgttgttttggggtggagagttgtgtagatgtctactaggtccattgggtcaaatgtcaagttcggattctgaatgtctttttcagttttctgcctcagtggtctgtctaatactgtcagtggrgtgtcgaagtttcctactattattgtgaggcaatctaagcctcttcataggtctctaagagcttgttttatgaattgagtgctcttgtgttgtgtgtatatatatatttcggtttgttgtcttgttgagtcaaactctaccattatgtaatgctcaactttttttttaatctttgttcatttaaagtttgttgtgtctgaaattagaatagtaaccactgcttttttatatttcccatttggttggtagatttttctccattcctttactttgagtctatgggtatcattgcatgtgagatgggtctcctgaagacagcataccatcaggtcttgcttctttatccagccggccactgtttgccttttaattggggcattaattttgtttacagtcaaggctaatgttgatacgtgcagatttgatcctgtca

SEQ ID NO: 939208 - DNA, 596 bp, Homo sapiens
agagtatttgtcatgtgcagatgggaagaatgtatgttttgttgttttggggtggagagttgtgtagatgtctactaggtccattgggtcaaatgtcaagttcggattctgaatgtctttttcagttttctgcctcagtggtctgtctaatactgtcagtggagtgtcgaagtttcctactattattgtgaggcaatctaagcctcttcataggtctctaagagcttgttttatgaattgagtgctcytgtgttgtgtgtatatatatatttcggtttgttgtcttgttgagtcaaactctaccattatgtaatgctcaactttttttttaatctttgttcatttaaagtttgttgtgtctgaaattagaatagtaaccactgcttttttatatttcccatttggttggtagatttttctccattcctttactttgagtctatgggtatcattgcatgtgagatgggtctcctgaagacagcataccatcaggtcttgcttctttatccagccggccactgtttgccttttaattggggcattaattttgtttacagtcaaggctaatgttgatacgtgcagatttgatcctgtca

SEQ ID NO: 939209 - DNA, 589 bp, Homo sapiens
gagagaactacaaaacactgctgaaagaaatcagagatgaaacaaataaatggaaaaacatattaagaccatgctcatggattggaagaatcaatattgttaaaatgatgatactgcccaaagcaacatacagattcagtgctatccctatcaaaatactaacgctgtttttcacagaattagaaaaatctattctaaaattcatgtggaaccaaaaaaaagcctgaatagccaaagcaatcctaatcgaaaagaacaaagccagaggcatcacattacctgacttcgaactatactttaaggctacagttacccaaacagcacggtactggtacaaaaaaagatacacagaccaacagaatagcatacagaacccagaaataaacctgcatatctacaaccatctgatcttcaacaaaatcaamaaaaatatgcaatggggaaaggacttcctgttcaataaatggtgctgggataactggctagccatatgcagaagaatgaaactggactcctacctctcagcataaccaaacattaacccaacatggattaaagatttaaatttaagacctcaaattataaaatt

SEQ ID NO: 939210 - DNA, 597 bp, Homo sapiens
acaatcataaaattacagtaggagaaattttttaaaatagtggaaatatatctgaatatttaatattgggttacattagatggctaattgggttaattatccaagtatatctttttttttgttaatacagtttttattttctaatttggtaaatttagttcaatattaatatctcattacctttttatataaaagatataaataataaatgccaacctagctttaaatggacataaaaatatactaaatatgttatatcaaggcttctatgtgctggtctgtctttttctttctttctttctctctctctctctctctttctttcctttcyttcttttggattcttgctctgtcgcccaggctggagtgcagtgatgccatctcggctcactgcaacctcgacctcccaggttcaagcgatctcctgcctcagcctcccgagtagctggaattacaggcatgcaccaccatgcccagctaatttttacatttttagtagagacagggtttcaccgtgttggccaggctggtcttgaactactgacctcaggtgatccgcccacgttggcctcccaaagtgctgggattacaggcatg

SEQ ID NO: 939211 - DNA, 765 bp, Homo sapiens
tgatccagtttataccaaaatatcaatatattcaaataataaactaaattagcccttctgtttaaaaaaaagatcttatcaaaatgctaaccactgtggcatatctgcaaagagaaccttgcctaagttcaaaattgtccaattccatagagaaagctgttatctagttttttaaacacctgtagcttccctacctccacagtttatcccatctataattttcaaatccccacctattcattttccactatctcgtttccacttgaaaactgaataattaggaaagtagatagatacatacatacatgatatctagatagacagatatccakagataaaataataaaaatcccaatctctagctagataaagagtattgttcccagtacacatttcagttatcttaaatgtttgttttttttgtgggtttattctttgggtgggaatgtattggttttggtttttatttttaacaaagacaaaagagaaagaggagagaaaagacaattgcacatttctaagtgttttatcagagcctcagtgtagaggttgtgttatgatcccgagtggaaatttgttttcatcacaaaccacctcacagtatgataccatttatcatgattgtcatcctaggctcaagggagagcagaaatagaattctagcagctctgtgcataaggacctatgtactcaagcgcatgggtaatcctcagtaaaatcgttgccatcattgggtgccagccactggctactgacagtagttgg

SEQ ID NO: 939212 - DNA, 765 bp, Homo sapiens
tgatccagtttataccaaaatatcaatatattcaaataataaactaaattagcccttctgtttaaaaaaaagatcttatcaaaatgctaaccactgtggcatatctgcaaagagaaccttgcctaagttcaaaattgtccaattccatagagaaagctgttatctagttttttaaacacctgtagcttccctacctccacagtttatcccatctataattttcaaatccccacctattcattttccactatctcgtttccacttgaaaactgaataattaggaaagtagatagatacatacatacatgatatctagatagacagatatccatagataaaataataaaaatcccaakctctagctagataaagagtattgttcccagtacacatttcagttatcttaaatgtttgttttttttgtgggtttattctttgggtgggaatgtattggttttggtttttatttttaacaaagacaaaagagaaagaggagagaaaagacaattgcacatttctaagtgttttatcagagcctcagtgtagaggttgtgttatgatcccgagtggaaatttgttttcatcacaaaccacctcacagtatgataccatttatcatgattgtcatcctaggctcaagggagagcagaaatagaattctagcagctctgtgcataaggacctatgtactcaagcgcatgggtaatcctcagtaaaatcgttgccatcattgggtgccagccactggctactgacagtagttgg

SEQ ID NO: 939213 - DNA, 765 bp, Homo sapiens
tgatccagtttataccaaaatatcaatatattcaaataataaactaaattagcccttctgtttaaaaaaaagatcttatcaaaatgctaaccactgtggcatatctgcaaagagaaccttgcctaagttcaaaattgtccaattccatagagaaagctgttatctagttttttaaacacctgtagcttccctacctccacagtttatcccatctataattttcaaatccccacctattcattttccactatctcgtttccacttgaaaactgaataattaggaaagtagatagatacatacatacatgatatctagatagacagatatccatagataaaataataaaaatcccaatctctagckagataaagagtattgttcccagtacacatttcagttatcttaaatgtttgttttttttgtgggtttattctttgggtgggaatgtattggttttggtttttatttttaacaaagacaaaagagaaagaggagagaaaagacaattgcacatttctaagtgttttatcagagcctcagtgtagaggttgtgttatgatcccgagtggaaatttgttttcatcacaaaccacctcacagtatgataccatttatcatgattgtcatcctaggctcaagggagagcagaaatagaattctagcagctctgtgcataaggacctatgtactcaagcgcatgggtaatcctcagtaaaatcgttgccatcattgggtgccagccactggctactgacagtagttgg

SEQ ID NO: 939214 - DNA, 761 bp, Homo sapiens
agacctaattttttatttttttaattttttttgagacggagtctcgctgtgtcgccccggctggagtgcagtggcacaatcttgtctcactgcaagccccacctcccaggttcacgccattctcctgcctcagcctcaggagtagctgggactacaggtgcctgccaccacgcccagctaattttttgtatttttagtagagacggggtttcaccatgttagccaggatgatctccatctcctgacctcgtgatccgcccgcctcggcctcccaaagtgctgggattacaggcgtgagccaccacccccggccagtagacataaatttttggggggatactcttgaacccaattgccagatcatttagggccttgcagtctatgacctggaccttggacctttttttctaaatacaatgttaattcttcagaaggtttttagcaaaggaaaaggcttaacctcatttgtacttttgtaagatctttctgactactatgtgaaacatgagttatagtgagaaaagaaaagtatagaagtcagttaactactgcagtaatcaaggtgagaaatgagagaggcttgcsttagtgtgttggcatttatagtcagaggacatggacattttgaggaattatctgaaagatataaataacatgtgtggttgatggatttgaggtaggagtaaggaaaagggagggagcctagacttctcctttgagtcactgggtggtggctggtaccatttactacaacagggaag

SEQ ID NO: 939215 - DNA, 606 bp, Homo sapiens
cccagcattccacattcccactgtaaactcctgcaatcctagccaaaggcaagcccttcaagcctcacaggctctcaaattagcagagagctgtctgaaaactgtgcaatggcactgattgaaggagggagctcatgctaggtcccacacactccccaagacctaaatagctactaccataaaccatatcatgctaaatgtccagggactggagaagttgcccacctgccaggcccactgctgccactaccagcatcagagcaagccacctagaggcctacgatctggcctgcctggacctgctaacgctggtgctgatatgatttggctctgggtcctcacccagatctcatcttgaattgtactcccrtaattccaacatgttgtaggaggaacccagtgggagataatggaatcatggggcggtttctctcatactgttctcatggtagtgaataagtctcaggaaacctggtttaataaggggaaaccaattttgcttgatatttcattctgtctcttgcctgctgcgatgtaaaacatgactttcaccttctgccttgattttgaggccctcctcggccacatggaactgtgagtcgaatt

SEQ ID NO: 939216 - DNA, 628 bp, Homo sapiens
ccttcactagtatcctaaactacctcgctctgttgtgcttccgtaacaaccacccaaaacaccccaatctaaaccaatccaactgttctctttctccatgtctacactgagacttctgagcagtgcttgcgtggggaaagcaatactcttcaagtcaattaaaattacttttagcaaattaaaaatggaacggaacttccttaatagaataatggaatttgcagcaattatttgtgtacataaaaattccaagtaaatccttgttaaactattggaattaaatatggtcatgtgccacatagccatattttagccaacaatggactgcattttctacagcggtctcataagattataatgtctccttgtgttgcccaagctggtgtagaactcctgagctcaagcagtctgccagctttggcytcccaaagcgctgggatgacaggcatgagccaccacacccagcccaaatttagcaagttttctaggtagattgtcactatacaaaactcaattttatttctctatcccggcaacaaatagttcaaatatgaaaaaaaaaagttagataccatttacttcgtcaaaagttatcaagtacttaggaagaaatttgacattttataca

SEQ ID NO: 939217 - DNA, 628 bp, Homo sapiens
ccttcactagtatcctaaactacctcgctctgttgtgcttccgtaacaaccacccaaaacaccccaatctaaaccaatccaactgttctctttctccatgtctacactgagacttctgagcagtgcttgcgtggggaaagcaatactcttcaagtcaattaaaattacttttagcaaattaaaaatggaacggaacttccttaatagaataatggaatttgcagcaattatttgtgtacataaaaattccaagtaaatccttgttaaactattggaattaaatatggtcatgtgccacatagccatattttagccaacaatggactgcattttctacagcggtctcataagattataatgtctccttgtgttgcccaagctggtgtagaactcctgagctcaagcagtctgccagctttggcttcccaaagcgctgggatgacaggcatgagccaccacacccagcccaaatttagcaagttttctaggtagattgtcactatacaaaactcaattttatttctctatcccggcaacaaatagttcaaatatgaaaaaaaaaagttagataycatttacttcgtcaaaagttatcaagtacttaggaagaaatttgacattttataca

SEQ ID NO: 939218 - DNA, 662 bp, Homo sapiens
tgtgccacatagccatattttagccaacaatggactgcattttctacagcggtctcataagattataatgtctccttgtgttgcccaagctggtgtagaactcctgagctcaagcagtctgccagctttggcttcccaaagcgctgggatgacaggcatgagccaccacacccagcccaaatttagcaagttttctaggtagattgtcactatacaaaactcaattttatttctctatcccggcaacaaatagttcaaatatgaaaaaaaaaagttagataccatttacttcrtcaaaagttatcaagtacttaggaagaaatttgacattttatacaattgtccaactgaaattaaaaacttaaagtcacccaaaaactaacacacaaaatgttttagtggctttattcataattgcccaaattggaaacaacctacatctctctcaagtggagagtggataaacacactagggtacctgactttgttaaaagaaaacctagacagattacatttaacagagtttagctgagcaaagaacaattcatgaattgagcagcccatagaaccagaatcgcttcagagaagctctggcactgccgcgtggttggagaggatttatggccagaaagaggaaagtgaattacagaaaacggaagtga

SEQ ID NO: 939219 - DNA, 580 bp, Homo sapiens
atgacaaggataaagacttttatgatggtccacttatgcttaatgaataggaaatacagtctctcctccttataattctctttttttgcagggggggatggaatcccactctgttgcccaggctggagtgcaatggctccatcttggctcactgcaacctccaccttctgggttcaagcgattctcctgccccagcctccaagtagytgggattacaggtgcacaccaccacgcccagctaatttttgtatttttagtacagacacggtttcaccttgttggtcaggctggtctcaaactcctgatctcaggtgatccactcgccttggcctcccaaagtgctgggattacaggcatgagctacctcacccaatctctcctccttatcattttcttaagaacattttccttttttttctggcttactttattgtaagaatacactctataatacctatacaaaatatgtgttaagcaactgttgatgttatctgaaagcttctgttcaggagtaggctattagtagttaagtttggggagaatcaaaacttattttttcaactgtgcagggggttggcac

SEQ ID NO: 939220 - DNA, 774 bp, Homo sapiens
aaggaaggattcttagagccttcagtggaagtatgtatgggcccactgcaccttgatttctgacctctagtctccaggcctgtaagagaataaatttctgttgtttaaaggcatcacatttgcataatttgttatggcagtcctagaacagtgatacacagggtagatccaaaggtgccatcaatagggaatatacacagttatttacatgaaattggcatatcatcgctgtgaaaggaaaataattggggaccccaaatcactaagccaaagggaaaagtcaagctgggaactggcaaacctgcctcccattctattcctacgtaaggttgctacaaaaataaaaaaagctacacacctctctcacaatttgcccacaaggaaattccttgtggactaaaggacaaaagacagaactcaaagtcattcccttgctcacatgagacaaatgcacacaattaaagaatgccactgtttgtttcttttctacctgtgacctgaagccccctccccactttgagttgtcctgactttccrgaccaaactaatgtacatcttacatatattgattgatgtctcatgtctccctaaaatgtatcaaatcaagctttgtgccgaccactttgcctacgtgtcctcaggacgtcctgaggctatgccacgggcgtgtccttaatcttgtcaaaataaactttctaagttgactgagacctgtttcagatattttgggttcacatagccaagcagaattgacatcatttgaggtcactaggg

SEQ ID NO: 939221 - DNA, 659 bp, Homo sapiens
tccctctacccacaggatcacaccaaccccttccttacatatccctaactccatcttaaagagaagagtacagaactaagagactgagcagtattcctccaaactaatcatgacctaaagggactgtttaattttatcactcaagtttataaactagttggacgtttgttatcttatcccctgcctcctaggcagtgggaatgcctaaggaaaatcagagcagtaatagacaaaataaataaacatttcccttgcccttggyattatgatgaagtaaatctgtggtgttttccccacacattgagcatgggcacttaaataacatggcaaaaatgtgggacacacagatgaaattcttatttgttctccacttttaacaagtaataggtgtatttttctactgtttgtgactagaagcaggggcagtgctgaaccaagttctcattttgttaatgtggtcctttccatgcagatcatacttttttttttcacatgcctagtatgcagtggtgctcaatgcaatgaatgaacaaacaaggcatcttctactacaatagttcatttaaacttaatggttccaggcctctggatgcctttgcacttcctgaagtctagttcccagtgtattaagctgcgtaacttaagaacagcatctgctt

SEQ ID NO: 939222 - DNA, 632 bp, Homo sapiens
tccccatgtaaccatctcacctcataatcaaataaccctaaatccctcactaacctacccctgccctcactaaacttaatagtaaatgctggtatatccagtgctttgtgggcaccacgggaccagaaggtggtgacccccctggacccagctttcactatcttgtgtgtgtctattatttctcaacctgccgatccgcctgggaacaaagagagccccgttgcattgtgggctgctggccagatcccacaatatttagagttggattttgttgtggtctaaaaagatactttatatgattgtaaatttttaagaactttttgaggccgggcgtagtggctcatgcctgtaatcccagcattttgggaggctgaggcggccagatcacctgaggtcgagagtttgagaccagcctgaccaacatggagaaaycccgtctatactgaaaatacaaaattagccaggcgtggtggcacatgcctgtaatcccagctactaggaaggctgagccgggagaatcgcttgaacctgggaagcggaggttgcagtgagccgagattgcgccatcgcactccagtctgggcaacaagagcgaaactccgtctcaaaaaaaaaaaagaactttttgagac

SEQ ID NO: 939223 - DNA, 578 bp, Homo sapiens
acatttcctaaaatgatattggacctactgccattaagaaggaagcagaggcccaagctcaactcagttcagggtctctaatatctaccactctctcttcctcgctctctatatctctctcacctcactcccccatctttcaatggaagctcaactactaagaggtagagaaagaattctaacataggagtgtttgaccccagactgtgctcttagccattattctgcactgccacccatgtaacctgctcctccatcctcactggaccagcctgagtaagcggccacccccagccacctagtgcaggtgacccagggcccttgctcaaatgcacacaacccaraactccctttgatcctgtccccatcatatacagtgggagatggagagagctgcttgttgtaaatgttcaacatttcattgaactttaagattattttccccttcaatgaaagccttctgagagcaaattttcatagtcaccagcaactctggccctgtaaaatatgttctttcatgatgaaaattaccctttatcacttagacctgcccttcccacatatactaaatgcaatcc

SEQ ID NO: 939224 - DNA, 578 bp, Homo sapiens
acatttcctaaaatgatattggacctactgccattaagaaggaagcagaggcccaagctcaactcagttcagggtctctaatatctaccactctctcttcctcgctctctatatctctctcacctcactcccccatctttcaatggaagctcaactactaagaggtagagaaagaattctaacataggagtgtttgaccccagactgtgctcttagccattattctgcactgccacccatgtaacctgctcctccatcctcactggaccagcctgagtaagcggccacccccagccacctagtgcaggtgacccagggcccttgctcaaatgcacacaacccagaactccctttgatcctgtccccatcatatacagtgggagatggagagagctgcttgttgtaaatgttcaacatttcattgaactttaarattattttccccttcaatgaaagccttctgagagcaaattttcatagtcaccagcaactctggccctgtaaaatatgttctttcatgatgaaaattaccctttatcacttagacctgcccttcccacatatactaaatgcaatcc

SEQ ID NO: 939225 - DNA, 598 bp, Homo sapiens
gttgttgttacagtaggtagctagttagatatgagcaggggaggagagggaccccctgcttttaaaataataattggtcccagccagcaccagggaaaggcagtctcccaataaactaaaacacctgaaactggtgatcgccagcttyccaataagatctcagtagctgggccagtaggctcaagcatgtgcattaagagaaaaaatggcagagtttaactggtatatgacctcctagggacatgtgacccgtaagggaataacacctcaagtgagcatgcatacatctccagaaacagactgcacatgcccctcttccaagtgctagcaggtcactgcacatgcagacagcccggccaaagggaagaatcaggaaagaaggaatgcaaaaccccaaaaacatgccagtatataaaacccaagacaaaaggtcaaactgtgcacttgatctctgaagtcgcccgcttggccctcttccaagtatactttacttcctttcattcctgctctaaagctttttaataaactttcactcctgctctaaaacttgctttggtctctccttctgcaccatgcccctcagttgaattctttcttc

SEQ ID NO: 939226 - DNA, 598 bp, Homo sapiens
gttgttgttacagtaggtagctagttagatatgagcaggggaggagagggaccccctgcttttaaaataataattggtcccagccagcaccagggaaaggcagtctcccaataaactaaaacacctgaaactggtgatcgccagctttccaataagatctcagtagctgggccagtaggctcaagcatgtgcattaagagaaaaaatggcagagtttaactggtatatgacctcctagggacatgtgaccygtaagggaataacacctcaagtgagcatgcatacatctccagaaacagactgcacatgcccctcttccaagtgctagcaggtcactgcacatgcagacagcccggccaaagggaagaatcaggaaagaaggaatgcaaaaccccaaaaacatgccagtatataaaacccaagacaaaaggtcaaactgtgcacttgatctctgaagtcgcccgcttggccctcttccaagtatactttacttcctttcattcctgctctaaagctttttaataaactttcactcctgctctaaaacttgctttggtctctccttctgcaccatgcccctcagttgaattctttcttc

SEQ ID NO: 939227 - DNA, 557 bp, Homo sapiens
gagttgcttggagaagtagcaaagacaggattccagtatgtgtagagcccagatagtttgacataagaatggttccagtgaagcacagccagggacacccatttcctaaggcttaccacacgcctctgagtgacttaggtcattattgattgtcagacctgcacagagaagggctgtcttgcccatgggatatgccartgtgattagatgctctcctgtcgactggactctcctggggtccccgccaggccataccctcttggagggcagctttgcatgcccaacgagggtgcttctcagtggccatcaccatagcagcagactctactctgctctcattggagagcttctgcaaatatacctccaacagtgcacacctacttacagtcccccctcactgcattgccggcatgcactgtgcacagtctccaatcactgtttcgccagtgtgcacatatgcagagtcctcactgcaactgcatgggccccactggtgtgtgtgtataaaccctgacaacctgccactgccagggtgagtatgagtataacatgccaca

SEQ ID NO: 939228 - DNA, 584 bp, Homo sapiens
agaatctacaaagaacttaaacaaatttacaagaaaaaaacaaacaaccccatcaaaaagtgggtaaaggatatgaacagacacttctcaaaagaagacatttatgaagccaacagacacatgaaaaaatgctcatcatcactggtcatcaaagaaatgcaaatcaaaaccacaatgagataccaactcacaccagttagaatggcgatcattaaaaagtcaggaaacaacagacgctggagaggatgtggagaaataggaacgcttttacactgttggtgggagtgtaaactagttcaaccattgtggaagacagtgtgacaattcctcaaggatctagaactagaaataccatttgacccagtgatcccattactgggtatatacccaaaggattataaatcatgctactataaagacacatgcatacgtatgtttaytccagcgctattcacaatagcaaagccttggaaccagcccaaatgtccaacaatgatagactggataaagaaaatgtggcacatacacaccatggaatactatgcagccataaaaaaggatgggttcttgtttttgcagggaca

SEQ ID NO: 939229 - DNA, 694 bp, Homo sapiens
agcaagacgcaagctctttctatgggacctttaggctttctgttcttcatcttgagagataagtcaaatggccttgaaagtcctctctagcatgaacatctcttggatttgtaggtgcaaagagaaagatatggcttctaggtggggtgggacaactaattaattgctagttgccctccaattttgaatctccctttatttttaaaaataaacttagtcttgggatggttttagatttacagaattattgaaaggatagtacaaaargttcccatatatcccatgccaagcttcccatatgaataccttatattggtacagcacatttgtcgctattaataaaccagtatccagggccgggtgcagtggctcacgcctgtaatcccagcactttgggaggccgaggcaggtggatcacctgaggtcaggagttcgagaccaggctgaccaacatgggaaaaccctgtctctactaaaaatacaaaattagctgggcttggtggtgcatgcctgtaatcccagctacttgggaggctgaggcaggagaatcgcttgaactcgggaggcagaatttgcagtgatccgagatggcaccattgccctccagtctgggcaacaacagcgaaactctgtctcaaaataatataataataataatgttaataaaccagtatccagtattgatacattctta

SEQ ID NO: 939230 - DNA, 623 bp, Homo sapiens
ttcccatatgaataccttatattggtacagcacatttgtcgctattaataaaccagtatccagggccgggtgcagtggctcacgcctgtaatcccagcactttgggaggccgaggcaggtggatcacctgaggtcaggagttcgagaccaggctgaccaacatgggaaaaccctgtctctactaaaaatacaaaattagctgggcttggtggtgcatgcctgtaatcccagctacttgggaggctgaggcaggagaatcgcttgaactcgggrggcagaatttgcagtgatccgagatggcaccattgccctccagtctgggcaacaacagcgaaactctgtctcaaaataatataataataataatgttaataaaccagtatccagtattgatacattcttattaactgaagtccatgctttgttctgttttcctcagtttttccctaatgtcctttgttgttgctgctgttgttccaggatcgcatccaacatgccacatgacatttattagtcaggtctccttagactactcttggctgtgacagtttctcagactttccttgtttttgatgaccttgacagttgtgaggaataccgactggtcaggtatattgtaaaat

SEQ ID NO: 939231 - DNA, 604 bp, Homo sapiens
tgagtaaccagataggtgagcaagaaataaaactagacatgaagaagatattcacagtctgcctcctcttatctcaagtgttcattttatacaattacacttgttacctgataaatttaggttatacacattttaaaaatcctcctctttcccttcatcctgaacctgcacctcccaacccttcaaaaatttgtcttaggttgaaaatatggatttctttttttttttttaatttgttttccactcaggtcttgggccacaagattggaacctagtcatagaaggcttcccagctgtgtgtacacattgcttccatcttttttttcctttttacctttggacacgtgcttcaraaagcccatctgggtctttgtgctcacctgggttcatatttgtggaccgtttccacggctttgtcaattttctgtgaataacagagtgttgtgcataacagcaatgggtcattagtccaattaagtctgcagccatttcaatggcttctgtaggaggagatggaacacaatatgtaatttcagcttttcttgtgatggttttcaatccttccatgaactaaatcattatatcagttttttattttttttta

SEQ ID NO: 939232 - DNA, 610 bp, Homo sapiens
tctgcaagccaaggaggggggcctcaggaaaagtcaaacctgcagacaccttcatcttggatctagccttcagaactgtgagaaaataaattcccactgtttaagccacccagtctgtggtgttttataactgcagatctagcaaactaatgcagctaataaatggtagamtgccttcaaacagaggtatcattaaatctagagaagtaagttatgctggatatcactttactgcagtggattaccatgattacaacagggtcattatttcttcttgaacccctcatttaggtcaaagtgagcaaaataaaagtctacttttggccgggcctggtggctcatgcctgtaatcctagcacttcagaaggctgaggtggtcggatcgattgagggcaggagttcgagaccagccaggccaacatggagaaactgtgtctctacaaaaaatacaaaaattagccgggcgtggtggtgtgtgcctgtagtctcagctacttgggaggctgaggcacgagaattacttgaacccaggaggtggaggttgcagtgagttgagattgcaccactgcattccagcctgggcaacacggtgactccatctcaaaaagaa

SEQ ID NO: 939233 - DNA, 610 bp, Homo sapiens
tctgcaagccaaggaggggggcctcaggaaaagtcaaacctgcagacaccttcatcttggatctagccttcagaactgtgagaaaataaattcccactgtttaagccacccagtctgtggtgttttataactgcagatctagcaaactaatgcagctaataaatggtagaatgccttcaaacagaggtatcattaaatctagagaagtaagttatgctggatatcactttactgcagtggattaccatgattacaacagggtcattatttcttcttgaacccctyatttaggtcaaagtgagcaaaataaaagtctacttttggccgggcctggtggctcatgcctgtaatcctagcacttcagaaggctgaggtggtcggatcgattgagggcaggagttcgagaccagccaggccaacatggagaaactgtgtctctacaaaaaatacaaaaattagccgggcgtggtggtgtgtgcctgtagtctcagctacttgggaggctgaggcacgagaattacttgaacccaggaggtggaggttgcagtgagttgagattgcaccactgcattccagcctgggcaacacggtgactccatctcaaaaagaa

SEQ ID NO: 939234 - DNA, 632 bp, Homo sapiens
gtgcaatctcggctcactgcaagctccacctcccaggttcacgccattctcctgcctcagcctcccgagtagctggaactacaggcacccaccaccatgcctggctaattttttgtatttttaataaagatggggtttcaccatgttagccaggatggtctctatctcctgacctcgtgatccacctgcctcggcctcctaaagtgttgggattacaggtgtgagccaccacayccagcaagcctggcctcaaacttctgacctctagtgatctgcccgcctccgcctctcaaagtgctgggattacaggggtgagccactgcaccttgcctgaactacatgacttctaaagtcattccagttctaaaattctaggcctctatgaacccaaatgttgtgtagagtgaagcagataaagtcactgttttatacagatatttaggtcctacctaagaataagacctccttctaaatggtaggtcagaagaatcctaactcgcataggttgaacaagatataaaagctatggaggctggagtcagactctgttttagttacctttggccgcaaaacttagtggcttaaaacaactatttatttgtttacaattctatgggtttgcaatttaggct

SEQ ID NO: 939235 - DNA, 855 bp, Homo sapiens
gacgggaatgagggcaaggaacacctggcccgcccagggcggaaaaccgctgaaaggcgttcttaagccacaaacaatagcaggagcgatctgtgtcttaagggcgtgttcctgatgcagttaactagcccaacctattcctttaatttggcccatcccttcgtttcccgtaagggatacttttagttaactgaatatctatagaaacaatgctatgactggtttgctgttactaaatatgtgggtaaatctctgttcagggctgtcagctctgaaggttgtgaggcccctgatttcccacttcacacctctgtatttctctgtgtgtgtctttaattcctctagcgccgccgggttagggtctcccygaccgagctggtctcggcacagacatctacagaacactacacccaaaaacaggatacacctccttctccagtgcacatggatattctccaggatagaccatatgctgggacataaacaagtttcaagtgttttttgtttttgttttttaatgatccacttaatgaatagtaagtttgttgtttttttaaagatggggttttgctgtgttgcccaggctggactcaaactcctgggcttaagcaatgtttccatctcagcctcctgagtagctggaattacaggtatgtgccaacacaccagctccaataatttttcaataatttttaaagggttgaaattataaagtatgttctctgacacaatggaatgaaattagaagtcaataacagaaggaaaattggaaaaatcacaaatatgtggaaattaaataacaggcccttaagcaaccaatgggtcaaagaaaagcttacaaaggaaatttaaaat

SEQ ID NO: 939236 - DNA, 711 bp, Homo sapiens
ggcgaaagagcgagactccgtctcaaaaaaaaaaaaaaaacactaataacttgatttttgtaaaagggcaaaagatcggaatagacatttctcaaaagaaggcatacaaatgcaaacaggtatataaaaggtgctcaacatcattaatcaccagagaaatgcaaatcaaaactacaatgagatattatcttaccccagttaaaatggcttttatccaaaatacaggmaataacaaatgtcggtgaagatggggagaaaagggaactcttgtacaccgttagtgggaatgtaaatagtaaaagcactacgaacaacagcttggagagtcctcaaaaagttaaaaatggagataccatacaatccagcactcctactcctagctgtataacccaaagaaaggaaatcagtttattaagaaaatatctgcactcccatgtttattgcagcacaattcgcattagctaagatttggaagcaatctaagtgtccctcaacagatgaatggataaagaaaatgtggtacatatacacaatgcagtactattcaaccataaaaaagaatgagatcctgtgatttccaacaacatggatggaactggacatcattatattaagtgaaataagcaaagcatagaaagacaaacttcacatgttttcaattatttgtgaaagctaaaaattaaaacaattgaactaatgcagatagagggt

SEQ ID NO: 939237 - DNA, 850 bp, Homo sapiens
aagtagcacctttaatttccttcaagaacttttcccttacattcacaagttagctaattgtttggctcaagaagcataacttttggcctaagtcagcttttgacatgcctttctcactaagcttaatcatttctaactttcaatttaaagtgagagatgtgcaactctgcctttaacttgaccacttagaggccactgtaagattattaataggcctaatttcaatatggctgtatctcagggaatagggaggggcaaggagagggagagagatgggggaatggacagtaggtggagcagtaagaacacacatcatttattgattaagttccctattttatatgggcatggtttctggagttctaaaacaattacgacaacatcaaagatcactaatcatagaccacttgtaacaaatataataataatgaaaagttgaaatattgcacaaattaccaaaatcgatgcacagacataaagtgagcacaagctgttggaaaaatggtgccratagacttgcttgatgcagtgtccacaaaccttcactttgtaaaaaatgtagtatctgtgaggtgcaacaaagtgaagtgtaatgaaatgaggtctacctgtactttaaaactttatcctaacactggaccccattatcattgtacactataagttattgctttttgtatattttatagtagaattttcttacattgttattaatattctaaaagtattatttgtatttcctaacttttgaaattatgtttcatcattagaaatatgtagatgactgggaatcaccaaaagagaaataaaatgtgtctctcagagagaccctaaccccaatcctttggta

SEQ ID NO: 939238 - DNA, 576 bp, Homo sapiens
gagggaggaggtattggatgtttgtggaagaagaaaaggggttaagttgccatctggggacagggagagggccatatagtgtgagattactgggcagcttttagggcccactggggctgctggtgagaccagtgagcactgttsagtgggtttctccagccacattcagcaacctgtttgtaggatgaagtgcacagagtagtcatgaagtgtcaaagcaaatagaacaaaataggtgaaatgcaaggagtgttggtaataattgatcatggaacttaaaatggataagaatgaaaggtaggatatcctgggggtgagggacactgaaaaactggcagagtcaatggcttggagttgttgatgaactgaaatgattgctggagttggggcactagagtgagtgaactgaatggagatgcatgaacttgagatcatggaggagttgttattagtaatgacaaagtctggagtatgaccacgacagcaaggtgattgacgcagggcagaagacaagtgtattggagaggaggaattcgagaaactgaggggccaggacattggaaagttcattgctgt

SEQ ID NO: 939239 - DNA, 576 bp, Homo sapiens
gagggaggaggtattggatgtttgtggaagaagaaaaggggttaagttgccatctggggacagggagagggccatatagtgtgagattactgggcagcttttagggcccactggggctgctggtgagaccagtgagcactgttgrgtgggtttctccagccacattcagcaacctgtttgtaggatgaagtgcacagagtagtcatgaagtgtcaaagcaaatagaacaaaataggtgaaatgcaaggagtgttggtaataattgatcatggaacttaaaatggataagaatgaaaggtaggatatcctgggggtgagggacactgaaaaactggcagagtcaatggcttggagttgttgatgaactgaaatgattgctggagttggggcactagagtgagtgaactgaatggagatgcatgaacttgagatcatggaggagttgttattagtaatgacaaagtctggagtatgaccacgacagcaaggtgattgacgcagggcagaagacaagtgtattggagaggaggaattcgagaaactgaggggccaggacattggaaagttcattgctgt

SEQ ID NO: 939240 - DNA, 624 bp, Homo sapiens
aaaggaaaggcaagaaatattgccccacgtctcccaccaccaaacagaaagtgcaggtggtcagccccagggctcacctgccctttgccagggtcatgagtcaggcccaggctgcgccctccacacaatcctcaaggagagttcctgccaggctgggacaactgcactgggacctgatgccctgggaaggacagggttgcatttaacagaaacagctaaacctgaagggatgagtttgcctttccccggggccatgggatggtttatagaaagttctacccatcaggacaagacctcacatgacaccatcagaggaactgatttcacgccacagagggaggaagagggcacatgccataggtccactggtcacagcacacacatgctcctgggagcttcagacccagcagtgtggcwcaggtgccaggtcaggatgtgggaggacacagtgtctgcatgaatctgtcacctttgttagctgccttgtcccaccaggtagaagatgtggcaattggagcacagcagtaggaagcccagtgtcccccaaccttccacatcatacccaggacctctgaggtgcatctatatcctgcacatctaggctctgaaaagcaggaggtcctg

SEQ ID NO: 939241 - DNA, 495 bp, Homo sapiens
tgcttattatgcagatgggcaacctgaggctcagatggagttaagtggcttaattggtagcaacagagccaggatttgaacccagggctgcctgatcaccaaataaaattgtactcaacatgatgcacttaacttttctggcctcatttctctcacctgtaaaaatgcakgtttcagatgttggtaatattttacctgtggttgaaagagttaccagcccttccttgatcacccatggtaagacccatgagcctctgaatataattatagaaaacatttggagagggatagagagagacaagatcatgcctcctttgataatgtcaaattttcagtgcacgaagccatacatagtgcagttttctagcttccctttcacacatggcattgaagaaagtaaattaagcaactcagctaacactgggaatgcagcagaagtaatcgagttcagtgctgggagacagttgccatgatattccaacatggacaccagga

SEQ ID NO: 939242 - DNA, 495 bp, Homo sapiens
tgcttattatgcagatgggcaacctgaggctcagatggagttaagtggcttaattggtagcaacagagccaggatttgaacccagggctgcctgatcaccaaataaaattgtactcaacatgatgcacttaacttttctggcctcatttctctcacctgtaaaaatgcaggtttcagatgttkgtaatattttacctgtggttgaaagagttaccagcccttccttgatcacccatggtaagacccatgagcctctgaatataattatagaaaacatttggagagggatagagagagacaagatcatgcctcctttgataatgtcaaattttcagtgcacgaagccatacatagtgcagttttctagcttccctttcacacatggcattgaagaaagtaaattaagcaactcagctaacactgggaatgcagcagaagtaatcgagttcagtgctgggagacagttgccatgatattccaacatggacaccagga

SEQ ID NO: 939243 - DNA, 674 bp, Homo sapiens
gctgtgtaaaaaatcatgcttattgaacaaaaaagcattgcacagctgaaataactgctttaactaagaagtgaagaactgacacctgaacagagcacagatagccacacagacaggagctgcatttcaaacaaggtcattgctgttgtccccactccaaattaagtgtctctgcttcacccttccttaccaaagttctgcttgatcatccttttgttttgttttgttttgttttttgtacttcacttctttgagaaaatataaaccaaaattttacatraaacaggaattcagcttttgacaatgttagccattgaaacaacaacaacaaaagtttctattatttctcatctctgtgctatccagtgcagtagccaatagccacaggtgactattaaaattaaaattaattcaaataaaacaaaatttaacattagctggtcagttgtactagccacatctcagttactcaatagccacatgtggctagtggctactgaactaggcagcatgaatgtagaacattttcatcatcatagctttctaggtcatggaaaaattgcagaactcaatttccagtgtgcacatttatttgcatgcctaggagctttctgaccctgtgttgagctgcctaaccagcttcctgattgacctcctgatatttctgcaaatgt

SEQ ID NO: 939244 - DNA, 590 bp, Homo sapiens
agacatgtgctggcttcaggtgtgacccaacacattccaaattgcggtgtctatggagataaactcctactacttaagaaaaggagaagaaaaagcaaaagggactttgttttgcagcttaggtaccagcccaagcacagtggggtagagcacttgaggtcctctattccaggccattgctcttggatggtatttctggacyttccctgggctacaggggagcccactgttctgaagggaaagttccaagcctagcaacatttaccgcaaactgatcgaagagcccttggaccttgggcaaacatcagcagtgcccaggtggtacttgctttccagccctggctctcagatggcatgtctggactcagcctggctgggagaaacttgctaccctgaagggaaagacacaagcctggctatcttttccacctactgattgtagagccctagggccttgcgtgaacataggtggtagccagggaatgattaccgtaggcttcgagtaagacccagtattgtgctggcttcagatctaacccagcacagtcccagtggtggtggccacaggggtgcttgtgtcactcctccta

SEQ ID NO: 939245 - DNA, 782 bp, Homo sapiens
taccattcacttctttgaaagcaaaatgtctttttaaagaacaaaaactatattaaatacacactatctaaataaaacataaggatattataggttgtcgtcaaaaacatttttcatattgtcagtacatattttgcacactattgtttattaaatattgagaattttttttggtaaaagctaattaaagaatccaaagaaccaaattaccaaattgatgaagwcagggtgagaggagttaattaaggttttatctattggtgtgtaaacaggtggtcattgcattaacccagacagaaacccagattgaaaaattcaagaaataattaggggaaaggagagtagagatggaaaaatacgttggttttgatatcctgttttacatccaattttagttgtccaataagtagtaatcggaattgtagctctgaatcttagaagtatgttctggaagtaaatattttataacttttagaatgtatacagtcattgaaattatgtggataaggaagattacttagggagggtgtatatgtcaaggtgagaaggtggaaaatattatttcataaatgcttagctcaccaattatttttacacccattacagttatttattattctttactgtctctgcatttatattcctccatttttactgtgtttttaattaatttcttttttctcaataggtgatgctagatgtatttattttatcactttattgaaacaagcgacttttagttttcattaacattttaattgcttttttgttttctatttttt

SEQ ID NO: 939246 - DNA, 597 bp, Homo sapiens
aaatcactttataaaatcccagaaaaataattcaaagtaataataataaagcacaaggtgtgatacaagagaagaaaaataaacaataaaaggaaaatcagaaaaaattcaagatataaatgaggaatttattaaagaaataaataacacaaaaaaaagcaaatgaaaatcctgttgctgaatattttaatggatgaagtacaaaaaatctcatttgagagcttcaacaataatctggatcaagcagaaaaaagaatttcagaatttgaagatatatcttttggaataacccagtcagacaaaaaagaaaagaatgaacaaagattatgyaacacatggaatgccaaaagccaccaaatgttcaaattttgagtttttaagaagtttaagaaaagcctaaagccatagaaaacctatttaacaaggtaatagctgaaaaatgtccaagtgtagcaagagctttagacatccggatgtaggaagcttataggtcccaaatggatacaactcaaaaaagtcttctccatggcacattattgtcaaagtatcaaaagtcaaagacaaagaaagatttctaaaaacagcaagagaaaagca

SEQ ID NO: 939247 - DNA, 597 bp, Homo sapiens
aaatcactttataaaatcccagaaaaataattcaaagtaataataataaagcacaaggtgtgatacaagagaagaaaaataaacaataaaaggaaaatcagaaaaaattcaagatataaatgaggaatttattaaagaaataaataacacaaaaaaaagcaaatgaaaatcctgttgctgaatattttaatggatgaagtacaaaaaatctcatttgagagcttcaacaataatctggatcaagcagaaaaaagaatttcagaatttgaagatatatcttttggaataacccagtcagacaaaaaagaaaagaatgaacaaagattatgtaacacatggaatgccaaaagccaccaaatrttcaaattttgagtttttaagaagtttaagaaaagcctaaagccatagaaaacctatttaacaaggtaatagctgaaaaatgtccaagtgtagcaagagctttagacatccggatgtaggaagcttataggtcccaaatggatacaactcaaaaaagtcttctccatggcacattattgtcaaagtatcaaaagtcaaagacaaagaaagatttctaaaaacagcaagagaaaagca

SEQ ID NO: 939248 - DNA, 613 bp, Homo sapiens
tactatggtatatttaccaaaacaaacaaattgacactgttacattgctacatgtagcatgcttttgctgagaaggattaagtcccaccttttatgtaggggaagtatctacacatattatttggaattactttgtaaaaatatttgtcttttctccttatttattcataaatttatttatattagtaaggacacatatttattttatactttggttgctaattgactaatatgtgaattatatatatatatatatattctcaaattkttcagatttttgtcattgggtgttcacttttaggttggctttgtgtccctttgacatgccttcatatgtttgtttactaagcattgtttcctggtcaaaaaagtgttccaaactcatctgatatttccactgtcccagtctcagaataaggcatttctccaagtagtcctgtattttgtcactggagaatagtattttaaaacaagaatctggataataggtgagttcattgctactgatcactctcaaaatacacagatatataacatcattatgtttactgatatggtttggctgtctccccacccaaatctcatcttaaattcccatgtgttgtgggaagga

SEQ ID NO: 939249 - DNA, 732 bp, Homo sapiens
aggggcagttctttcctgtgcttttcttgtgacagtgaataagtctcacaagatctgacagctttataaggtgttatttccctgaataagctctccctttgcctgctgccatccatgtaagatgtgactggctcctccttgacttccaccgtgattgtgagtcttccccagccatgtggaactgtaagtccattaaaccattttttttttgtataaattacccagtgttggtatgtctttatcagcaacatgaaaayggactaattcaggtaggtggtaccaggaatggggtgctgctgaagagatacccaaaaatgtggaagatactttggaaactgggtaacaggcagaggttggaacagtttggaggactcagaagaagataggaaaatgtgggaaagtttggaactccataaagacttattgaatggctttgatcaaaatgctgataacgatgtggacaatgaaatccaggctgaggtgatctcagaagaagatgtggaacttgtagggaactggagcaaaagcaactcttgttaggttttagtagagactggtggcattttgcccctgccccagagatgtgtggaactttgaacttgagggagataatgtagggtatctggcagaagaaatttttaagccccaaagcatttaagaggtgacttgggtgctgttaaaggcatttagttttataagggaaacagaacataaaagttcaaaaaatttgca

SEQ ID NO: 939250 - DNA, 732 bp, Homo sapiens
aggggcagttctttcctgtgcttttcttgtgacagtgaataagtctcacaagatctgacagctttataaggtgttatttccctgaataagctctccctttgcctgctgccatccatgtaagatgtgactggctcctccttgacttccaccgtgattgtgagtcttccccagccatgtggaactgtaagtccattaaaccattttttttttgtataaattacccagtgttggtatgtctttatcagcaacatgaaaacggactaattcaggtaggtggtaccaggaatggggtgctgckgaagagatacccaaaaatgtggaagatactttggaaactgggtaacaggcagaggttggaacagtttggaggactcagaagaagataggaaaatgtgggaaagtttggaactccataaagacttattgaatggctttgatcaaaatgctgataacgatgtggacaatgaaatccaggctgaggtgatctcagaagaagatgtggaacttgtagggaactggagcaaaagcaactcttgttaggttttagtagagactggtggcattttgcccctgccccagagatgtgtggaactttgaacttgagggagataatgtagggtatctggcagaagaaatttttaagccccaaagcatttaagaggtgacttgggtgctgttaaaggcatttagttttataagggaaacagaacataaaagttcaaaaaatttgca

SEQ ID NO: 939251 - DNA, 765 bp, Homo sapiens
aaagcatttaagaggtgacttgggtgctgttaaaggcatttagttttataagggaaacagaacataaaagttcaaaaaatttgcacttttatgtgataaaatgtgatagaaaataaaatcccgttttctgaggagaaatactaacctgctgcagaaatttgcataagtaacaactagctgaatgttaatccccaagaaacggaacaatgtctccagggcatgtcagaggtcttcttcatggcatcccctcccaccacaggcccagaggcctaggaggaaaaagtggtctcgagggccaggcccagggtccctgtgctgtgtgcagcctagggacttcgtaccctgcctcccagcctctccagccatggctgaaaggggccaatatagtgatcaggctgtggcttcagagggtgcaagtctcaagccttggcagcttccacgtggcattgagtcttccagtgcacagaagtcaagaattggggtttgagaaactccacytaggtttcagaacatgtatggaaatgcctggatgtccaggcagaagtttgctgcaggggcagggctctcatggacaatctctgctaagggagtgccaaggggactgtaggggttggagccccaacacagagtccctactggggcattgcctagtggaggtatgagaagagggccactgtcctccagaccccagaatggtagatccactgacagcttgcattgtgtatcaggaaaagctgcagacattcaacaccagcccatgaaacc

SEQ ID NO: 939252 - DNA, 562 bp, Homo sapiens
atcacaaggtcaggagaatgagaccatcctggctaacacagtgaaaccctatctctactaaaaatacaaaaaaaaaaaaaaaaatagccgggcatgttggcaggcgcctgtagtcccagctactcgggaggctgaggcaggagaatggtgtgaacctgggaggcggagcttgcagtgagctgagatcacgccactgcactccagtctgggcgacagaatgatgttgaatattggcccccactctcttctgccttgtagagtttctgccgagaggtctgctgttagtctgatgggcttccctttgtgggtaactcgacctttctctctggctgcccttaacattttttccttcatttcaaycttggtgaatttgacaattatttgtcttgggattcctcttctcgaggagtatctttgtggtgttctctgtatttcctgaatttgaatgttggcctgccttgctaggttggggaagttctcctggataatatcctgaagagtgttttccagtttggttccattctcctcatcactttcaggtacgccaatcaaacatagattt

SEQ ID NO: 939253 - DNA, 599 bp, Homo sapiens
acaccacgaaagcaactccttacagctcaggtctgggatcttccagtgatgctggtctcgggcctctgtccccctacaggtgctcatttgggatcattgactgttagccctgggatgtgtgtggcttatcattctctccagttaatagagaactgctttcccttttcctgtacaattttataagattatctcagagtaaagctgttttgaacccagacaacagtggggtttttctgtttgttttttcccacccctcatgaracttatgcagttatgtttatcttccttgagcacctagagctcattggtggtggagggtgtcttacggcataggtggcctctcagagtctcagcaaggtcactcttttccatatgtaataatgagccattgttctattcatcatgacctcatagagccttttctttttctcaggtctcatttacttcctcttttttttttccttttccttttcctataccttcctttggtccttataagtatccaaattgccctgtaagtatgaattttacaataatgtcctcaatttggtatatcaagactgatcttagtagtttccttgcactaggcacgttcagct

SEQ ID NO: 939254 - DNA, 554 bp, Homo sapiens
aacgaggactgtaactaccatgagtatttcctccttcttttgttaaaaacatgtttgtgcatgtatatacctgtactaagaaaatatatcttcattttcttttcctttatcatgtgacataagatttactaacttcatatcagcatttaagtattgttaactttatgtaatagtatttgggttggggattggtgggtttctggttgtatgaaggayagctgtattgtgttaggcataattttgaccttattgtctttatttgaagactgtgtgtgatctcaggagatgtgtatgggttgaagttgacaagtggtggacttgtaatggttaatattgagtgtcaacttgattggattgaaggatgcaagtattgatcctgggtgtgtctgtgagggtgttgccaaaggagattaacgtttgagtcagtgggctggggaaggcagacccacccttaatcaggtgggcaccatctaataagccaccagtgaatacaaagcaggcagaaaaatgtgaagaggcgagacaagcctagcctcctagcctatatctttctc

SEQ ID NO: 939255 - DNA, 606 bp, Homo sapiens
attaataaataaatttctattcattctatgtaaatacataagaaaggaagtatattgtaagtttaaccccatgcctagtatataggaaactatgtatgaactggctatttttattatcactagtctataagcttctggggggctaggagtgtgttcctgtatttatakccctataattagccaaatgcctaacatatagtgtagctcaactattgttccctttaagagataggctattaattactgagcaagtgaatgaaactaatgaatgcttgaagcatcagagaagtggtttggcttatatttgcaatgtcataattaagctccaaacccgcacatgcctttcttcataaggttcattgtctgtttcattacacctctcttatgccctttctacctttctataggtttacccgtatatcttcctctcctcattataacccacctcaaccactgcttttatatcacctagtgatagaggtggcatttatcttaccagaggatagtcctaagggcccacctcagcatccttttctccccttgtgcccctacattaagcttaatctcattactttacaaccaggaatcaaaattaaatggtcccac

SEQ ID NO: 939256 - DNA, 567 bp, Homo sapiens
caaaaccagcaagtttttattatggatttcaaaagggaggcagtgtacgaatagggtgtgggtcacagagatcacatgcatcacaaggcaataaaatatcacaaggcaaatggggacagagcaagatcacaggaccagggtgaaattaacattgctaatgaagttttatgccccactgggcactcattgccattgataacatcttatcaggagacaggrtttgagagcggacaaccggtctgactaaaatttactaggcaggaatttcctcaccctaataggcctggggacactacaggagactggggcttatttcatcccttatctacagccgtgtaagacagacattgccagagcggccattttagagacctccccctaggaatgcattctccttctcagggttattccttgctgagaaaaagaattcagcgatatttctcctattcacttttgtaagaagagaaatatgactctgttccacccagctcccaggcagtcagacctaatggttatctctcttgttccctgaacatcgctgttatcctgttcttttttcaaagtgcc

SEQ ID NO: 939257 - DNA, 610 bp, Homo sapiens
tttcaatttgggtgccctttatgtcttttttttgcctggtcattctggccaggactgccaatactacattgaatgaaagtagtgagagagggtatccttgccttttgccagttttcaaggggaacacttctatcttttacatgttcagtatgatgttggctgtgggtttgtcatgtatggctcttattattttgaggtagttccttcaatatgtaattcattgagagttttaacatgaagtgatattgaattttattgaaagcctttctgcatctattgagataatcctgtggtttttggttttagttctgtttatgtgattaatcacatttattgatttkcatatgttgaaccaaccttgcatcccagaaataaagcctacttcttcatggtggattaactttttgatatgctgccagatttggcttgcaaatattttattgaggatttttgcatcaaaatacatcaaagatattggcctgaagttttctttttttcttttcttgtgtctctgcaaggttttactatgaagatgatgctggcctcaaagaatgagctttggaggagtccctcctcctcaattttctgtaatagtttcaatagcaatggt

SEQ ID NO: 939258 - DNA, 746 bp, Homo sapiens
ctgattgttcctttccatgtttagtgcttccttcaggagcttttgtaaggcaggcccagtggtgacaaaatctctcagcatttgcttgtctgtaaaggattttatttctccttcgcttttgaagcttagtttggctgaataggaaattctggtttgaaaattctttcctttaagaatgttgaatattggcccctactctcttctggcttgtagggtttctgctgtgagatccactgttaagtctgatgggcttccctttgtaggtaacatgacstttctctctggctgcccttaatattttttccttcatttcaaccttgttgaatctaacgcttatatgtcttagggttgctcctcttgaggagtatctttgtggtgttctctgtatttccggaatttgaatgttgccctctcttgttaggttggggaagttcttctggatactatcctgaagagtgttttccaacctggttccattctccccttcactatcaggtacaccaatcaaacgtaggtttagtcttttcacatagtcccatatttcttggaggctttgttcatttcttttcattcttttttctctaatcttgtcttcacactttatttcattaagttgatcttcagtctctcatatcccttcttccatttgattgatttggctatcgatacttgtgtatgcttcatgaagttctcgtgctgtgtttttcagctccatcaggtcatttatattcttttctaaactggtt

SEQ ID NO: 939259 - DNA, 715 bp, Homo sapiens
atagtcccatatttcttggaggctttgttcatttcttttcattcttttttctctaatcttgtcttcacactttatttcattaagttgatcttcagtctctcatatcccttcttccatttgattgatttggctatcgatacttgtgtatgcttcatgaagttctcgtgctgtgtttttcagctccatcaggtcatttatattcttttctaaactggttattctagtgagcaattcctctaatattttttcaaggttcttagcttccttgcatttgacatgctcctttagcttgaagaagtttgaagcctacttctgtaaatttgtcaaactcattctccatccatttttgctcccttgctgatgaggagttgtgatcctttggaggagaagaggtgttctggtttttggaattttcagtctttttgcgttggtttttcctcatctttgtggatttatctacctttggtctttgctgttgttgaccttcagatggggtttttgtgtggatgttctttttgttgatgttgatgctattcctttccatttgttagttttccttctaacggtcaggcccctctgytgcaggtctgccggagtttgctggagggtccactccataccctgtttgcctgggtatcaccagcggaggatgcagaacagtaaagattgctgcctgttccttcctctggtagcttcatcccagagtggcaccctc

SEQ ID NO: 939260 - DNA, 667 bp, Homo sapiens
cttttagttgaagccagtgctcgtttacattctgaaaatcctagtgtccttaagacttatgctaaatctactctgcctgtgctctataaatggaacaacaaagcctggatgacagcacatctacttacaatatctgcttgccacactgaatattttaagtccactattgagacctactgctcagaaaaaaagatttctttcaaaatattactgctcattgacaatgcacctcatcacccaagagctcgatggagatacaygaggaaattactgtagttattatgcctggtgacacagcatctattctgcagtctgtgggtcagggagtaattttgacattcaagttttgttatttaagaaattcattatgaatgtatacattataaatgcacaggaaataaaaattttgcacaaaccttaaaaaatttaattttaaaaatgctttattgctaaaaaaattgctaatgatcatctgggtcttctgcgagttgtatctgtaattttgacattcaagcctgctatctatggctatagctgccatagatagtaatttctctggtggatctgggtaaagtaaactggaaaccttctggaaaaggttcactattctagatactattaagaacatttgtgattcattggaggaggtcagaacattaacacgaat

SEQ ID NO: 939261 - DNA, 667 bp, Homo sapiens
cttttagttgaagccagtgctcgtttacattctgaaaatcctagtgtccttaagacttatgctaaatctactctgcctgtgctctataaatggaacaacaaagcctggatgacagcacatctacttacaatatctgcttgccacactgaatattttaagtccactattgagacctactgctcagaaaaaaagatttctttcaaaatattactgctcattgacaatgcacctcatcacccaagagctcgatggagatacacgaggaaattactgtagttattatgcctggtgacacagcatctattctgcagtctgtgggtcagggagtaattttgacattcaagttttgttatttaagaaattcattatgaatgtatacattataaatgcacaggaaataaaaattttgcacaaaccttaaaaaatttaattttaaaaatgctttattgctaaaaaaattgctaatgatcatctgggtcttctgcgagttgtatctgtaattttgacattcaagcctrctatctatggctatagctgccatagatagtaatttctctggtggatctgggtaaagtaaactggaaaccttctggaaaaggttcactattctagatactattaagaacatttgtgattcattggaggaggtcagaacattaacacgaat

SEQ ID NO: 939262 - DNA, 616 bp, Homo sapiens
aaacccaaaccacagtgcgacaaccacctcacatccattggcgtgattaccatcaaacaacaaagcaatataaaacaaaacaaaaaacaacagaaaataacaagtgttgaagaggttgtgaaaatgttggaacacataaactgttgttaggattgtaaaatggcacagtcactatggaaaccacaaaagacgttcctcaacaaagtaattatggtctagcaatttcacttctgggtatgtgcccaaaagaatataycttgaggagatatttttacatccatattcatggtagcattattcactatggacaaaaggtggaagcaccccaaatgttcattgacagatgaatgggtaaacaaatgtgacatatacatacagtgcaatattattcagacttaaatagaaaggtttgctgtgtgttacaacatggatgaaattttaaaacattatattaagtgaaataagatattcacaaaaagacaaatactgtattattccacttatatgatgttcttagagtagtcaaattcactgagaaagtagaatggtgtttgccaggtacttggtgaaaggggaatgaagagtcattctataatggatacagagttttagctat

SEQ ID NO: 939263 - DNA, 563 bp, Homo sapiens
acctcgacagactgctcagctattggtgcaaagtactataggtgactccttcttagttatcaccgtccacaccactctaagttcagcccattggctgctttgtccgcacccgttatcaaaccatatggtatcggtgctaggctggactgctacagcagcccaggcagcagyagcaccccggctggacccatctgcataccatgccccatcaggaatgggaaggcgctcttctttaaatggtgatggctcaaggcgtggggtgcctcaggtcccatggccttatcttgcgttaggactgcaggccctaagacctcttgtaactctgttgctaatagacttgtactcagcatactctgctgttctaagtaggcaccccactttgctaatgtggatgcctgtgctgccccagtctggggggttgttacccatgaatgcacccaccctgctattgggttagtcatctgcacagcgactgcaacccttcctgtcaagctctcacaggcctgaacagcagcatatacagcagctaaatgcttctctatcagtgaataccggagctcagc

SEQ ID NO: 939264 - DNA, 597 bp, Homo sapiens
agagagacacagataaggatttcccagggagggattgagactttcagagctcagtgacctcctctttgtgtctccagaaggaacagagaggactttgagccggactactaactcttttctctttttagttcttacaattggacttactgcttagtttccccacattcagctatgggcatagtatccttacagctagaaggagaaggacgagaaagagagatttctaattctggggatttcatgaagtcctcttcttctctattcattagtttccttgtctgtaaagtgaggatcttgaattagataatctttcaagttctttccaagtctattagtctataattctatttcttaagtagtacagaaaatggctatattatagccattgttggaggggagaatttgtattgtgaggtagtaagaaataaggggcaattggcmaataaaggccagattatgttgtcactaattctgagctatggcatttcaatcctgtatgtgagagctagagactcatacagtgacctagagcaggcatgggtgggtcacaggctttggagagcactctctgtcctgatcttttcagttgagagactt

SEQ ID NO: 939265 - DNA, 645 bp, Homo sapiens
ttaaagttctttctattagaaactattatccatagtttgcatctttatggcccagctgagttgaaattccaaataagatcccttcaaatttaataaatggcattcttcattaacagcatttaaaaaataatggctgaaacacataatcaacattmccctgaagttctatctgaagacagaaaaagttgccatccacacccaaagctacacatataccttctgattttatagaattgttccaatatctttttctgtcaatatcattaaaatcaccctacctgtttggaccgaggtctaccaggagaaaattttctcttagtaatagctggtttacccatgccagttttttggagtgactgagatgtaagttgttggcatgatgtttccagcagaggaactaagagctgaagggtaattacgcagcatgtcatgcgaaggcaagtctgaagaaggtgttggggaggaagacacatctgccttgcttatgtctgctgataatgaaaatgatgactctgtctcagatgataactttatagatttgcctccttggtatgaaacatctttcacacaaccctcaattgtaggagtcatttcagagtccatcaatccagtagaaagttcagaatcttctttctgttccttttc

SEQ ID NO: 939266 - DNA, 645 bp, Homo sapiens
ttaaagttctttctattagaaactattatccatagtttgcatctttatggcccagctgagttgaaattccaaataagatcccttcaaatttaataaatggcattcttcattaacagcatttaaaaaataatggctgaaacacataatcaacattccmctgaagttctatctgaagacagaaaaagttgccatccacacccaaagctacacatataccttctgattttatagaattgttccaatatctttttctgtcaatatcattaaaatcaccctacctgtttggaccgaggtctaccaggagaaaattttctcttagtaatagctggtttacccatgccagttttttggagtgactgagatgtaagttgttggcatgatgtttccagcagaggaactaagagctgaagggtaattacgcagcatgtcatgcgaaggcaagtctgaagaaggtgttggggaggaagacacatctgccttgcttatgtctgctgataatgaaaatgatgactctgtctcagatgataactttatagatttgcctccttggtatgaaacatctttcacacaaccctcaattgtaggagtcatttcagagtccatcaatccagtagaaagttcagaatcttctttctgttccttttc

SEQ ID NO: 939267 - DNA, 486 bp, Homo sapiens
ctgatttatgcatcaaaagagtatttatataatcacagcaaataactcaaatcttttacatcactagtaaactcaaaaaatatagcaaaaagcaataacattaaatttcattattgatctactagctttaactatttaatactagtacacttagttttgattactttgaaattgaagcaaaaacaataatcttttcttcttttaatgactttttcagttacaggaaagatgayattaaaagaagatatacaaccatagcttagctacaggtataaaattgttttaaagatatgtaattgtgctattgaattaaactgaaaacataaatatcaactcatgattttgaaaaaaaaatcttttttatgtttggttttggtaaaaggagagataaataagtcagaagaacagaaaatacagaaataggcaaactttcccatattcaattaatttttgagcaaggggtcaaggtaattcaagagagcaata

SEQ ID NO: 939268 - DNA, 505 bp, Homo sapiens
ctcagaataacagtaaggaatcaacttatagggaaaccagatctagccatgttctttaaatatgagagataaccccgttggctcatgccactgtccttatttataacagcccctatttgcctttctacttctctgaactcattatccttcaaatctacaatcttttcaaaaacccaaacacagagtcacctcagtcaccactacctgcccttctcctaccccacccaatgcctgtgrctttcaggtcatttattttgcaataaacttgttatctcaattttactggttctcttttagactcacacagctgagattatgatagattcattagtaagctgaatggggaagaaaaggatatttacattcctaggccaattttcaatgctttttggaagattctgttaaattcacaatttccagaactggcaaggaataggtaaatatatacactcatatattactgttaagagtataaattggtataattatcctacagtgatatctg

SEQ ID NO: 939269 - DNA, 579 bp, Homo sapiens
taaacacatccaaacaatgtcatttcacccctatggcccccaaatctcatgtccttctcatattgcacaatacaatgtcatttcatccctatggctcccaaatctcatgtccttctcatattgcacaatacaattatcctcycccagtagtccccaaaaatctcaagctgtttcagcatcaactcaaaagtccaaaatctcatctgagcttcaaggtacattcctccatctatgagcctatgagatcaaaaccaacttatttgcttccaatattcaatgcagtacaggtgttgggtaaatattcccattcccaaatggagaagttgggcaaaagaaaggggcaacaggcctcaggcaaatctgaaacccagtagggcagacattaaaccttcaagctccaaaataattcttgatttcatgtcccgcatccagggcacacttgtgcaaggggtgggttcccaagaccttatgcagctctgcctctgtggctttgcagtgtacagtcaccatggctgctgtcttggatcagagttgcgtgcctgtggtatttctaggctcaggatgaaagcttcccatggc

SEQ ID NO: 939270 - DNA, 579 bp, Homo sapiens
taaacacatccaaacaatgtcatttcacccctatggcccccaaatctcatgtccttctcatattgcacaatacaatgtcatttcatccctatggctcccaaatctcatgtccttctcatattgcacaatacaattatcctctcccagtagtccccaaaaatctcaagctgtttcagcatcaactcaaaagtccraaatctcatctgagcttcaaggtacattcctccatctatgagcctatgagatcaaaaccaacttatttgcttccaatattcaatgcagtacaggtgttgggtaaatattcccattcccaaatggagaagttgggcaaaagaaaggggcaacaggcctcaggcaaatctgaaacccagtagggcagacattaaaccttcaagctccaaaataattcttgatttcatgtcccgcatccagggcacacttgtgcaaggggtgggttcccaagaccttatgcagctctgcctctgtggctttgcagtgtacagtcaccatggctgctgtcttggatcagagttgcgtgcctgtggtatttctaggctcaggatgaaagcttcccatggc

SEQ ID NO: 939271 - DNA, 695 bp, Homo sapiens
ctggcctaaaaccaaggtgtcagcaaaacttccctcttgatgcaagttctgggggagaatcagtttccttgccatttcctgcttctaggggaatgtttctagagtattccttggctcctggacccttccttgaacttcagagccagtagtgcagcatcttctaatttctctgtgactctgacctttgcttttgtcctaacatcacctcctctggctctggcactcctgcctccctcttacaaagatcctgtgatgatcttagacccagctggataatccagggtcatttcatctcatgattcttaaactaatcacatctgcaaaatctttttagccatgacaggtttttacagatttctagaattaggatgtggatwtttttttgagggggggaagggggtgcttactctgtcaacccacatggggattaggatgtagacatccttggggccattattctgtctgctacctagtattaggccatggacatctttgggaccattattctctgtatcacatgaggagtaggacatgggtatctttgggaccattattctgtctcccacatggggattaggatgtggacatctttggggccattattctgtctgccacgtggggataaggatgtgtacatctttgaggccattattctgtctaccacatggggattagtatgtggacatctttggggt

SEQ ID NO: 939272 - DNA, 695 bp, Homo sapiens
ctggcctaaaaccaaggtgtcagcaaaacttccctcttgatgcaagttctgggggagaatcagtttccttgccatttcctgcttctaggggaatgtttctagagtattccttggctcctggacccttccttgaacttcagagccagtagtgcagcatcttctaatttctctgtgactctgacctttgcttttgtcctaacatcacctcctctggctctggcactcctgcctccctcttacaaagatcctgtgatgatcttagacccagctggataatccagggtcatttcatctcatgattcttaaactaatcacatctgcaaaatctttttagccatgacaggtttttacagatttctagaattaggatgtggatatttttttgagggggggaagggggtgcttactctgtcaacccacatggggattaggatgtagacatccttggggccattatyctgtctgctacctagtattaggccatggacatctttgggaccattattctctgtatcacatgaggagtaggacatgggtatctttgggaccattattctgtctcccacatggggattaggatgtggacatctttggggccattattctgtctgccacgtggggataaggatgtgtacatctttgaggccattattctgtctaccacatggggattagtatgtggacatctttggggt

SEQ ID NO: 939273 - DNA, 695 bp, Homo sapiens
ctggcctaaaaccaaggtgtcagcaaaacttccctcttgatgcaagttctgggggagaatcagtttccttgccatttcctgcttctaggggaatgtttctagagtattccttggctcctggacccttccttgaacttcagagccagtagtgcagcatcttctaatttctctgtgactctgacctttgcttttgtcctaacatcacctcctctggctctggcactcctgcctccctcttacaaagatcctgtgatgatcttagacccagctggataatccagggtcatttcatctcatgattcttaaactaatcacatctgcaaaatctttttagccatgacaggtttttacagatttctagaattaggatgtggatatttttttgagggggggaagggggtgcttactctgtcaacccacatggggattaggatgtagacatccttggggccattattctgtctgctacctagtattaggmcatggacatctttgggaccattattctctgtatcacatgaggagtaggacatgggtatctttgggaccattattctgtctcccacatggggattaggatgtggacatctttggggccattattctgtctgccacgtggggataaggatgtgtacatctttgaggccattattctgtctaccacatggggattagtatgtggacatctttggggt

SEQ ID NO: 939274 - DNA, 606 bp, Homo sapiens
tggcacaccacgagattatatcccacacctggctcggaggatcacacacccatggagccttgctcactgctagtgcagcggtctgagatcgaactgggaggcagcagacaggctgggggaggggcatccaccattgctgaggcttgactaggtaaacaaagccactgggaagcttgaactgggtggagcccaccacaactcaaygaggactgcctgcctctgtagactccacctctaggggcagggcatagctgaacaaaaggcagcagaaactttctacagcagaagtttctacagccttaaacttccctgtctgacagccctgaagagaacagtggttcccacagaatggagtttaagctctgagaatggacagactgcctcctcaagtgtgtccctgacccccaagtagcctaactgagagacatctcccagtaggggtcaactgacacctcatacagccaggtgcccctctgagacagagcttccagaggaaggatcaggcagcaacatttgctgttctgcaatatttgctgttctgaagcctctgccagtgatacccaggcaaacagggtctggagtggacctccagcaaactccaacaga

SEQ ID NO: 939275 - DNA, 837 bp, Homo sapiens
atacagaacttcatatccagtcaaactaagcttcataagtaaaggagaaagaaaatcctttatagacaagcaaatgctgagagattttgtcaccaccaggcctgccctacaagagctcctgaaggaagcagtaaacacagaaagaacaaccagtaccagccactacaaaaacatgccaaattgaaaagaccatcgatgctaggaagaaactgcatcaactagtgggcaaaataaccagctaacatcacaatgacaggatcaaattcacacgtaacaatattaaccttaaatgtaaatgggctaaatgttccaattaaaagacacagactggcaaattggataaagagtcaagamccatcagtgtgctgtattcaggagacccatctgacatgcagagacacatataggttcaaaataaaggaatggaggaagatctaccaagcaaatggaaaacaaaaaaaaaacaaaaaaaacaggggttgcaatcctagtctcaggaaaaacagactttaagccaacaaagatcaaaagagacatagaaggccattacataatggtaaacggatcaattcaacaagaagagctaactatcctaaatatatatgcacccaatacaggagcacacagattcacaaagccaatccttagagatgtacaaagagacttagactcccacacaataataatgggtgactttaacaccccattgtcaacattagacagatcaacgagacagaaagttaacaaggatatccacgatttgaactcagctctgcaccaaggggacctaacagacatctatagaactctgtaccccaaatcaacagaatatacatt

SEQ ID NO: 939276 - DNA, 729 bp, Homo sapiens
cacctcctgtcagatcagcagcagcattagaccttcacaggagcgcaaaccctattgtgaactgcacatacaagggatctaggttgtgtgctccttataagaatctaactaggctgggtgctgtggctcatgcctgtaatcccaacactctgggaggccgaggcaggtggatcacaaggtcaagacactsctggccaacatggaaaccccgtctctactaagaatacaaaaattagctgggtgtggtggcgcatgcctgtagtcccagctactcggggggctgaggcaggagaatcacttgaacccaggaggcagaggttgcagtgagccgagattgtgccactgcactccagcctggcgacagtgggagactcagtctaaaaaaaaaaaaaaagaaaaaatagaatctaatgcctgatgatctgatgatctgaagtggaacagtttcagcccaaagccatccccactccgcggaaaaattatctttcacaaaaccagtccttggtgtcaaaactttggggaccactgctgtaggcagttatatcacaatagtaatatctaaacatggaaaagatacagtaaaaacatagtacattgggagaccgaggcaggcggatcacctgaggtcagaagttcgagaccagcctgaccaacatggagaaactccatctgtactaaaaatacaaaattagctgggtgtgctggcatgggcctgtaatcccagctact

SEQ ID NO: 939277 - DNA, 763 bp, Homo sapiens
aacaaggctttcttctggaagaactcctgaaagaccttcccgacgctgttttatagttaattatttttcatgagtagaagtactacactctaaaatatgaataaaatgtatagtattgtaaatactgttgatccttgaacagtgcaagggttaggggaccagctcctgtgcagttgaaaatccatatataactctgggctatccccaaacttaactactaatagcctattcttaactgcaagctttgctgatcaaataaacaattaatgcatamtttgttaattatatactgtattcttaaagaaagagaaaagaaaattctattaagaaaatcataaggaggagaaaatatgtttactattcattaagtgaaagtggatcatcataaaggtcttcgtctgcatattcatgttgagcagcctgaggaagagaagaggagaagttgatcctgttgtctcaggggtgggagaaacagaaggaaatttgcatataagtgaacttgtgcatttcaaatccatgctgttcaaggagcaactgtacataaactagtcacatggtcatttattatcattaacaagtatgacatatggtacataattagatgtgctaacctttaatgccactgacaaatgtagtgggtttgcttataccagcctcactgcaaacacatgagtaatgcgttgtgctatgatgtcatcatggccacagtgttactagatggtaagaatttttcagctctgttatcttaagcgaccaccattgt

SEQ ID NO: 939278 - DNA, 764 bp, Homo sapiens
aattagatgtgctaacctttaatgccactgacaaatgtagtgggtttgcttataccagcctcactgcaaacacatgagtaatgcgttgtgctatgatgtcatcatggccacagtgttactagatggtaagaatttttcagctctgttatcttaagcgaccaccattgtatgcagtgtagcatttaccaaaaaaccattatgccacacaggaccatatttggggcttttagtgtcccctgtccccaagatccttctrttcaaaatgtgagctcatgcatggtttaaaatttgtgatggtgtgcagtggacacatggtggattgacatatttttttctttacttttgaatagttggattttttttttcaagacagagtctcactctgtcacccaggctggagtgcagtggcgcgatctcagctcactgcaagctcgcaagctctaccttctgggttcacgccattctcctgcctcagcctcctgagtagctgggactacaggtgcccaccaccaggcccagctaatttttttgtatttttaggcgagactggatttcactgtattagccacgatgttcttgatctcctgacctcctgatccgcccaccttggccttccaaagtgctgggattacaggtgtgagccaccaagcccagccgaagatgacttcttaaaatagacacgaagtatgaaaatacttgtagcccaagtaaattcttattagagggaatccactgaagaggagtaatcgtatgcatacaatgac

SEQ ID NO: 939279 - DNA, 602 bp, Homo sapiens
caggcaaccaccaccatgcccagctaatttttgtatttttagtagagacggggtttcaccatgttggccaggatcgtctcgaactcctgaccttgggatcctcccacctcagcctccgaaagtgcttcttataaaactacaaagtagcttaatgcattataaaaataatcaaacttacctttctacaaatactcgaagaagaacatccatgagaaaaaataaggcaatagctagagaaatagaacgatactccaaaggaatataaagtttgctgtcagtgaaaattaggtcggcaaggatgagagtgacatccagtaagaccaggaaaactccaaatagtctaaaataaacaaataaataaataaataaataaatgcaaagataaargggcatttgtccctgtagctatactatatttaagccactgatcaggtaccaaaatgttattatttagtattaagctgcccagtggcaggaaaaactgtaatgccttagaatctcagaaaaatcactgttttcacccaatagaagcagttcttaataaacaaaattctcaccaaaccacttcacaagatattatagtaaacacatcagaccaacac

SEQ ID NO: 939280 - DNA, 599 bp, Homo sapiens
tcttcttttgagcaatgtctattcatgtcatgtgcccactttttaatggaattatttgtatttttcctgctgatttgtttgagtttctggtaggttatggacattaatcctttgttagattcataatttgcccatattttccccattgtataggttgttggctcactttgatgattatttcttttgctgtgctgaagctttttactttaattaggtctttatttatttatttatttatttttatttttgttgcttttgctttcagggtcctcatcataaattatttgcctaggctratgtcttcaggtcttaggtttaggccattaatccatcttgaattaatttttttacatggtgagagatagagatccaattttattcttctatatgtgactatctttttttcccagcaccatttgttgaataacgtgtgctttctccagtgtatgtttttgtatcctttctcaaagatcatttggttgtaagtggccttttttctgagttgtctattctgttccattgatctgtgtatctacttttatatcagtaccacgatgtttgttactgtggccttagagtataatttgaagtcaggtaat

SEQ ID NO: 939281 - DNA, 599 bp, Homo sapiens
tcttcttttgagcaatgtctattcatgtcatgtgcccactttttaatggaattatttgtatttttcctgctgatttgtttgagtttctggtaggttatggacattaatcctttgttagattcataatttgcccatattttccccattgtataggttgttggctcactttgatgattatttcttttgctgtgctgaagctttttactttaattaggtctttatttatttatttatttatttttatttttgttgcttttgctttcagggtcctcatcataaattatttgcctaggctgatgtcttcwggtcttaggtttaggccattaatccatcttgaattaatttttttacatggtgagagatagagatccaattttattcttctatatgtgactatctttttttcccagcaccatttgttgaataacgtgtgctttctccagtgtatgtttttgtatcctttctcaaagatcatttggttgtaagtggccttttttctgagttgtctattctgttccattgatctgtgtatctacttttatatcagtaccacgatgtttgttactgtggccttagagtataatttgaagtcaggtaat

SEQ ID NO: 939282 - DNA, 560 bp, Homo sapiens
gagggaagggcaggttatcgtctttgctttttcgcaggcttcactgctgataccttcagccactggaaaatacgaggcaattggcgactggagtggacccccagcataccacggcagccccacagaaaagtggccagactgttatgtgggtgcccatttccatatctcctcgatgggcaggtcttcctggcctgggtctccagccagccccccacttgagctttcaagccagtagcaactcagcaactccctggacagagcttccaggagcaacagaaatcctctctgccactgcctctgcagtggaactgcccttgctaccctcagaatatcaagggagcaaagaccctaagtrccatattgacacctccaacaagctgcagttgacacaaggaacaagtcagtccatcttccacaggtacaacacaccccttactgctcatcaccagacaaggaaccctggcttgggcccacaacacagaccctccatcctggggtgattacattaagtaactgctaacttacacctctctggggtggagcccccaggagacaaggaa

SEQ ID NO: 939283 - DNA, 765 bp, Homo sapiens
gactttgggcaagtgacttcccctctctgatcctcatattcccttttgataaaaacagcacaatggcaggcctatggggattgaaggagctgacagaaaaatgtgtgccttagtataattttcctggaagtagatcctgaggcaaatattcaaatacaaaaattctatttggagataactctaggatagtaattcgactgccagttcttccttagggtgcgtatcccaggaaacaccagtagaggagtggggaactgagacaggaaaggaatgcagcagttaaagggaccttcatcaagaaagtttcccctgtggcagccaggactcagccctgccaggtacatctgcagagacagcacagaacatgtgcctcagagtcacccacccaaagcaagggagctggggtatttatccaccaatacccaccagtcactcctcagggatccttccaagggcatgattcctccagaatgtcctgcctgakctgcaagtgtcagaccaggggttgaggacagggaccctgacagtacctccagcaatgagcaggaacacagcctggtgtggagagtttcagtcagtgattccaactcatacacttacccacacaccacactccagccccaacaatgtgtatatgtacacacacatacatgcatacatgactgttacccactttgatcctggtgactccatgggatatacagtaaggcagaaatcagagggaagagcagaattaaggggagtgaaaatcttaagaagaaaatg

SEQ ID NO: 939284 - DNA, 603 bp, Homo sapiens
caaatcttattattctgtccctgccccacaaatctcatgtccttctcactttgcaaaatacaatgatgccttacttaccattccccaagccactgtgctttttttttacagcctgcagaaccatgagcccattaaacccctttttgttatgatcatacagaaaattagtattgtgaagtgaagctatgaaatgccttcaatgacttttccccatcatctcggctaagayccccaaggtcttaactcattccatcatttactcaactgtctgaagcccaaagtctcatctaagacaaagatgcagtcccatctcctcctgagcctctgaaatacaaagcaagttaactacttccaaggtatgattgtccagacattgagtaagaattcccaaccaaaaggaagatttatgccagagacaagaacaaaacacaaacgggacttacaggtcccatgaaaatccaaaacccagcaggccagttattcaaacctacagctccaaagtcatcctttttcaatccttgtcccacatccagggcacaagtgtatgagggctgggttcccaaggccttgggcagcactctacctgtggctttgcagtgttca

SEQ ID NO: 939285 - DNA, 603 bp, Homo sapiens
caaatcttattattctgtccctgccccacaaatctcatgtccttctcactttgcaaaatacaatgatgccttacttaccattccccaagccactgtgctttttttttacagcctgcagaaccatgagcccattaaacccctttttgttatgatcatacagaaaattagtattgtgaagtgaagctatgaaatgccttcaatgacttttccccatcatctcggctaagacccccaaggtcttaactcattccatcatttactcaactgtctgaagcccaaagtctcatctaagacaaagatgcagtcccatctcctcctgagcctctgaaatacaaagcaagttaactacttccaaggtatgattgtccagacattgagtaagaattcccaaccaaaaggaagatttatgccagagacaagaacaaaacacaaaygggacttacaggtcccatgaaaatccaaaacccagcaggccagttattcaaacctacagctccaaagtcatcctttttcaatccttgtcccacatccagggcacaagtgtatgagggctgggttcccaaggccttgggcagcactctacctgtggctttgcagtgttca

SEQ ID NO: 939286 - DNA, 491 bp, Homo sapiens
ttgcttgtatgtagatggagggtctgcatcctcattcaggtaacaccctcagcctttcatgctgagattagccattttatttgtaactcactgtacaatccatttgctcttccagtgtcccttagaaggatgcagagtgttctgtagaatgccatagagacctggatttagggaaaatatttgaccaaaagtctgccaactcacatgagtatctcccaacaacttgtacagtgctagtctctgggtatatagyaaatgaaaccgtgcctgagcagatgttacaaacaccctcccctgagagactccagggctgctttattcaagcaaaacggtgtgctctaataagctcagtgttgagaggaacaagttttcattccagctttctcaaaaactccctttgtgactttagacataataataataacactacctaggtagtgaacacctctgccaagaaatatcatgatcattacctgagttgtaattctcac

SEQ ID NO: 939287 - DNA, 491 bp, Homo sapiens
tgcttattatgcagatgggcaacctgaggctcagatggagttaagtggcttaattggtagcaacagagccaggatttgaacccagggctgcctgatcaccaaataaaattgtactcaacatgatgcacttaacttttctggcctcatttctctcacctgtaaaaatgcakgtttcagatgttggtaatattttacctgtggttgaaagagttaccagcccttccttgatcacccatggtaagacccatgagcctctgaatataattatagaaaacatttggagagggatagagagagacaagatcatgcctcctttgataatgtcaaattttcagtgcacgaagccatacatagtgcagttttctagcttccctttcacacatggcattgaagaaagtaaattaagcaactcagctaacactgggaatgcagcagaagtaatcgagttcagtgctgggagacagttgccatgatattccaacatggacacc

SEQ ID NO: 939288 - DNA, 491 bp, Homo sapiens
tgcttattatgcagatgggcaacctgaggctcagatggagttaagtggcttaattggtagcaacagagccaggatttgaacccagggctgcctgatcaccaaataaaattgtactcaacatgatgcacttaacttttctggcctcatttctctcacctgtaaaaatgcaggtttcagatgttkgtaatattttacctgtggttgaaagagttaccagcccttccttgatcacccatggtaagacccatgagcctctgaatataattatagaaaacatttggagagggatagagagagacaagatcatgcctcctttgataatgtcaaattttcagtgcacgaagccatacatagtgcagttttctagcttccctttcacacatggcattgaagaaagtaaattaagcaactcagctaacactgggaatgcagcagaagtaatcgagttcagtgctgggagacagttgccatgatattccaacatggacacc

SEQ ID NO: 939289 - DNA, 624 bp, Homo sapiens; identical to SEQ ID NO: 939240

SEQ ID NO: 939290 - DNA, 722 bp, Homo sapiens
cctatttgcagatgacatgattgtatatttagaaaaccccaccgtctcagccgaaaatctccttaagctgataagcaacttcagcaaagtctcaggatacaaaatcaatgtgcaaaaatcataagcattcctataatgttgccggaagtcagggaccccaaacagagggaccggctggagcygcagcagaggaacataaattgtgaagatttcatggacatttatctgttcccaaaattaatacgtttataatttctaacacctgtctatactgcaatctctgaacataaattgtgacgatttcagggacatttatcagttcccaaatagtactctttgaatttcttatgccagtctttactttaatctcttaattctgttatcttcctaagctgaaaatgtacatcacctcaggaccactattgtacaaattgattgtagaatatgtgtgtttgaacaatatgaaatctgattgtaaaacatgggcgtttgaacaatatgaaatcagtgcaccttgaaaacgaacagaataacagcgattttagggaagaagggaagacaaccaaaggtctgactgcctgcggggtcaggcagaatagagccatatttttcttcttgcagagagcctataaacagatgtgcaagtaggagagatatcgctgaattcttttcccagcaaagaatattaataattgataccctggggaaggaatggattcctg

SEQ ID NO: 939291 - DNA, 722 bp, Homo sapiens
cctatttgcagatgacatgattgtatatttagaaaaccccaccgtctcagccgaaaatctccttaagctgataagcaacttcagcaaagtctcaggatacaaaatcaatgtgcaaaaatcataagcattcctataatgttgccggaagtcagggaccccaaacagagggaccggctggagctgcagcagaggaacataaattgtgaagatttcatggacatttatctgttcccaaaattaatacgtttataatttctaacacctgtctatactgcaatctctgaacataaattgtgacgatttcagggacatttatcagttcccaaatagtactctttgaatttcttatgccagtctttactttaatctcttaattctgttatcttcctaagctgaaaatgtacatcacctcaggaccactattgtacaaattgattgtagaatatgtgtgtttgaacaatatgaaatctgattgtaaaacatgggcgtttgaacaatatgaaatcagtgcaccttgaaaacgaacagaataacagcgattttagggaagaagggaagacaaccaaaggtctgactgcctgyggggtcaggcagaatagagccatatttttcttcttgcagagagcctataaacagatgtgcaagtaggagagatatcgctgaattcttttcccagcaaagaatattaataattgataccctggggaaggaatggattcctg

SEQ ID NO: 939292 - DNA, 642 bp, Homo sapiens
atagaagaccaggttgacttcaaaggttttgactctagttcctgacccccaaatggcatttctgaatccacctggggcctcagagatctcaccacactgaagggaagaacacaggcctggctggaatggccgtctactcatygtaggggccaagggccttgagtcagtacaagaagtagctggggagtggttacagatcttgggcaagaccctgtgctgcgctggcttcaggtctgacccagcacagtcatagtagtgatagccacaggggtgccagtgtcactccccctctagcttttggtagctcagaacacaaagagagactctgtatgtttgggagaaagtaacaaaagagaacaagaatctctgactggtaatccagggagttctcctggattcagtcgaaaataaccaaggaggtgcttctacaagtctgcaagaaccacagtgctactgtgcttggggagtcccctaaagaagattgagcttagatcacaaaactcaagtcctttcaaatatctggaaaggctccccaagaggaacagctacaaataaccccagacagtgaaggctgcaataaatacttaacctccttaatgcccagacactgaaaaacatctactagcatcagcaccatccagg

SEQ ID NO: 939293 - DNA, 658 bp, Homo sapiens
ggaagttgtgacaggctgcactgggaaaattggggcactgccaccttaacactgtgcttttccaacattcttagtaaacagcacaccaggagattatatcctgcacgtggctcagtgggtcccacgcccatggaggcttgctcacttctagtccaagactgaactgtgaggcagcaagcttggctgggagagaggcatccaccattgctgaagcttgagtaggtaaacaaagcagccagaaaggtcaaactgggtggaacccactgcagctcagctaggcccacttgcctctrtagactccacctcggggggcagggcatagctgaacaaaaggcagcagaaacttctgcagacctaaacatccctgtctgacagctctgaagagagcagtggttctcccagcacggtgtttgagctctgagaacagaaagactgcctcctcaagtgggtccctgacccccgtgtagcctaacttggagatacctcccagtaggggctgactgacacctcacacagccgggtgcccctctgagatgaagcttccagaggaaggattaggcagcaatatttgctgttctgcaatatttgctgttctgcagcctccactggtgatacccaggaaaacagggtttggagtggacctccagcaaactccaac

SEQ ID NO: 939294 - DNA, 658 bp, Homo sapiens
ggaagttgtgacaggctgcactgggaaaattggggcactgccaccttaacactgtgcttttccaacattcttagtaaacagcacaccaggagattatatcctgcacgtggctcagtgggtcccacgcccatggaggcttgctcacttctagtccaagactgaactgtgaggcagcaagcttggctgggagagaggcatccaccattgctgaagcttgagtaggtaaacaaagcagccagaaaggtcaaactgggtggaacccactgcagctcagctaggcccacttgcctctgtagactccacctcggggggcagggcatagctgaacaaaaggcagcagaaacttctgcagacytaaacatccctgtctgacagctctgaagagagcagtggttctcccagcacggtgtttgagctctgagaacagaaagactgcctcctcaagtgggtccctgacccccgtgtagcctaacttggagatacctcccagtaggggctgactgacacctcacacagccgggtgcccctctgagatgaagcttccagaggaaggattaggcagcaatatttgctgttctgcaatatttgctgttctgcagcctccactggtgatacccaggaaaacagggtttggagtggacctccagcaaactccaac

SEQ ID NO: 939295 - DNA, 627 bp, Homo sapiens
attattattcaaagtgatttttagataaggggacttatgaatgattttctcaaaaaaaatcgataccagtttgatcagtcttgaggatactgggtcatagcaactaccagtactcagacattggggaattgttcagggaaaaggcagcaactttgaagtatcctcaagaataagaagggcatgttgaaacaattaatcataaacaagtcattcaaattaaaagtgtattcttaaatagtttcttgattaagaacaaatgcctcattaatctggaacatattgacttgagaacacaagtaaagtcaaagagagtaatgactgacatgacgtggaacacagcatgctgtgtgttcccatcacaaaagctttggaggaacagattccacagaaggtcactggagacagtgaactgaagagaaaacccagcatcacccaatgacgcaraggtaaatttttaaaaatctagattacagagaacattgggtaccagtagcactgacactatttccatctatagattctgagttcatttcatttatttcaggcatgcaaataagtctaaacccaagatctaaaaaataaaaaataaagatatatctaaaagaaataggcatctaattttaaaga

SEQ ID NO: 939296 - DNA, 655 bp, Homo sapiens
agatgtggataaaccacttaggttttctgcctcttcattagtgcaagggtggcaagggcagtagcagagaggctttcagttgcccctgaaggctctgtccagggagttggtgagtttgctgctggctcaatagctctggcagggggcggctggaggcctaggcctggaggacctgcgtggtgaggagatataagaacaaccacccacctaacaatctggctaattttccacagggttgctgcagtatgttgggggcccattccagtctctagtcacctcaaatttttcagtacctggcaatatcaacagtgaggcctacaaaacagcaaagatggcagcctgcccctccttctgggagcttcatcccagggacattcatccctgttgctggcttaaacacacctgtaggagggggctggagacgccagttaggagatctctcctagtaaggaggaacgggattggggacctgcttcaaaaarcagtctggccatgttttagtggagcatctgtgctgtgctgggggtccacttcaacccccagtcaccttgcacactccaaagcctgaagactggaacggctaagtcgcccaaacagcaacaatgatggcctgcccctccctctgggagctctatcccagggaggttacaaatct

SEQ ID NO: 939297 - DNA, 606 bp, Homo sapiens
tcttccttcatataaacacaggacaaaggtacgctttacatccattcattttaaattaccaaaatgtctctggttttcatgactgcagactatagagtacagatttcaggtaagctagttttctctcagattgccaaagaaatgcaaaattgcctttactattaaattacatttaaccattcaatctatctgtaacttcatttctttcttacatacacatgtttaaagttatttaaagtaatatctgcacaactgatatggtttggctgtgtcctcacccaaatctcatcttgaattgtagttcccataatcctcacgtgtcatggtttcgsccatgctgttctcatgatagtgagtgagttctcacgagatctgatggctttataagtgtctggcatttcccatgctggcacgcactctctcctgtcaccttgagaagaaggttcctgcttctgctttgccttccgccatgattgtaagttttctgaggcctccccagccatgcagaacagtgagtaaattaaatctcttttctttataaattactcagtctcaggtattcctttattgcagcatgagaacagactaatacaacaactgtataca

SEQ ID NO: 939298 - DNA, 537 bp, Homo sapiens; identical to SEQ ID NO: 935253

SEQ ID NO: 939299 - DNA, 630 bp, Homo sapiens
tgaatataaagcacgcagaaaaacgtgaaaaggcaaggcttgcctagctcccagcctacatctgtctcttgtgctggatgcttcctgccctcaaacatcagacttcaagttctttagttttgggacttggactggctcttcttgctcctcaagcttgcagatagcctattgtgggaccttgtgatcatgtaagttaatacttaataaactcccctatatatatcctataatatcatatatataatcctattacgtaatatatatatgtggatatatatgtgtgtgtgtgtgtatatatatatatatatcctattagttctgtccctctagggaaccctaatacactctctaaactsgttattctgattagcaactcctgtaatttttatcacggttcttatcttctttacattgggttagaacatgctcctttagctcagcaaagttcattattacccaccttctgaagcctacttctgtcagttcatccatttcagcctcatcccagttctatgccctcgctggagaggtgctatgatcacttggaggagagaggcactctggcttttagagttttcaggattttttttgttgatttttttctcatcttcacgagtttagctttaatct

SEQ ID NO: 939300 - DNA, 640 bp, Homo sapiens
gctggacattggagactatggttggaaaggagttcggccaggtatggctgaactccagggaaagaccacctggccactccatcccctttccagctccccatcccactgaaagccacttccactactcaataaaatgctttgcattaaccaccctccaatctgtttgcacaatctcattcctcctggacaccagacaaggacccaggtgcaggtgaaagaggctgtcacactgaccctccactgagctgtttaacactcaggccatccatggacagcaaagctaaaggagtgcactgtaacacacaccccctgggcctcaagggttcgcaggcaacccctacatgctgccacaggctggtatggggttttgctcctgccagcacccaaaggcactctccctggctcctgmacctgctcacctgtatgttccccctcccacaaagggtttgagtgctgtggactgagtaagtgagccatccctttacaactcctgcataggggtcaaagaaattatcctgcttcagtatgatccagcagtcccacttctgggtacatacccaaaggatttgaaatcactatgtcagagatacatctatacttccatgtttattgcagcactattcatagccaacttatagaa

SEQ ID NO: 939301 - DNA, 643 bp, Homo sapiens
agggatttgcccccacccaggactggcaaattagctttactcaacatgccccgagtcaggaaactaaaatacctcttggtctaggtagacactttcactggacggctagaggcctttcccacagggtctgagaagggcaccacagtcatttcttcccttctgtcagacacaattactcagtttggccttcccacctctatacaatccgatagcacaccggcctttattagtcaawccagccaagcagtttttcaggctcttggtatacagtgaaacctttatatcccttacagtcctcagtcttcaggaaaggtagaacggactaatggtcttttaaaaacacacctcaccaagctcagccaccaacttaaaaaggactggacaatatttttacctctttcttttctcagaatttaggcctgtcctcagaatgctacagggtacagcctatttgagctcctgtatggacgcttcctttttattaagacccagtctcattccagacaccagaccaacttggactctgccccaaaaaacttgtcatccctactatcttctgtctagtcatgctcctattcacagttctcaactactcatacatgccctgctcttgtttacactgccggtttacactgtttctcca

SEQ ID NO: 939302 - DNA, 644 bp, Homo sapiens
gagaaaaaaatcaacaaagtaaacagataacccacagatcgggagaaaatatttgcaaactatgcatccaacaaagggctaatagccagaatctacaagcgactcaaacaaatcagcaagaaaaaaattaaataggatgttggctgtgggtttgtcatacatggcttcgaggtttattttattactttcaggtaaattccttctgttcctattttgttgagggtttttatcataaaatgatgctggattttatctaatgcctttgttgtgtttaytgagataatcatatggtttttgtttctgtttatgtgatgttttacatttattgacttgcatatgttaaaccatccctgcatcccagatctgaaacccacttgatcatgttgtgttatcttttagatacactgttggattcggttagctagtatttcgttgaggacttttgcatctgtgttcatcaagcatattgctctgtagttttcttttctctattatgtcctttcccggttttctatcatggtggtactggctttaacaaatgatttagggagaattttctctttctcttttttttgttttgttttgtttttgtttttcttttaatagtttctgtagaattcgtaccaattcttctttgaatgtct

SEQ ID NO: 939303 - DNA, 633 bp, Homo sapiens
gtatttacccaatgcctgtacccccactgtatctaggaagtaactaacttgcttttgattttacaggcttataggcagaagggacttgccttgtctcagatgagactttggaccgtgttcttttgggttaatgctgaaatgagttaagactttccatgactgttgagaaggcatgattggttttgaaatttgaggacatgagatttgggaggtgccagaggcagaatgatgtggtttggttgtgtcctaacccaaatcccatcttgaattttaatccccatgtgtcattggagggacctggtaggaggtaattgaatcatgggagtagtttccccagtgctrttctcgtgatagtgagtgagttatcatgagatctgatggttttataagcatccagcatttcccctgcaggccctcattctctctcccaccaccctctgaagaggtgccttctgccttagttgtaagtttcttgaggcctccccagccatgctaaactgtgagtcaattaagcctctttcctttctaaattacccagtcacaagtatgtcttcatagcagcatgagaatggactaatacagagggattgatcacaaatatgtttgctgttcccctaaaatgatctgaggagg

SEQ ID NO: 939304 - DNA, 597 bp, Homo sapiens
taactaggagccaaatgttaatcccaaagacaacagggaaaatgtctccaaagcatttcaaagctcttcacaagcccctcccatcacaggcctggaggtctaggaggaaaaagtggttatgtgggtcgggcccagggtcccagtgctatgcgcaggacttggtgccctacatcccagctactccagccatggctgaaaggggtacacctagagcttgggctatggtttcagaggattcaagccccaagccttggcagcttctatatggtgttgaccctgctggtacacagaagtgamgaattggggtttgggaacctccgcctacatttcagaggatgtatggaaacgagtggatgcccaggcagaagtttgcttcaggggcagggctctcatatacaacctctgctagggcagcatggaagggaaatgtgggtttggagtccccacagagagtccctactggggcactacctagtggagctgtgagaagagggacatcattctacagaacccagaattgtagattcactgacagcttgcactgtgagcctggaaaagccacagacactcaacacaagcccatggaaacagccagga

SEQ ID NO: 939305 - DNA, 619 bp, Homo sapiens
atttgcctaagtaactaggagccaaatgttaatcccaaagacaacagggaaaatgtctccaaagcatttcaaagctcttcacaagcccctcccatcacaggcctggaggtctaggaggaaaaagtggttatgtgggtcgggcccagggtcccagtgctatgcgcaggacttggtgccctacatcccagctactccagccatggctgaaaggggtacacctagagcttgggctatggtttcagaggattcaagccccaagccttggcagcttctatatggtgttgaccctgctggtacacagaagtgacgaattggggtttgggaacctccgcctacatttcagaggatgtatggaaacgagtggatgcccaggcagaagtttgcttcaggggcagggctctcatatasaacctctgctagggcagcatggaagggaaatgtgggtttggagtccccacagagagtccctactggggcactacctagtggagctgtgagaagagggacatcattctacagaacccagaattgtagattcactgacagcttgcactgtgagcctggaaaagccacagacactcaacacaagcccatggaaacagccaggagcgaggctgcc

SEQ ID NO: 939306 - DNA, 642 bp, Homo sapiens
taggacatgacttgcctgggtgtggcaattcttgtggcctagactccctttcaggtttatttggagccacagaccactttagcctgcagtggagagccttacgacaactcaaactctgacctctgggatcagtcattctcctctggctagggctggtttaaatgcaccctcagtggacaggcatcaactgrgtttaatctagttttgctttcttctataaaggagggcagcatggagttcaatggctcaaaattgctgggtctccctctcagggcacaaaatctctctctaaagaaagctgctgctgctggtgggtggggaaagggtggtgtcagtgattcaagtctcctttttctacttcttcagtgcctctttcagtgatacaaagtaaaagccaaggattatgaatggtcacctgattttttggttcttatgaaggtgcttttttgtgtgtaaatagttgttaaattagtgtccttgcaggggatgataggtggagccttctattctgccatcttgcttcattctcaacctatcctcccatttaaaattattatggtcttcatttttggaaacagatgtgacaggaatcaacagatgttaacgggaaacaaggaattttcctgatgagacaatttggtc

SEQ ID NO: 939307 - DNA, 611 bp, Homo sapiens
cattctggcagttcctcaaagggttaaacataaacttaccatatgacctagtaattccacttctaggtaaatctaagagatataaaaacatttgtccattcaaaaacttctacattaatcttcatagtaacactattcttaatagccaaaaggttgagacaacctcagttttcattaacaatggataaataaaatgtagtatattcatacaataggataacattaatataagaaataaagtattgaagtatgctccaacatggattaatcttgaaaacattatgctaagtgaaaaaagtcagccacaaaggactacatattgtatgattccatttatctgaaacgtccattaaaggcaaatacatacaggcagaagttrgactggtggttgcccagggctggggatttcaggtgcaagaggaaacaactgctaatgaatatggagtttcttgttggggtgtcaagtacgttgtgaaattttttttgccacgatggttgtacaactcagtgaatatatattttaaaaaacactaagtagtaccctgtaagggaataaattgtatgttaagtaaaatatctcattaaaattgtgtcaaaattatagttctagg

SEQ ID NO: 939308 - DNA, 601 bp, Homo sapiens
acacattcattcacgaagcaattcaatatgataattttcatttaagtcaaaagtaaaatattattatagcagttacattcacgattatcccaatttccaacaaatactcctgacagccagctttggtctcattgccataatatcaatctctatattatcatttctagagacagatgcacatgctatggccatgaccataattctcctctttagaatgcagtggctggctttctgtgcagcagattagacactctattaagtcatatagatgataaatgataaaagatagatagatagatagatagayagacagacagacagacagacagatagatggtagatgggggtgggggagtgaggggaaccaggcttttggttatgaacctaatctaacttcctgtgtgacattaatgtaactctctattgaagagtttctgtacttttgactaaatctctcaactagagctataatatttcaaaatttccagctttctgacaaactagttgaataagagaccaggtctaagagcagagatgagctgtagccctatgaggaaaatgatcaaaatttggaaaattgaatgtacttagaatagttgat

SEQ ID NO: 939309 - DNA, 733 bp, Homo sapiens
gcagaatactaaccacagagttttcaaagccatatcaaacataatcaatatgtttgtgaaatcaaagcacaaacattcaaatttctgatatttaatatacaaagcgtatctatacaatttataatttgataaattttacatgcttattctttctctgaatgtattacataattacatgagatatattaactcatatgctacaatatttcatttaagaatagtgtcctcttcaaaatcgatttgggaatacttacagcttgatttagctcgackgaataaatgaaaatcttagaagtttaattgttgctagatccagtgagaaaaactatccggtatggtacctttgcctgctattattcttctctatttatctttattagtattctagagttattaagaatagattataattgaaatacgagaagtcctgggaaaacttcatgggcagccacctaaccactttttttatattctaccgaaactggctttaaggaagaacgatcagagtacatactttaattacaagcagaagaacagagtaactttaactttatgatattcagtatttttttattctaatctttatgtgaccctgaaaatttgaattcaggctgggtgtggtggctcatgcctgtaatcccagcactttaggaagcccaggtgggtggatcccctgaggtcaggaattcaagaccaacctggtcaacatggcgaaaccctgtctcaattaaaa

SEQ ID NO: 939310 - DNA, 733 bp, Homo sapiens
gcagaatactaaccacagagttttcaaagccatatcaaacataatcaatatgtttgtgaaatcaaagcacaaacattcaaatttctgatatttaatatacaaagcgtatctatacaatttataatttgataaattttacatgcttattctttctctgaatgtattacataattacatgagatatattaactcatatgctacaatatttcatttaagaatagtgtcctcttcaaaatcgatttgggaatacttacagcttgatttagctcgacggaataaatgaaaatcttagaagtttaattgttgctagatccagtgagaaaaactatccggtatggtasctttgcctgctattattcttctctatttatctttattagtattctagagttattaagaatagattataattgaaatacgagaagtcctgggaaaacttcatgggcagccacctaaccactttttttatattctaccgaaactggctttaaggaagaacgatcagagtacatactttaattacaagcagaagaacagagtaactttaactttatgatattcagtatttttttattctaatctttatgtgaccctgaaaatttgaattcaggctgggtgtggtggctcatgcctgtaatcccagcactttaggaagcccaggtgggtggatcccctgaggtcaggaattcaagaccaacctggtcaacatggcgaaaccctgtctcaattaaaa

SEQ ID NO: 939311 - DNA, 755 bp, Homo sapiens
taatttgtctcccatggacttgtctctcaatggcttggctgtgggcctactaaaggaaaaaagaaattgtgttttttaccttctctaaaaattgcacattatttgcacttttgaaatctcattttgtttccattcagtggttatcaaaattattaacaaaagccagatgacaatattaatcatattaaagactgtgtttaatttatatttataatgctcatataatgtcataatgttctatgactatactacataggcctcctacagatgatcaaatctttaggtgaaatgtttattttttgtttgtttatgaactgtcaatagccatccatgtgctgttaaagataaaggttttgcagcccggctcagtggctcacgcctataatcccagcactttgggaggctgaggcgggcagatcacgaggtcaagagttcaagaccagcctggccaacatggtgaaaccccatctctactaagaatacaaaaattagctgggcatggtggcaggcgcctgtaatcccagctactcrggaggctgaggcaggagaatctcttgaacctgagaggcggaggttgcagtaagccatgatcgcaccattgcactccagtctaggcaacaagagcaaaactctgtctcagaaaaaaaaaagaaaaagaaaaagataaagttttttataatataggttgttataaagaaaacaaagaagaattatagaaatatctttcttattttgacttcataaaagacagctta

SEQ ID NO: 939312 - DNA, 628 bp, Homo sapiens
ccaggttgtatgttaagagcttatttcaatgctagactgaggcactaattatgactcccattttatacatgatgaaaatgagacttagagtgtatagtacacagaataatgttctctcaaagacatgcctgtcctgatcagcagaatttgtgaatatattactttacatggcaaaatggataytgcaggcatgatttaagttaagggtcttgagatagaaaagttattttgaattatccaggtgtgccaatgttatcacaaaatcccttataaggtaatgagaggaggaagaagatgtgaagagaggagcagagttcagagagaaagagtaagagagagttaaagttgctatgctgctgatcttgaagacagagagtggggctgtgagccaaggaatgtaggtggcctccagaagctggaaaaggcaagggaacagatgttgccctggtgccttcaaaagcaatgcagccctgacaatatctggattttagggctctgacctccacaaacataatacaatgaatttgtattgttttatatttcaaagtttatagtaatttgttacagcaacaataggaaattaattccttaatacagaaggattaaggaattttctcaatgatctcat

SEQ ID NO: 939313 - DNA, 628 bp, Homo sapiens
ccaggttgtatgttaagagcttatttcaatgctagactgaggcactaattatgactcccattttatacatgatgaaaatgagacttagagtgtatagtacacagaataatgttctctcaaagacatgcctgtcctgatcagcagaatttgtgaatatattactttacatggcaaaatggatattgcaggcatgatttaagttaagggtcttgagatagaaaagttattttgaattatccaggtgtgccaatgttatcacaaaatcccttataaggtaatgagaggaggaagaagatgtgaagagaggagcagagttcagagagaaagagtaagagagagttaaagttgctatgctgctgatcttgaagacagagagtggggctgtgagccaaggaatgtaggtggcctccagaagctggaaaaggcaagggaacagatgttgcyctggtgccttcaaaagcaatgcagccctgacaatatctggattttagggctctgacctccacaaacataatacaatgaatttgtattgttttatatttcaaagtttatagtaatttgttacagcaacaataggaaattaattccttaatacagaaggattaaggaattttctcaatgatctcat

SEQ ID NO: 939314 - DNA, 606 bp, Homo sapiens
taaaaagtagaacagaggataccagaggctgggaaagatagaaggaaaggaagagatttgttaaagggtacaaaattacagttagataggaggaatacattctaatattctataccattgtaagatgactataattgacaataatatattactatatattatatagagtcaaatggctaaaacgaggaatgcattgaacattcccaacataaagaaatgacaaatgtttgatataataggtatgctaattaccctaatctgattactatacattatatgtattgaaacaatgttaggtaccttccatgaataagcacaattattattatttgtcaatttaaaaattaaaggaaaaaaaagaaagaataggtaagtgtggtggctcatgtctgtaatccccrcgctttgagaggccacaggagaggatagcttgaggctagcagtttaagaccagtctgcaacatagtgagaccccatctctacaggaaaataaatatattagcttggtgtgatgttgcatgcctgtagtcccagttactctggaggttgagataggaagatcgcttgagcccaggagttgaggctggagtgaactatgatcgcacc

SEQ ID NO: 939315 - DNA, 499 bp, Homo sapiens; identical to SEQ ID NO: 935220

SEQ ID NO: 939316 - DNA, 639 bp, Homo sapiens
cagggcacaaagtccctaggctgcacacagcaggggcaccctgggcccggcccatgaaaccttttttttttccaagcccctgggcctgtgatgataagggctgtctcaaaagtctctgacatgccctggagacatttctcccactgtcctggtgattaacatttggcttcttgtaacttatgcaaatgtctgcaactagattgaatttctcctcagaaaatgggtttttcttttctatctcattgtcaggctgcaaattttctgaacttttatgctctgcttctcttttaaaactgaatacttttaacagcacccaagtcacctcttggatgttttgctgcttagaaatttcttcckccagataccctaaatcatttctctcaagtttaaagttccacaaaactctagggcaggggcaaaatgccaccagtctctttgctaaaacatagcaagagtcacctttattccagtttccaataagttccaaaactgtactcctccataataacaaatctcagttaatggttacttcattcttctggctgcttaagccaaaaaccttggagttatcctttactcaggtttttctcaaaccaaatattcaatcttctaacatattatgtcaactctggttcaaaa

SEQ ID NO: 939317 - DNA, 702 bp, Homo sapiens
tactttaactggagaacgacaatgacattttgtgtcccctggagtcaatgtcagctcagagccagtgtccagtagtccctgaaatgtctgatcatttccatttccccaatccacagttgccctggtagaagctagaggtgtccttgggaaatgattggagaaagaattaacagcataaattgtcagtagtgtagtggggtccttacacaaaaagacccgacctctccttcattcaaggggttataggtctgtaaactggttcaagtactgaaattgattgacgggccatgattccctgtatttgtaattcagattagtcttttgtytactcgatctgaaagttctctgcttatataaattaagtaagaatgcagtaggcttcgtatcaatttaacttctaggaacaccatgattaattagccaatgtcagagctcaacataagtcacactattctgattgcgactttgcatctgctgtccattctggtagctacacccaccttgcctttgatggttgagtgctgccacctggcccctgccacctcgggatctaatttttcccattgcatttaaattttgcagttgaatggctgcagtttccactgttagatctggcatatagagaagagcaatcacagagctcttcaaagatggcaggtccaccctcacaaatctatttcacaaagtattggtcaaggatat

SEQ ID NO: 939318 - DNA, 527 bp, Homo sapiens
tccaaaataatctcctttgactccatgtctcgcatccaggttgcactgattcaagtggattcccatggtctcgggtagctctgcccctgtggctttgcagggtatagcccctctcctggctactttcatgggttgtcattgagtttctgtagcttttctaggcacacggtgcaagcagtctggatctaccattctggggtctagcggayggtggccttcttctcacagctcctctaagcagtgtcccagtaagaactctgtttgaggactcccatcccacatttccctttggcactgccctagcagaggttctccatgagggctctgcccctggaacacaactctacctagacatccaggaatttccatacatcctctgaaatctagacagaggttcccaaactgcatttcttgacctctgtacacctgcaggcccaacatcatgtgtaagccaccaaggcttggggtttgcaccctctgaagccacagcctgagctgtaccttggcctcttctagccatggctgga

SEQ ID NO: 939319 - DNA, 803 bp, Homo sapiens
aagagaaatgttgaaatggatgaatgcaggaaatgcactgaagtgtaaagaggcagggagttcagacaaaaaacattgccagccaggcgcggtggctcacgcctgtaatcccagcactttgggagtccaaggcgggtggatcacaaggtcaggagttcgagactagcctggccaacatagtgaaaccccgtctctactaaaaatacaaaaattagctgggcgtggtggcaggtgcctgtaatagcagctacctgggaggctgaggcaggagaatcrtttgaaccagggaggcaggggttgcagtgagccaagatcatgccattgcactccagcctgggcgacagggtaagactccatctcaaaaaaaaaaatgccatggtccgtttaatattggaggcagaatcagcatagtggtattggtcatggaaaggaatagagagaattaagagacagtcagaggtggaagcataatgtatgaagtgaccaattagatataggagttgagagagggaaggagtcagaaaactttacgggtttccaaattgggcaatgggggaatggaagtacctatagccaacatcttggggagcaactgtgtgagatgagttcaggtgaggttgtacctggaggtcagacatcttggaatattagagaggggtgtctagccaactattcagagttgaagtctagtcttgagaaggaagaggtaaagatgtagatttggaagtcctcggcatataaaggggagttgaatccatgggggtgaatgatgttaactcagaagatgaaaggggcttgaggaa

SEQ ID NO: 939320 - DNA, 665 bp, Homo sapiens
atttacattcccaccagcagtgtgtaagcattctcttgtctccgcagccttgcaagcatctgttatttttttttttactttttattaatagccagtctgactgatgcaagatggtatctcattgtggttttgatctacatttcactgatgattagtgatgtggagcattgtttcatatatttgttggccacttgtatacctcattktaagaagtgtctgtttatgtcctttgcccactttttaatagggttatttattttttgtttgttgaattaaattctttacatattctggatattagacctttgtaggatgcatagtctatgaatattttctcccattctgtaggttgtctgtttattctgttgatagtttattttgctgtgcagaagttctttagtttcattatgtctcacttgtcaatttttgtttttgtggcaattgcttttgaaaacttagtcataaactctttgccaaggcttatgtccacaagagtatttccttgattttcttctaccacgtttatagttttaggtcttacatctaagtctttaatctatcttaagttaatttttgtatatgatgataggcagtggtccagtttcattcttctgcatatggctagctagttatcccagcaccattgattgaatagacagtccttt

SEQ ID NO: 939321 - DNA, 683 bp, Homo sapiens
tgaagtgacaggcttgctttaatcattttcaagaaaatatctccataacacctacgtttgaataactatagtttgtacgtcagttatttttcaaataagagtggtgttttatgaaaaagaggctagttcagaatactcacaacttgcttctgcttcttcagacaaccactgtggtccagtatgtagcagaggtggtttatgcatacttcctgtytggttatataaaatattaaaaagatgtgtactcaagggatgagatttaatagcattaatttttttattgcttcatggaggacataatttaatgaaactgattttttttaactgtacatggatggcggaaaaaatgcagtgactactagttgtgtttaacagcactgtcttttttttttttttttttttgagacagagtctccctctgtcacctaggttgaagtgtagtggtgcaacctcagctcactgcaacatccgcctcccggattcaagtgattctcatgcctcagactcctgagtagctgggactacagacatgcaccatcacgcccggctaatttttgtatttttagtagagacggggtttcgccatgttggccaggctggtcttgaattcctgacccaagtgatctgcccgcctcggcctcccaaagtactgggattacaggcgtgagtcactgagcctggcc

SEQ ID NO: 939322 - DNA, 683 bp, Homo sapiens
tgaagtgacaggcttgctttaatcattttcaagaaaatatctccataacacctacgtttgaataactatagtttgtacgtcagttatttttcaaataagagtggtgttttatgaaaaagaggctagttcagaatactcacaacttgcttctgcttcttcagacaaccactgtggtccagtatgtagcagaggtggtttatgcatacttcctgtctggttatataaaatattaaaaagatgtgtactcaagggatgagatttaatagcattaatttttttattgcttcatggaggacataatttaatgaaactgattttttttaactgtacrtggatggcggaaaaaatgcagtgactactagttgtgtttaacagcactgtcttttttttttttttttttttgagacagagtctccctctgtcacctaggttgaagtgtagtggtgcaacctcagctcactgcaacatccgcctcccggattcaagtgattctcatgcctcagactcctgagtagctgggactacagacatgcaccatcacgcccggctaatttttgtatttttagtagagacggggtttcgccatgttggccaggctggtcttgaattcctgacccaagtgatctgcccgcctcggcctcccaaagtactgggattacaggcgtgagtcactgagcctggcc

SEQ ID NO: 939323 - DNA, 683 bp, Homo sapiens
tgaagtgacaggcttgctttaatcattttcaagaaaatatctccataacacctacgtttgaataactatagtttgtacgtcagttatttttcaaataagagtggtgttttatgaaaaagaggctagttcagaatactcacaacttgcttctgcttcttcagacaaccactgtggtccagtatgtagcagaggtggtttatgcatacttcctgtctggttatataaaatattaaaaagatgtgtactcaagggatgagatttaatagcattaatttttttattgcttcatggaggacataatttaatgaaactgattttttttaactgtacatggatggcggaaaaaatgcagtgactactagttgtgtttaacagcactgtcttttttttttttttttttttgagacagagtctcmctctgtcacctaggttgaagtgtagtggtgcaacctcagctcactgcaacatccgcctcccggattcaagtgattctcatgcctcagactcctgagtagctgggactacagacatgcaccatcacgcccggctaatttttgtatttttagtagagacggggtttcgccatgttggccaggctggtcttgaattcctgacccaagtgatctgcccgcctcggcctcccaaagtactgggattacaggcgtgagtcactgagcctggcc

SEQ ID NO: 939324 - DNA, 691 bp, Homo sapiens
gccctttagtcctaaaaccacaaggaactaaattctgccaacaactacacgagcttggaaatgtatccttccccaatcaagcctcagatgagaccacagctctagccagcaccttcattgcagccttgtgagtccttgagactgtgaacccaactaaactgtgtccagacttctgacctacaaaaactgtagatgataaatgtgtgttgttttcagctactatgtttgtggtgatactgcttcaccacaatmgatagctaatacatcattcatttttgtcattcatttagttagcatctattaagagcatacttgctcataagatagttctatctttattaagaaacctgtatgctgtttttcataatagctgtactaatttacattctcaccaacagtgcacaagggttcccttttctccacatcctctacaacacttgtttttttttttttttgtctttttgataatagccatcctaacagatgtgaggtgatatctcattgtagttttgatctgcatttttctgatgattagtgatattgagtagtttttcctatacctgttggtcatttgtgtgttttatttggagaaatgcctattaaggtattttgcccatttttaaataagattttttttttttttttgctattgagttgtttgagtttcttatatattctggatattcacccc

SEQ ID NO: 939325 - DNA, 691 bp, Homo sapiens
gccctttagtcctaaaaccacaaggaactaaattctgccaacaactacacgagcttggaaatgtatccttccccaatcaagcctcagatgagaccacagctctagccagcaccttcattgcagccttgtgagtccttgagactgtgaacccaactaaactgtgtccagacttctgacctacaaaaactgtagatgataaatgtgtgttgttttcagctactatgtttgtggtgatactgcttcaccacaatagatagctaatacmtcattcatttttgtcattcatttagttagcatctattaagagcatacttgctcataagatagttctatctttattaagaaacctgtatgctgtttttcataatagctgtactaatttacattctcaccaacagtgcacaagggttcccttttctccacatcctctacaacacttgtttttttttttttttgtctttttgataatagccatcctaacagatgtgaggtgatatctcattgtagttttgatctgcatttttctgatgattagtgatattgagtagtttttcctatacctgttggtcatttgtgtgttttatttggagaaatgcctattaaggtattttgcccatttttaaataagattttttttttttttttgctattgagttgtttgagtttcttatatattctggatattcacccc

SEQ ID NO: 939326 - DNA, 691 bp, Homo sapiens
gccctttagtcctaaaaccacaaggaactaaattctgccaacaactacacgagcttggaaatgtatccttccccaatcaagcctcagatgagaccacagctctagccagcaccttcattgcagccttgtgagtccttgagactgtgaacccaactaaactgtgtccagacttctgacctacaaaaactgtagatgataaatgtgtgttgttttcagctactatgtttgtggtgatactgcttcaccacaatagatagctaatacatcattcatttttgtcattcatttagttagcatctattaagmgcatacttgctcataagatagttctatctttattaagaaacctgtatgctgtttttcataatagctgtactaatttacattctcaccaacagtgcacaagggttcccttttctccacatcctctacaacacttgtttttttttttttttgtctttttgataatagccatcctaacagatgtgaggtgatatctcattgtagttttgatctgcatttttctgatgattagtgatattgagtagtttttcctatacctgttggtcatttgtgtgttttatttggagaaatgcctattaaggtattttgcccatttttaaataagattttttttttttttttgctattgagttgtttgagtttcttatatattctggatattcacccc

SEQ ID NO: 939327 - DNA, 691 bp, Homo sapiens
gccctttagtcctaaaaccacaaggaactaaattctgccaacaactacacgagcttggaaatgtatccttccccaatcaagcctcagatgagaccacagctctagccagcaccttcattgcagccttgtgagtccttgagactgtgaacccaactaaactgtgtccagacttctgacctacaaaaactgtagatgataaatgtgtgttgttttcagctactatgtttgtggtgatactgcttcaccacaatagatagctaatacatcattcatttttgtcattcatttagttagcatctattaagagcatacttgctcataagatagttctatctttattaagaaacctgtatgctgtttttcataatagctgtactaatttacattctcaccaacagtgcacaagggttcccttttctccacatcctctacaacacttgtttttttttttttttgtctttttgataatagmcatcctaacagatgtgaggtgatatctcattgtagttttgatctgcatttttctgatgattagtgatattgagtagtttttcctatacctgttggtcatttgtgtgttttatttggagaaatgcctattaaggtattttgcccatttttaaataagattttttttttttttttgctattgagttgtttgagtttcttatatattctggatattcacccc

SEQ ID NO: 939328 - DNA, 640 bp, Homo sapiens
gtgatatctcattgtagttttgatctgcatttttctgatgattagtgatattgagtagtttttcctatacctgttggtcatttgtgtgttttatttggagaaatgcctattaaggtattttgcccatttttaaataagattttttttttttttttgctattgagttgtttgagtttcttatatattctggatattcaccccttgtcatatgtatagtttkcaaatattttctcccattttgtaggttgtttctatactttgttgattgttttctttgctgtgcagaagctctttagtttgatccagtaatcctgttagtgggtatatatctgaagaaaataaaatctgtatgtcaaagagatatcttcactcccatgtttgttgcggcactattcataatagccaagatatggaattaacttcagtgttcaataacagacaaatggaaaaagaaaatgtgatgtatatatacaacggaatactattcagccataaaaaagaataaaatcctgtcattcacaacaacatggatgaatctgaatgaaattaagtgaaataagccagtgacagaaggacaaatattacatgttcccatttatagcagaatgttaaaaagttgatctcatagaagtagtgaata

SEQ ID NO: 939329 - DNA, 767 bp, Homo sapiens
tcagaatttttcaggacatagtaaaattatcttcatccttttggtagcttctatttaaaacacaacttcaaaggtctaatatgactaacttcatttaacaaatctctaaacaaggaaaataaggtttgcagtacccttttgcaatggagaagtatacagaaagatcaaagtatttccaaaagtattatggagaattatttatgtcttctaaaagattatatccctgtgcagtttcctatgataaggacctggattaactttgttctacaaagaaagaaagcctgatgtattatatgcttttccactgcctccttaagtggagccaaagaacaaagcattttccaggaggaatgaagttgtatctgtcctcagagctgcctagagatcaaaagaatctttctagcagttttattggaaatttcagaggcccttaactaatatttagcttcataaatgatgggtgttacagggtgggaaaaaattccsacttgtaaactaatgggtggttgtcaatcataatttttgaaaaatgttacttaactcaaataaatatatttctgatttctccttgttagtatgatggttttcagtttgtttacaggtaatctctcaaaccattgcttatttcttatctgcccaaaggtaaataaattgtggtaaagcagcattctatttttcagatgggaaaaacgtacaaatgaaactctgtgagcctattcaactcctggggctgctataacaaaggtccacaaacagagtgccttaaa

SEQ ID NO: 939330 - DNA, 583 bp, Homo sapiens
agcgggacactttggtatcccatggccagagaggaagcaagagagaaaggagggggatctaagttccttgaaacaaccagctctcatgtgaactaagcaagaactcactcatcatcaagaggatgacgctaagccattcatgagggatctacccccatgacccaatcgcctcccaccaaaccccacctccaacattgggaatcatattgcaacatgagatctggagaggacaaacattcaagccacatcaggaacctgcctgagctgctgggaactcaccctcatctaccctctagccagaagctccatgyggcaggcactgttcacacactctatgtgcattgacctaaatgagttaagtagaatgtttctaacattttagagatgaggaaactgaggcacaaggtattcaggtattgactacgatcatacaattgaaaaattgagaagccaaaattcaaacctatatggattgacctggggcctgtgtgagaggttccacttacatctatgtaaggtttcaattgaagaaagggctcaaaggcaagaaacatgagcaaactgctgctctcagtggcgccag

SEQ ID NO: 939331 - DNA, 692 bp, Homo sapiens
cccttgagaactggaacaagacaaggattcccactttcaccacttctattcaacattcaacatagtactggaagtcctagccagagcaatccgacaagagaaagaaataaagggcatccaaattggtaaaaaggaagtcaaactgttgctgtttgctgatgataygatcatatatgtagaaaaccctaaagactcatcccgaaagctcccaaaactggtaaataaattcagcaaaatttcaggaaacaaaattgtgttagtccattctcacactgctaataaagacatacctgagactggttaatttataaaggaaagaggattaattatttaacagttcagcatggctggggaggcctcaggaaacttacgatcatggtggaaggggaagcaaaaacatctttttttcacatggtggcaggaagaagtgctgaacaaagggggagagacctttataaaaccatcagatcttgtgagaattcactcactatcatgagaacagcatggggtgacagcccctgtgatccaatcacttcccactaggtccctccccaaatgtgggcattaaaattcagataacaattcaagatgagatttgggtggggacagaaaggccatatcaaaaattaacgtacacaaatcagtagctctgctatacaccaacagtgaccaagctgagaatcaaatcatga

SEQ ID NO: 939332 - DNA, 692 bp, Homo sapiens
cccttgagaactggaacaagacaaggattcccactttcaccacttctattcaacattcaacatagtactggaagtcctagccagagcaatccgacaagagaaagaaataaagggcatccaaattggtaaaaaggaagtcaaactgttgctgtttgctgatgatatgatcayatatgtagaaaaccctaaagactcatcccgaaagctcccaaaactggtaaataaattcagcaaaatttcaggaaacaaaattgtgttagtccattctcacactgctaataaagacatacctgagactggttaatttataaaggaaagaggattaattatttaacagttcagcatggctggggaggcctcaggaaacttacgatcatggtggaaggggaagcaaaaacatctttttttcacatggtggcaggaagaagtgctgaacaaagggggagagacctttataaaaccatcagatcttgtgagaattcactcactatcatgagaacagcatggggtgacagcccctgtgatccaatcacttcccactaggtccctccccaaatgtgggcattaaaattcagataacaattcaagatgagatttgggtggggacagaaaggccatatcaaaaattaacgtacacaaatcagtagctctgctatacaccaacagtgaccaagctgagaatcaaatcatga

SEQ ID NO: 939333 - DNA, 782 bp, Homo sapiens
tgactcagggtcctttctaagacaggcaactcatcctcctttggatttttccaatttcctttttccaatcctttccaatcaggattgcagaatactccacaaaggctcaggagtccagcaggtcaaacgtgtgtgtgtgtgtgtttgtgtgtgtgtgtgtgtgtgtgtgtgtgtgtgtagctgaagggcaggggtctgtaaacagtttgctgcatcataataacacatgtttcataaataattggtgcttaacaaatatgtactgtcttgggttatytctctgtcacccgggtgggtggctttaggaagaaattagttgtgggtcaaatgcattttacaatgatggaccccagccaggaaaagaacaatcttcctccccctacgagggcttagagtgagccagggagtggaagaaggtattgcaccctcagtagcagaagtgagagtccctaaagggagatattcaagaatgagtgtgtgtgttgggatgtgtgtgggtgtgtatttgtgtgtaggggtggtgaggaggcattagtctgctgatctgggtcaatatagtgaaaatgaagaacatgggattgggcattgaaggcttgtatgaatgcactagtcctaggaccttgaacaaactccttgtctccatgccacagttttctcatctttctttatagagtttttgggaggactaaatatcctaacacacataaaacacttagcacagaacctggcatatagtaaacactcaataaacctcagtgattactgttattagggctgacccc

SEQ ID NO: 939334 - DNA, 545 bp, Homo sapiens
tgatcgttctggtcttaaagctggaaacttacatttgttttatctgagttccttcttcagaaaatgaccttcaggcctctcaaagaagtatcaaagggccaggcacggtggctcatgcctgtaacctcagcactttcagaggccaaagcagatggatcacttgaggccaggagttcaagaccagcctggccaacatggcgaaaccctgtctctactgaaaatataaaaattagccaggcgtggtggcgcatgcctgtaatcccaactactctggaggctgaggcatgagaatgccttgagcctgggaggcagaggttgcwgtgagctgagatcgcaacattgtatttgtctgggtaacaaagcgagactctgcctccaaaaaaaaaaaaaaaaaaagtatcaaagaactgaaactcagcagatcaccacatccagacaatgagatgtgggggccctcattcatcatgattgcttccttgcccctccctagtttctattttcttacacattgtttggtttctttcatttcttctatgctacataaa

SEQ ID NO: 939335 - DNA, 862 bp, Homo sapiens
aatgtaattgacctcggtgcagcctgacgtcagcatttgtaggagctacctgggtgtcgtgagttggatggtgccccctcccagaagatatgtccacccagaacctccaaatgtgacttgactggaataagggtctttgtagatatcattaacccttttcccacttgcccaagaatactccccagcagcatttaccccaagataactttgctgcaaaataccttgcttttattattattttcaaatcgctctagtgtattgactttggaaacaaaacacatcattccatttatagcattctggttttagtagtggtatttccatttacaaaactatagtaattctcgagtgctgaaaatgtcaaatcctagaaaacgtcgcattcctgcacgtgatgttaacattgttcttgaaaacagttattggccagagattcatttgatgaatccgattcttccgaaacagatgattctgatgatttagacgattctgatgttagttctgtgcagaaataactccaagaacagtttttgtattttattttcacattgaaaatccatcagatttgcttcagcctcaaagagcatgtttatgtaaaaaatgagtactggcagtgagctgcactttattttctaaacggaaaaagggtgaaggtaaagatctctagatgagatcatcctggatgagggcgggccctaaatccaatgactcrtgtcctcataggagacagaaaaggagatcctgcaaacaaggccgtgtgaagacagaggcagagactggagtgatgctggttccatacaaggaaggccaaggatggaggtcatgaggaacaggagggaagcctggaatacatgttcccatg

SEQ ID NO: 939336 - DNA, 555 bp, Homo sapiens
ttttcttcatccattcatccatcaatggacactaagcactaaggttgattccgtatcttggctattgtgaataatgctgcaataaacatatgagtccagatacctcttcaagatactgatttcatttcctttaaatatatgcccagaagtgggattgctggatcatatggtagttctatatttagtatcttgaggaatttccatactgtttttcataatgattgyagcaatctatattcccatcaacagtgtacaagggttccattttctacatggccttaccaacgtttgttatcacttatctttttgataatagatattctagcaggtgtgaggtggtatctcattgtggttttaatttgcattttcctgatgattagtggtgtagagcatcttttcatattcccattggtaattcgtatatcttcctttgagaaatatttattcagatcttttgcccattgttagctgagttatatgtgagttggttttggtttgttgttgttttttgtttttgctattgagctgagttccttgtatattttggatattaaa

SEQ ID NO: 939337 - DNA, 555 bp, Homo sapiens
ttttcttcatccattcatccatcaatggacactaagcactaaggttgattccgtatcttggctattgtgaataatgctgcaataaacatatgagtccagatacctcttcaagatactgatttcatttcctttaaatatatgcccagaagtgggattgctggatcatatggtagttctatatttagtatcttgaggaatttccatactgtttttcataatgattgtagcaatctatattcccatcaacagtgtacaagggttccattttctacatggccttaccaacgtttgttatcacttatctttttgataatagatattctagcaggtgtgaggtggtatctcattgtggttttaatttgcattttcctgatgattagtggtgtagagcatcttttcatatwcccattggtaattcgtatatcttcctttgagaaatatttattcagatcttttgcccattgttagctgagttatatgtgagttggttttggtttgttgttgttttttgtttttgctattgagctgagttccttgtatattttggatattaaa

SEQ ID NO: 939338 - DNA, 579 bp, Homo sapiens
atttgagggaccttgagaaaagaggtattcatccatttatacaggtattacagacacagtctgagactgagtcagatttttggcttgacttcttaacatagctaggaagccaaggggctttttaaaaagtctaatctgagattctttatgaaaatattccagcaaagccaacttagaacaagcctataggtcattcatcattcttactaaacttttgtaaataatcaggtcaaagactaaacttaaacaaaacagtctgtctatgattatctttggttgaaatgggaggattcragagaaaaaattatgtcatagaaaaaaacttcacatatgcctgttattacattctagccttgtccatttgtttctgagctttgtatctggactgaatcacacatttttattttcctccaatatatggctgagacactcagactaatgtttccaatttttcttccacccttctgacttagaattattagaaactaaaactgcctttttcctgaggctgaagctagtcaacttggctttgaaggaatattattgcaacagcttatatttggacaaaactttctacac

SEQ ID NO: 939339 - DNA, 543 bp, Homo sapiens
aggtcccggagagatggatcctcgcgtccaggagcccacattcttggggtgggtagggtgggagacaggtgtagagagaatctcagtacagcgtgatgccttcagtatccaagggagcaaccaggttggggaacactctctttctgccaggtagtgagtacattacctctgtctcacggctgctgggagaggcgagtattatcatccyaccctcctttacctcccggaggagtctggctcaagagaatttagtggtggcactaagtcatccacctagtgactggaggtggagatttgattgccttttggagcagggatagggatttggtggcaaattggacagggcgtggtggggtgtggccatggaaggcgggggtaccttgggaactgtccccgagaatgagcgccctccgtatgcccacagcagaaatgaggagctgttgggcaaaggcggagtcctcaaagattgggcgcattcgtttcagcgttgtcttggaaaacagttcttgcttttctctcctaagataaattggtagtagtgga

SEQ ID NO: 939340 - DNA, 556 bp, Homo sapiens
aaccttcagatctcgtgagaactcactcactatcacaagaacagcatgagggtaaccgcccccatgatttaattacctcccacaaggtccctccccccaacacgtgggggttacaattcggattacaattcaagatgagatttgaatggggacacagagccagaccatataaggccctgtgtagttggcagaataatggtcccccaatatacctgccctctgattcctgacacctgtgaatatggcacattacatggcaaaagggactttgcaggtagaattaaggctgcagaccttaaaatggggaggttagcctggctgattcaggtaggtccaatatactcacatgcactcttaaagatgaaagagggaggcagacaagccatagagaatggaagaggygggagagagtcacagtgcaagagggacttcccgcgggtgctggctgtcaggatgagatgggccatgaaccagggagggcaggcggcctccagaagctgagggcagcccctggccaacagccagcaaggaaacaaggacttcattcctacaaccc

SEQ ID NO: 939341 - DNA, 745 bp, Homo sapiens
gttgtctcctgtgtggctttggtggcggtcaaatggggttctttttattggtgttgccagagtctgctggggagcagagcacacagagcatgctcagaacgtggtggtggaagggatccgctgtttctcatgacttttagcctttacagcggcaccatgtttttacactgagccatgtgttgtctttctcattcatgggactgtttcttgcaagtgtcttcctcttagtgtctgtgtttttggagggaccctgccctygagaacaggggacctgtgctgtgctcctcttgatcccctgggacatttactattagggccgagcacacggggccagcacatactttctgaattaaatttcacaaggattacctggaaagctgtgacgttttccgagtcctaaaacagaggagcactgttggttcctcccttttcctttctaggggcattgtggcagatgtctgttcctgcacttgcagctccatgagaggagaaaagcccccttcctcccagcagggccattgccactctgatgggcattacagggaatcctaaagatggaggatctgtgtgcgttccctctctggagggtagagaccaggcattgcatgccaaagcccatcaggtacgaggtaacacccagtccaacccttgctggcatgaaaccactgtgtaaactcttgtcatgtcagtcagctaaggcttacgacgttttcaactgaaaaatctttgctgcttccctgttgta

SEQ ID NO: 939342 - DNA, 745 bp, Homo sapiens
gttgtctcctgtgtggctttggtggcggtcaaatggggttctttttattggtgttgccagagtctgctggggagcagagcacacagagcatgctcagaacgtggtggtggaagggatccgctgtttctcatgacttttagcctttacagcggcaccatgtttttacactgagccatgtgttgtctttctcattcatgggactgtttcttgcaagtgtcttcctcttagtgtctgtgtttttggagggaccctgcccttgagaacaggggacctgtgctgtgctcctcttgatcccctgggacatttactattagggccgagcacacggggccagcacatactttctgaattaaatttcacaaggattacctggaaagctgtgacgttttccgagtcctaaaacagaggagcactgttggttcctcccttttcctttctaggggyattgtggcagatgtctgttcctgcacttgcagctccatgagaggagaaaagcccccttcctcccagcagggccattgccactctgatgggcattacagggaatcctaaagatggaggatctgtgtgcgttccctctctggagggtagagaccaggcattgcatgccaaagcccatcaggtacgaggtaacacccagtccaacccttgctggcatgaaaccactgtgtaaactcttgtcatgtcagtcagctaaggcttacgacgttttcaactgaaaaatctttgctgcttccctgttgta

SEQ ID NO: 939343 - DNA, 585 bp, Homo sapiens
gcaatggtgtaccagagaagaacaagaaccccttttccaagacccttcatgtacagacaggctgcctgcctactggggcagactttccctactgtccctagcaatgcaattgtatctctgaaacttcccattagtggatagatctgggactcaagacctgctgtttagattctttcatctgggtrttcttccctttgatgttgtattcctcctcttccctaaaaatgggaattcctgagaaccatactatagggattgttattgctctcctgggtctagccacccagtggggctaccagattccaggctggtgttaggaaatgtctacaagggatccagtaatgtgacctgtcttcaagtctcccatctgtagataccagcaccagctctgatggaggtggcaggggagcaatgtggattctgtgagattccttggttgtagataggcttagtgtgttggctttcttgaatgctggttataattgtagtgaacttgtcatgtggatagactcaagacctctggttagccagggtgctgtatgcagaggtgatagctgaggtcacatgactgttttctccttcctg

SEQ ID NO: 939344 - DNA, 585 bp, Homo sapiens
gcaatggtgtaccagagaagaacaagaaccccttttccaagacccttcatgtacagacaggctgcctgcctactggggcagactttccctactgtccctagcaatgcaattgtatctctgaaacttcccattagtggatagatctgggactcaagacctgctgtttagattctttcatctgggtattcttccctttgatgttgtattcctcctcttccctaaaaatgggaattcctgagaaccatactatagggattgttattgctctcctgggtctagccacccagtggggctaccagattccaggctggtgttaggaaatgtctacaagggatccagtaatgtgacctgtcttcaagtctcccatctgtagataccagcaccagctctgatggaggtggcrggggagcaatgtggattctgtgagattccttggttgtagataggcttagtgtgttggctttcttgaatgctggttataattgtagtgaacttgtcatgtggatagactcaagacctctggttagccagggtgctgtatgcagaggtgatagctgaggtcacatgactgttttctccttcctg

SEQ ID NO: 939345 - DNA, 723 bp, Homo sapiens
tgtgccctggaagaagcattccctctctgtcaactaggaccttatacccacagcacctggagtgtgtgggcacgagaagtacaaatttcccaagcagatcgcggagagtaatggggagcagggccactctgtcctcccccttttgttcttgtgaccgcttattggagacaaaccaccatatgatggtccttcatgaagggtttaggctgcctcctggaggatggtggttcatctttgcaggttatcacctccaagctgatgcctcagttgcatcttcaaacggtgattccaagccttcactaaattagcagcttccatgtgtagtgttatatgataggaccaagggattgcatgctcaggtatacactgctacacttcttttattgtaaagtgggtctcttgacccacaatatgcaatgttatgtaggctgtttagttggtggataaaaaagtgtgtgtgtgtgtgtgtgtgtgtgtgtgtgtgtgtgtgtrtagttttataaattttatcagactgtgatgccggctaagctttctaggcaagaaaggcaaaaccatactcagaaaatgtgttggtttccattaagatgcattgctgcatcagaaaggggtctgatgtaattaacttgcaaagacgtgtcttgttagtcttctccagggatgattgtatcttggaggctcagaggtagtctctgttgcttgcaaattggacattgggtagta

SEQ ID NO: 939346 - DNA, 602 bp, Homo sapiens
gaaaaagactgacctcccctgagcaagaagaaattctgctgccagattgcttttatttacttgtttgtttgtttgtttgttttttgagacagggtcttgctctgtcccctaggctggagtgcagtggtgtgatcatggctcactggagcctcctaaccttctgggctaaagcgatcctcccacctcagtcccctgagtagctgggactacaggcatgtgccaccaygtccagctaatttttaattttttttgtagagctggggtcttgctatgttgcccaggctggtgtcaaactcctgagctcaagtgaccttcccaccttagccttccaaagtgctggaattacaggcatgagccaccatgcccggcccagactgcctttcaatacaactctttcctgggtctctactcttgatggccaaccctgcagatcttggacttgccagcccctaaaactgtgaatcaatccttaaaatctgtctctctcattcttttcatagcctattgtttctgtttctctggaggacgttggataatacaactagtttgccaaatagaaaactctgggggttttaactgctggaatggggaagttcacagtg

SEQ ID NO: 939347 - DNA, 580 bp, Homo sapiens
gagaacagacagactgcctcctcaagtgggtccctgacccccgagtagcctaactgggaggcacccaccagtggggcagactgacacctcacacggccaggtactcctctgagacaaaatttccacaggaaagatcaggcagcaacatttgctgttcaccaatatccactgttctgcagcctccgctgctgatacccaggcaaacagggtctggagaggacctccagcaaactccaacagaccttcatctgagggtcctgactgttagaaggaaaactaacaaacagaaaggacatccacaccaaaaccccatctgtacgtcaccatcatcaaagaccaaaggtagataaaaccacaaagatggggaaaaaacagagcagaagaactggaaactctaaaaatcagaatgcctctcctcctccaaagraacgtagctcctcaccagcaacagaacaaagctggatggaagatgattttgatgagttgagagaagaaggcttcagatgatcaaacgactcagagctaaaggaggaagtttgaacccatggcaaagaagttaaaaaccttgaaaaaaattaga

SEQ ID NO: 939348 - DNA, 699 bp, Homo sapiens
tgtcccttgtcccctgtggatctggcagcatgaggatgctctctttctttctagtgttgccaaagccagattcatgaataaagctcttacgaatatttggtggccacataggcaagtctactggggagatgggaaagaaagggaggagtgtatggcaccctaagaaatttggagatgacctgggccctgacagcttcagaagcctccttattccctaacccttaggggtcttcaaaagtggtgagccccccgcccagtccaaccatatctcaccaaattaaatatcaaaccaagttctttttttttttttttttttttttgagacagagtcttgctctgtcacccaggctgsagtaccgtggcacgatctcggctcactgcaagctccgcctcccgggttcacgccattctcctgccttagcctcctgagtagctgggactacaggcacccaccaccacgcctggctaattttttgtatttttagtagagatggggtttcactgtgttagccaggatggtctctatctcctgacctcgtgatctgcctgcctcggcctcccaaagtgctgggattacaggcgtgagccaccgtgcccagcctcaaaccaagttcttagagtgaatacagatttacccacttaaatgctagaggcatacattcagaaaaaaatattattagactgcagtttggaccccaa

SEQ ID NO: 939349 - DNA, 644 bp, Homo sapiens
atcgccccactgcactccagcctggtgacagagcgagactccatctcataaaaaaagaatctaaaattgtccccccccaaagcactctaaaataaataacaaagaaagcactataaaatcactaatgagtatagccaggtccaatatagaaataaacactatataggctaggcttctaaaaaaaagactatgaaattgaagrgaaaatttattaattcaacagagatagcatttttatgaggaattttctagtggcattttagatatgactggttgttacattgtaataagtccaccttttaggaattaatatacatcaatttttaaataataagttgctcaaaatgttagtattgttgaccaaaattaagactgttgaggtttgataatggtttgataaacatttgttcgaaatcaaacgtgacgattgacaaaggtttattgaaaactaaatgtgaagattgactcaggaagtcaacagaagttgggtgtgttccagagtcagctaggagttggaaggcctctataagaaagtttagaaggaagagaactcctcacaccagagctgtcctttttcattggagggtacattacagaagttacaatcattggctacagatggcaacatacaggttaaagtgtcc

SEQ ID NO: 939350 - DNA, 711 bp, Homo sapiens
gcttagttgcatgggagaggccacaagtgcttggcaatgttttcgtgactgagcctctcatctcaggaatgagctgagattccagaaatgctgggatgaaaacaaaccaaccctgagactcccaaattgttctcatattgccacattttttcccacatcttccttcagaaaagcttaagaaagccatgtttgctatctggctcctcttaactctccccataacttacatttccagttttccagataagcatggccatttgtgttaggtcattcttgcattgctataaagaaataccagagactgggtaatttataaagaaaggcggtttcattggctcacagttctgcaggctttacaggaagcctggtgctggcatctactcagcttctaagaaagcctcaagaagcttacactcatgaaggaaggtgagaggggagtaggcaggtcatagggtgaaagcaggaacaagagagacagggagtaggtgggggaggtgccacacacttttagatgaccagatcttaagagaactccctatcatgaagcacagcrccacgccatgaaggatccctcctaatggatggcgccaagccgtgatccaaacgtctcccaccaggccccacctccagcactgggaattacaactggacatgagatttgggcagggaaaaatatccaagctatatcaccactctaaatagtatgtgcac

SEQ ID NO: 939351 - DNA, 711 bp, Homo sapiens
gcttagttgcatgggagaggccacaagtgcttggcaatgttttcgtgactgagcctctcatctcaggaatgagctgagattccagaaatgctgggatgaaaacaaaccaaccctgagactcccaaattgttctcatattgccacattttttcccacatcttccttcagaaaagcttaagaaagccatgtttgctatctggctcctcttaactctccccataacttacatttccagttttccagataagcatggccatttgtgttaggtcattcttgcattgctataaagaaataccagagactgggtaatttataaagaaaggcggtttcattggctcacagttctgcaggctttacaggaagcctggtgctggcatctactcagcttctaagaaagcctcaagaagcttacactcatgaaggaaggtgagaggggagtaggcaggtcatagggtgaaagcaggaacaagagagacagggagtaggtgggggaggtgccacacacttttagatgaccagatcttaagagaactccctatcatgaagcacagcgccacgccatgaaggwtccctcctaatggatggcgccaagccgtgatccaaacgtctcccaccaggccccacctccagcactgggaattacaactggacatgagatttgggcagggaaaaatatccaagctatatcaccactctaaatagtatgtgcac

SEQ ID NO: 939352 - DNA, 641 bp, Homo sapiens
ggtggcagaggtgggagaggtggagaaggtggaaggggaggcaggagaggcaggcacacccagtgtaagttttactgaaaaatatccacatgtaagtggacctgcacggttcaaacccatgttgttgaagggtcaactgtatatcaatatttactgctatggtgtggatgtggtttgtccctgccaaaacccatactaaaattttatccccagtgtggcagtgttgggaggtggggccaagtggaagtttttctggttacggggtaaaatacttcatgaatagattaatgccctccctcaggtgtgcattccccttctctcgggaattaattcctgagagagtatgttgttaaaaagagtctggcttatttggcttttgtctcttgcttctttttttcttttttagayggagtctcactctgtcccccaggctggagtgcagtggtgcgatctcagctcactgcaagctctgcctcccgggttcatgccattctcctgcctcagcctcccaagtagctgggactacaggcgcccaacaccgggcccggctaattttttgtatttttagtagagaccaagatggtctcgatctcctgacctcgtgatctgcccacctcgtcttcccaaagtgttgagatgac

SEQ ID NO: 939353 - DNA, 641 bp, Homo sapiens
ggtggcagaggtgggagaggtggagaaggtggaaggggaggcaggagaggcaggcacacccagtgtaagttttactgaaaaatatccacatgtaagtggacctgcacggttcaaacccatgttgttgaagggtcaactgtatatcaatatttactgctatggtgtggatgtggtttgtccctgccaaaacccatactaaaattttatccccagtgtggcagtgttgggaggtggggccaagtggaagtttttctggttacggggtaaaatacttcatgaatagattaatgccctccctcaggtgtgcattccccttctctcgggaattaattcctgagagagtatgttgttaaaaagagtctggcttatttggcttttgtctcttgcttctttttttcttttttagacggagtctcactctgtcccccaggctggagtgcagtggtgcgatctcagctcactgcaagctctgcctcccgggttcatgccattctccygcctcagcctcccaagtagctgggactacaggcgcccaacaccgggcccggctaattttttgtatttttagtagagaccaagatggtctcgatctcctgacctcgtgatctgcccacctcgtcttcccaaagtgttgagatgac

SEQ ID NO: 939354 - DNA, 827 bp, Homo sapiens
aacaaccctgctgcctgccctgctttccacaatgcccctcccaccaccagaccgggcgcagaggccttctcaaggctgtttcaccagcgctgcccatctcaggtcagaacgaggggagaaagcactttgattgaaaaataaggcatacaacaatgatatccttaattctcacaggggtgtttgatgagaattcaggtagtgtgcaccaatgaacaaagaaatagtgtggggtcagaaagccattttcagtattccctgcataaggctggccctcctgagcccttcccagaccctgggggccgggcaatgcttcagagtccaggacagtccagtcctgaataaaaggagcagacagtggatcctgaattgacttgatttaacttgtctctgattatttcaaataataaattaggaaacttacagaagattctcagtacagcattataatgtgcttaagatacaatcaccaagtggtgatataattgccttagaataggggttggcaaacattgtgtgtaaagggccaaagacttaatattttaggcattgtggatcacacaakaactattttattctgccattttagcatgccatagacaatatgtaaattaatgagtgtggtcgtgttccaataaaactttattgacaaaagcaggctaggggccggatttaattagggccatagtttgcctatccctgtctaggaggatttccacttgcttttgcatccaacgattactgagcttgaattaggagccaggcattgggaagcacactggggatatcggatgagtagcacactgacccacctcctaagaagcttgcag

SEQ ID NO: 939355 - DNA, 461 bp, Homo sapiens
atggacaaattgctagaaaagaacaaatttctggaaccaggtaaaaaagaagtagaaaatctgactagacatatagtaagtaagaagattggattagttatcaagaaactacccacatacagtgtggtgattcctcaaggatctaaaactagaaataccatttgacccagcaatcccattactgggtatatacccaaaggattataaatcattctactataaagaaatgtgcacacgtatgtttattgcagcactatttacaatagcaaagacttggaaccagcccaaatgcccatcaatgatagactagataaagaaaatgtggyacatatataccatggaatactgtgcagccataaaaaaggatgagttcatgtcctttgcagggacatggatgaagctggaaaccatcattctcagcaaactaacacgggaacagaaaaccaaacattgcatgttct

SEQ ID NO: 939356 - DNA, 774 bp, Homo sapiens
acacaggaggggaacatcacacactgggcactgtcgggaggtgggggaaaggcaaaaggggaaagggaagggagagcattaggacaaatacctaatgcatgtggagcttaaaacctaaatgacaggttgataggtgcagcaaaccaccatggcacatgtatatctatgtaacagacctgcaccgtcagcgcatgtatcccagaacttaaagtaaaataaaaaataaaatatataaaaaataattacttccagttccatagtaatcacactaattagaattttccaggcaaaaaaaaaaaaaaaaaaagaaactaccctcaaaaattgcccaggcactgatactgatggccttattggttaattctaccaaacagttgaaaaaccartaaggccaattcttcataaacccttctaaaaattagaagaggagggattgtttcccaactcattccacaggccagtattaacccaataccaaaactagacaaagatatcacaagaaaattacagacagaatctgtagtggatgaatttcataatatgccttataaaagtagatttaaaatactagaaacccaattcagcaatacacaaaagaattgtacatcatgaccaaatagcacttatcctaggaatgcaaggttgtttagcatctgaaaaatcaatgcttacaacacgtattaatacaataaagaatacgatttttgagatcttttcaatagatgtggacaaaacatttgacaaaagccaatgcccttttatgataagactact

SEQ ID NO: 939357 - DNA, 774 bp, Homo sapiens
acacaggaggggaacatcacacactgggcactgtcgggaggtgggggaaaggcaaaaggggaaagggaagggagagcattaggacaaatacctaatgcatgtggagcttaaaacctaaatgacaggttgataggtgcagcaaaccaccatggcacatgtatatctatgtaacagacctgcaccgtcagcgcatgtatcccagaacttaaagtaaaataaaaaataaaatatataaaaaataattacttccagttccatagtaatcacactaattagaattttccaggcaaaaaaaaaaaaaaaaaaagaaactaccctcaaaaattgcccaggcactgatactgatggccttattggttaattctaccaaacagttgaaaaaccaataaggccaattcttcataaacccttctaaaaattagaagaggagggattgtttcccaactcattccacaggccagtattaacccaataccaaaactagacaaagatatcacaagaaaattamagacagaatctgtagtggatgaatttcataatatgccttataaaagtagatttaaaatactagaaacccaattcagcaatacacaaaagaattgtacatcatgaccaaatagcacttatcctaggaatgcaaggttgtttagcatctgaaaaatcaatgcttacaacacgtattaatacaataaagaatacgatttttgagatcttttcaatagatgtggacaaaacatttgacaaaagccaatgcccttttatgataagactact

SEQ ID NO: 939358 - DNA, 805 bp, Homo sapiens
caaaaattgcccaggcactgatactgatggccttattggttaattctaccaaacagttgaaaaaccaataaggccaattcttcataaacccttctaaaaattagaagaggagggattgtttcccaactcattccacaggccagtattaacccaataccaaaactagacaaagatatcacaagaaaattacagacagaatctgtagtggatgaatttcataatatgccttataaaagtagatttaaaatactagaaacccaattcagcaatacacaaaagaattgtacatcatgaccaaatagcacttatcctaggaatgcaaggttgtttagcatctgaaaaatcaatgcttacaacacgtattaatacaataaagaatacgatttttgagatcwtttcaatagatgtggacaaaacatttgacaaaagccaatgcccttttatgataagactactcagcaagtgaggaatagaaaggaactttctcaatctgataaaggaaatctacaaaaccccacagctaacataatatttaatagtgaaagactgaatattttcccctcaagatcaagaacacagtaaggatgtctgctcttaccacttctagtcaaaattgtaaaaaagaaaaaaaattatccaggtaattgggcaagaaaagaaataaaagacattcagattgaaaaggaagaagtaaaactatttattggcaaatgaaatgatcttgtatatagaaaacactgaggaatccactaaaaactattaaaactaacaatttgagcaagattgcaggatacaagatcaattt

SEQ ID NO: 939359 - DNA, 603 bp, Homo sapiens
tgaaccatgcaaagcctagaagcagagctgccatggctttgggaacccaacccttgcacctgtgttccctggatgcaggacgtggagttgaaggagactgctttggaacttgaagatttaatgactgccctgcttggttttgcacttgtgtgggggctgtacatgtaaatagcccctgtctttttggctgatttatcccttttggaatgtgaatgtttaaccaatgcctgtacccccattgtatcttaaaagcaagtaatttgttctgattttccagactcataggtggtaggsactcaactccagatgggactttggacttgggactttggacttttgagtgatgctaaaatgaattcagacttttgggaaactactggctggggatgattatatttctcagtggaagaagaacatgagatttgaggggccaggagtggaatgatgtagtttagaggttgttccctctgaatctcatgttgaattgaatccccagtgttggaggtggggcctggtgaaaggtgatgggttcatgaaggcagatttctcatgaatggtttaatgccaaccccttggtgctgtccttgatagtgagcatgttct

SEQ ID NO: 939360 - DNA, 735 bp, Homo sapiens
tataatgtcttattcattctaatgaacatattttttaacttctaaaagctttgtaaaagctctctgtggttctttttaaaagtctgcctgaatgtagtgtcttcctttttcaaattttcttttcttttcttttctttcttttttttttttttttttttttttttgagacagagtctcactctgttgcccaggctggagtgcagtggtgtgatctcagctcactgcaacctctgcctcctgggttcaagcaattctcctacctcagcctcctgagtagctgggattacaggtgcccaccaccatgcctggctaatttttgtatttttagtagagacagggtttcaccatgttgaccagactggcctttttcaaattttcaactcagcaccagagtgcarggtcttccacgtggtccccaggaatgcgggtgcataacagggttgtttccagccgaccatgatgagtgcagagctctctggggtcccactgtatgcagaaagaggatgcttccttattagattccccacctcgagcaagcccatggggattgattttttgcctctgcaccaagtcaggttcataagttcccgttcgaattttcttacctagacagatgcccttgtggctgagccgggcttcattgctgccttctccttgagcccctgcctggccactgttactggggctggcctctgactacccctcactaacttgtgagtccaccgatacatttaa

SEQ ID NO: 939361 - DNA, 576 bp, Homo sapiens
atcactgcaaaaagaacaggggaaattctggtcacgatagtgcggagtcacctgcctctcacatgcttagaaatcagtcatttcttccgatgttccctctcctgtcttctgagacatagaagggtctgctagttacaactccaataaggtaagtaaatccatatagggacagtggcaaagaccagacactgagccaaggtacgcggctcacatccccacagtgtgaccttgggcaagttacttaacctctcttaaaattgtaccagctcctaggacggttgtgagggtaagyatacaataatgctagttttgtttttcctcttggaatttaaaatcatcttctaatttttaaggaagccatttggaaacctctgggctcctataactgctttaaatttgtagtgttgaaagcaatataaccaatagtttccctaggattagaagaaacgtaagagttactcatttgggagtcaaacatcccaggttatggatgaagaggaagtaactgatgcattttgtcctgcagtgaatttcccaggctatgctgagaagggaagacgcggcccctggcatgca

SEQ ID NO: 939362 - DNA, 702 bp, Homo sapiens
gtttaactacaaaggagccctggctgcccgccccgcccagacgcactgacctgttgttctctgtggctgctgatggcccatccccaaccactggtgactcttccctggggccccaagctcagcccctaaccccctgttgctggaagtcagggaccccaaacagagagaccggctgaaaccatggcagaagaacgtggattgtgaagattttatggacatttattagttccccaaattaatacttttgtaatttcttatgcctgtctttactgcaatctctaaacataaattgtaaagatttcatagacacttatcacttccccagtcaatacccttgtgatttcctatgcctgtctttactttaatctcttaatcctgtcagttgaggagggtgtatatcrttccaggaccctgtaataattgtgttaactacaaaaattgtacagcatgtgtgtttgagcagtatgaaatgtgggcaccttgaaaaaagaacaggataacagcaattgttcagggaataagagagataaccttaaactctaaccgccggtgagccaggaagaacagagccatatttctcttctttcaaaagcaaatgggagaaatatcgctgaattctttttctcagcatgggatatccctgagaaagagaatgggcacctaggggtaggtctctgaactggcccccccggggcgtacctg

SEQ ID NO: 939363 - DNA, 592 bp, Homo sapiens
cctgcactcaccagggcccaggaagcccccctgccccgacaggctgagaagtgcctgctcccactgcttggtctgtccccactcccagcacctgctccagtttcagatcaaagttgtggccgagctgggacactgtcacaacctggctgggtgtgtgtttgctcagggcagtgctgacatgccagcaccctgctgcctcggcacccccagactttgggtgctgacaagcatgagagggaggccaacgcggggctgagggaagcacagcgcaggccttgcagccgcccctcggcaggaacactctggatgccatgcacactgtggatggcaggataatggtggccggaggcagacaagctcctgggaagaaaggggagggtccctggtgaaactccaccttcagcttacagaggrcttaaggcctggggcccaggctgtcagttccacagaccggagtgagaacttacggtgcttttccagggctcacccgtgactgcccatgcaccaatcagcacacactttcctctgaagcccataaaaacccccggactcagccagacttgggcagaagacaggatgacctgcttatgga

SEQ ID NO: 939364 - DNA, 617 bp, Homo sapiens
tgagttcttgttcagttagctcactcaagagcaggttgtttaaaagagtccgggaccccccccttgccctcccctcctcccactcttgctatgtgacgctggctccccgtcaccttccaccatgtgtggaagcttcctgaggcctcaccaggagcagatgctggcaccatgcttcctgtacagcctgcagaaccgtgagccaattacacctattttctttatgatacccagtctctgtgttcctttatagcaacacaaaaacagcccycctcatacgtacacacacgtacagacaccaccaagacatatgcacagatacagagacgtaaacatacagacatacacatgacacagagatacagagacatacacatgcatgctcccgtgcagacggcaccccatatgcaggaagacgggcgcggaccggcctgccatgccccagcatgtgcagtgaactggcctgcacatggcctcagccagtttttcctcccacatttccagacgtctccccagtctcaccttgctgaatgacaggtgcttctgctcccatctgaatctgcttggtagaggtgcggtgcgccctgtaaatgccttacctggcttgctggccagtgggt

SEQ ID NO: 939365 - DNA, 637 bp, Homo sapiens
gacggtgacgcaggtaaccactgcgtggggagcagaggaaacgacgcgtgggaaactcacccagatgaaaaacagagcagccccgggggggcagggcggggcgccaggagggctcgttgatgtccagagttctgcttctctgccaggcgttgtggtaacttgctagccatccccttctgctctgtgcacttctctgtatgtaacactgtaacgaaagttaaagaataaagagtgcagacaggccggccgcggtggctcacgcctgtaatcccagcactttggraggccgaggcgggcggatcacgaggtcaggagatcaagaccatcctggctaacacggtgaaaccccgtctctactaaaaatacaaaaaattagctgggcgtggttgcaggcacctgtcgtcccagctactcgggaggctgaggcaggagaatggcgtgaacccgggaggcggagcttgcagtgagccgagatcgcaccactgcactccggcctgggggacagagcgagagtctgtctcaaaaaaaaaaaaaaatgcagacaaagacagcgccaccaccacctctacggctgcagaccttccacggatttgcgaaagccatggagcttcatggaacaccacagagcctcccccag

SEQ ID NO: 939366 - DNA, 679 bp, Homo sapiens
ggccggccgcggtggctcacgcctgtaatcccagcactttggaaggccgaggcgggcggatcacgaggtcaggagatcaagaccatcctggctaacacggtgaaaccccgtctctactaaaaatacaaaaaattagctgggcgtggttgcaggcacctgtcgtcccagctactcgggaggctgaggcaggagaatggcgtgaacccgggaggcggagcttgcagtgagccgagatcgcaccactgcactccggcctgggggacagagcgagagtctgtctcaaaaaaaaaaaaaaatgcagacaaagacagcgccaccaccacctcyacggctgcagaccttccacggatttgcgaaagccatggagcttcatggaacaccacagagcctcccccagtcaccccactcctgcactgtcccgaaatgaggacaatgacataacagagcctctcccccagtcaccccactcctgcactgtcccgaaatgaggacaatgcgtgtattccaaagttactcatactaacgggcaccactgcagaacacacgtgtctggcatttctcatgacacggtctgcacatcccccacctcccagcagccccagtcggcagaccccgtccccgctggcctccccagtcccttctgcccctcaggacttgcactgccgagtctgtcccaggc

SEQ ID NO: 939367 - DNA, 645 bp, Homo sapiens
tatacagtggtccaattccaagacaaagtgccttgaattggcttaggtcagcaaactgcagaagaaacaggatatcctaggcccctgctcggatagccaacacctgcttcttggcctcccccttccccccttaatttttaaaagttattttcactagtaaagaattctgaatcaggccacgagtggcagctcacgcctgtaatcccagcactttgggaggccgaggtgggcagattatgaagtcaggagattgaggctgccatggctaacatggtgaaaccccatccctactaaaaatacaaaaaattagctgggcatggtggcaggtgcttgtagtcccagctactcaggaggctgaggcatgagaatggcatgaacccgggaggcagagcttgcagtgagcygagattgcgccactgcactccagcccggccgacagagcgagactccgtctaaaaaaaaaaaaaaaaatctgaatcagcacttttttttcctttcagtacttgaaagccatccctccatcatcatccaccttgcatagtgtctgcagatagttctgctgtgcttcttatcttggttcttctcgcgtctcatgtgtccctctccctcccttctcctcccagttcctttagagagtttctgcat

SEQ ID NO: 939368 - DNA, 645 bp, Homo sapiens
tatacagtggtccaattccaagacaaagtgccttgaattggcttaggtcagcaaactgcagaagaaacaggatatcctaggcccctgctcggatagccaacacctgcttcttggcctcccccttccccccttaatttttaaaagttattttcactagtaaagaattctgaatcaggccacgagtggcagctcacgcctgtaatcccagcactttgggaggccgaggtgggcagattatgaagtcaggagattgaggctgccatggctaacatggtgaaaccccatccctactaaaaatacaaaaaattagctgggcatggtggcaggtgcttgtagtcccagctactcaggaggctgaggcatgagaatggcatgaacccgggaggcagagcttgcagtgagctgagattgcgccactgcactccagcccggccgacasagcgagactccgtctaaaaaaaaaaaaaaaaatctgaatcagcacttttttttcctttcagtacttgaaagccatccctccatcatcatccaccttgcatagtgtctgcagatagttctgctgtgcttcttatcttggttcttctcgcgtctcatgtgtccctctccctcccttctcctcccagttcctttagagagtttctgcat

SEQ ID NO: 939369 - DNA, 545 bp, Homo sapiens
ctggctaatttttgtatttttagtagagatggggtttcaccacgtttcccaggctggtctcgaactcctgatctcgggtaatctgcctgctttggcctcccaaagtgctgggattataggtgtgaggcaccgcgcctgstcttaagtatcattttgaagagttatgaaaaccacctaagccacaaataattttaagtcattattgttagtaagagaattacatatattgctacgttcgttccaactcatggtatgttcctgttgtttagtaattgggaaacctgagacatgatgtgaagtaattcacctgcaatttgggggtgcctgcacagcaggaatgttctggcaccatgactgctcctaggaacacagaataatagtcattaaaatgctgtaaatagcagtgtgtcctgaattcacccacaccctctgaagaaattattagaacctgtctcctgcctccttccatgagagtccgtgggtcccctagcggcgtgcagcctgctgggatggaaagggcccgtgctgcaactctgcataaagaa

SEQ ID NO: 939370 - DNA, 603 bp, Homo sapiens
aatgggctaatagagcaaattggtaccacagagagttgagtgctgcaataaaaaaacctgaaaatctggaaccaactttggaactggataacaggcagagattggaacacgttggagggctcagaagaagacaggaagatgtggaaaagttgggaactttctaagagacttgttgaatggctttgaccaaaatgttgataatgatatggacaaagaaatcccggctgaagtggtctcagatggagatgagaaacttgttgggaactggaatgaaggtgactcttgctatgctgtagcaaatagactggtggcattttgtcccttccctagagatctgtgaaactttgaacttgagagagctaatttagcatccctggtagaagaaatttctaagcagcgaagtattcaagaggtaacttgagggctcttgaaagcattaagttttatgcattcacaaagatatggytcgcaactggaacttatatctaaaagggaagcagagcataagttccaaaacttcacagctaacaatgcaatagaaaagaaaaacccattttctgaggagaaattcaagctggctacagaaatttacgtaagtaaaga

SEQ ID NO: 939371 - DNA, 609 bp, Homo sapiens
gtgggactgtaccctacaaagccataggggaagagctgcccaagaccataggagcccacttcttgcatcagtgtgacctggatatgaaacatggaatcaaaggaaatcattttggagctttaagatttaatcactgccctgctgggtttcagacttgcatggggcctgtagcccctttgttttggccaatttctcccccttgaaatgggtatattttcccaatgcctgtactcctattttatctaggaagtagctaacttgcttttgattttacaggctcacaggcagaaggaacttgccatgtctcaggtgagactttggacttggacttttcggttaatgctggaataaagtaagacttgggggactgttaggaaggcatgattgatsttgaaatgtgaaaaggacatgagatttggcaggggccaggggcaaaatgatatggttaggctttacggccccatccaaatctcatcatgaaatgtaatccccataatccccttgtgtcaagggagagaccaggtggaggtaattgaatgggggcagttttccccatgctgttctcatgatagtgagtgagttctcatgagagctgtcggttttataagg

SEQ ID NO: 939372 - DNA, 659 bp, Homo sapiens
tgagccctggattgcttctctatcccttgtggtaccctttacctgaacctttgtcaatacagcaaattcttgttattggaggtagatgtgtactacaaaatcattacaaacactgaattaacaaataccaaatcatcactcctagaggaaatacaaggttaggtacctgtgagcctctggtcaaatattttcattaaccaattgatacataaccttgctttctatgtgtttcttacacatatttaatctatatcattgactcattaacattgaacttacagccaacagcactataactcatgcctgaatgaagcttctccaacacacctattttctccttaaggcacatcatagcctttgaggactaaactctgactttttttttttatcttgcagaaaytcctatctaaggagtctggggaatcatgtcctacaaaccacaaattctcatcagatgggttttatttaaccttgtatatcgtgatttattttccaatgtaactctggaataacaagaaagaaaatcaaaatgttctattccaaaacatgtttctctgccatatcttaaacttgccctgcaaagtgtcttgtgggaaaatctacattctatagagaatcccctttgttttccttccttcctttccaaatccaggagataa

SEQ ID NO: 939373 - DNA, 659 bp, Homo sapiens
tgagccctggattgcttctctatcccttgtggtaccctttacctgaacctttgtcaatacagcaaattcttgttattggaggtagatgtgtactacaaaatcattacaaacactgaattaacaaataccaaatcatcactcctagaggaaatacaaggttaggtacctgtgagcctctggtcaaatattttcattaaccaattgatacataaccttgctttctatgtgtttcttacacatatttaatctatatcattgactcattaacattgaacttacagccaacagcactataactcatgcctgaatgaagcttctccaacacacctattttctccttaaggcacatcatagcctttgaggactaaactctgactttttttttttatcttgcagaaactcctatctaaggagtctggggaatcatgtcctacaaacsacaaattctcatcagatgggttttatttaaccttgtatatcgtgatttattttccaatgtaactctggaataacaagaaagaaaatcaaaatgttctattccaaaacatgtttctctgccatatcttaaacttgccctgcaaagtgtcttgtgggaaaatctacattctatagagaatcccctttgttttccttccttcctttccaaatccaggagataa

SEQ ID NO: 939374 - DNA, 573 bp, Homo sapiens
tcatttcattcatttcatcttccatcactgataccctttcttccagttgatcgcatcagctcctgaggcttctgcattcttcacgtagttctcgagtcttggctttcagctccattagctcctttaagcacttctctgtattggttattccagttatacattcgtctaaatttttttcaaagttttcaacttctttgcctttggtttgaatttcctcctgtagctcggagtactttgatcctctgaagccttcttctctcagctcgtcaaagwcattctccgtccagttttgttccgttgctggtgaggagctgtgttcctttggaggaggagaggcgctctggtttttagagtttccagtttttctactctgttttttccccatctttgtggttttatctacttttggtctttgatgatggtgatgtacagatgggtttttggtgtggatgtcctttctgtttgttagttttccttctaacagacaggaccctcagctgcaggtctgttggagtttgctagaggtccactccagaccctgtttgcctgggtaccagcagcggtggctgcaga

SEQ ID NO: 939375 - DNA, 699 bp, Homo sapiens
gaaggcagagtctaaaaaataccttgaacaccaatcctaggttttacaatagtaattttatccacaggagcaattggggaggttagcaatattatggcctctggctgcatgacttctgagccataatttctaatcttatgattaatttgttctacaaaagtcgaattcccaagcaaggagggtgtttgttttgggaaggggctgttatcatctttgtttcaaagttaaactataactttcacggcttaagcccatgaaagaacaaaggctacttagaggtttgaagcaagatggagttggtcaggtcagatatgtttcaccatcaagatttttgaaaggcagtttcatgaccctccagtctccagagagttgggatattcaccgggcccttccaaagcttagatcaaacaccaacttccaaacatttctcttattcctgtttagattaaatgtattaaataagctatggagaaatagtttgacttcttaagtgccactgaaagggggatggccatgtcttagataaggggataggatcttgtgggtgctaggaaaacatmgctcccttatagatgataactgtttctagggtttgtggaacaattcactgtcaatcttccaagtgtgaacctgctattataagtctaatcaccctgggcatcctatatatttttattgtttaatcaatttctgaaatga

SEQ ID NO: 939376 - DNA, 462 bp, Homo sapiens
aactagaaaaccaagaacaaacaaacctcagagctagcagaagacaataaataacaaacctcagagcagaactgaaggagacagagacataaaaagcccttcaaaaaatcaacaaatataggagctggtttttttcaataaattgataaaataaatagaccattaagtgaggctwaaaaagaaaagagagacaattcaaataaacacaataagaaataataagggggataccaccactgaccccacagaaataaaaacaaccatcagataatactataaacacctctatacaagtaaactggaaaatctagaagaaatagatacattcctggacacatacaccctcccaagatggaaccaggaagaacttgaatccctgaatagactaacaacaagttgtgaatttgaggcagtaatacatagcctaccaaccaaaaaaagcccacgtgcagttggatttac

SEQ ID NO: 939377 - DNA, 519 bp, Homo sapiens
ttactgcactaaatgctcacatcaaaaagctagaaagagctcaaattgacaccctaacatcataactaaaagaactagaaaaccaagaacaaacaaacctcagagctagcagaagacaataaataacaaacctcagagcagaactgaaggagacagagacataaaaagcccttcaaaaaatcaacaaatataggagctggtttttttcaataaattgataaaataaatagaccattaagtgaggcttaaaaagaaaagagagacaattcaaataaacacaataagaaataataaggggrataccaccactgaccccacagaaataaaaacaaccatcagataatactataaacacctctatacaagtaaactggaaaatctagaagaaatagatacattcctggacacatacaccctcccaagatggaaccaggaagaacttgaatccctgaatagactaacaacaagttgtgaatttgaggcagtaatacatagcctaccaaccaaaaaaagcccacg

SEQ ID NO: 939378 - DNA, 519 bp, Homo sapiens
ttactgcactaaatgctcacatcaaaaagctagaaagagctcaaattgacaccctaacatcataactaaaagaactagaaaaccaagaacaaacaaacctcagagctagcagaagacaataaataacaaacctcagagcagaactgaaggagacagagacataaaaagcccttcaaaaaatcaacaaatataggagctggtttttttcaataaattgataaaataaatagaccattaagtgaggcttaaaaagaaaagagagacaattcaaataaacacaataagaaataataagggggataccaccacygaccccacagaaataaaaacaaccatcagataatactataaacacctctatacaagtaaactggaaaatctagaagaaatagatacattcctggacacatacaccctcccaagatggaaccaggaagaacttgaatccctgaatagactaacaacaagttgtgaatttgaggcagtaatacatagcctaccaaccaaaaaaagcccacg

SEQ ID NO: 939379 - DNA, 583 bp, Homo sapiens
tgagagaactgcgtgagagactctctctgagaaggagtgcttaggaaagcccaaagtcaggatagaagacaaaagcaaggagaacagaggaactggaaacctatggcaactacagccacattacagcacctatttacagcaaacatgaaaaacaaacagccaactcttaacaagaataacataaatcctcacactaaaagacctgtttatctcagttcttaatagtcaacaccacatatccagcgttccacaaaaaaaaatacaagacatgtcaaaaggcaacaaaaaatacaagctaaagaaacaaacacaaaaaaatcacacccagactcagatatagcacagatactggaattmtcaaacagaaaatgtaaaataactatgattaatatgttaagaaatagagtagaaaaagtagacaacctataagaacagatgggtaaaataagcaaagagatggaaactctaaaaagcaagcaaacaaaacaatgcaaaaaggaaatggccaaaataaaaaacattgtaacagatacaagaaatgatttgatgggcttcatagtagattcaacacagatgaggaaag

SEQ ID NO: 939380 - DNA, 560 bp, Homo sapiens
agcctggctgctaaggctgtatgacccagcagagatattggtggtaaaaaataaaaataagttctgttccaagatggccgaataggaacagctctggtctgcagtgcagctcccagcatgatcgacgcagaagatgggtgatttctgcatttccaactgaggtacctggttcctctcattgggactggttggacagtgggtgcagcccatggagggcgagccaaagcagggcggggcattgcctcacccaggaaacacaaggggtcaggggatttccctttcctcgtcaagggaagccatgacagactacctggaaaaacagggcacttccgcccaaatactgtgcttttcccacagtcttagcaaccagcagaccaggagattctctcccgtgcctggctcrgtgggtaccacacctgcggagccttgctcactactagtgcagcagtctgagatcaacctgtgaggaagcagcctgacagggggaggggcatccgccattgctgaggcttgagtaggtaaacaaagcagccgggaagcttgaactgggcggagcccac

SEQ ID NO: 939381 - DNA, 572 bp, Homo sapiens
agaccaaggagccccagtcccacctgtgacctcaggcagtcacctgacacccctgagcctcagttttctcatctgttcagtggggatggtatattctccttacagggctgtggaaaggacaacataatcttacacagaaaaagtagtactaagctaacattggttgagtgcctattacattctacacaacgcgctaagtactttgcatattttgtctcattgaatcctgatgacaaccctgtgaagtaggaactcttactatcccccatgctatggatgyagaagctggggctcagagcagttaagtacctggccaaaggccagaaagtcaactagaattgatgtgtccattttcattcattcatcattgattgagtacccgttccatgccaggcaatgagaagcaaatcacaaatagtccctgccctcatggcactgacactcttgttactgcaaagtacaaggtgcagagtaaatggaagtcaaatcagattccaacttctactcaactcccagtaggccccagactaaactctccagaacaatggtactgctcctgtggttttgcctgg

SEQ ID NO: 939382 - DNA, 572 bp, Homo sapiens
agaccaaggagccccagtcccacctgtgacctcaggcagtcacctgacacccctgagcctcagttttctcatctgttcagtggggatggtatattctccttacagggctgtggaaaggacaacataatcttacacagaaaaagtagtactaagctaacattggttgagtgcctattacattctacacaacgcgctaagtactttgcatattttgtctcattgaatcctgatgacaaccctgtgaagtaggaactcttactatcccccatgctatggatgtagaarctggggctcagagcagttaagtacctggccaaaggccagaaagtcaactagaattgatgtgtccattttcattcattcatcattgattgagtacccgttccatgccaggcaatgagaagcaaatcacaaatagtccctgccctcatggcactgacactcttgttactgcaaagtacaaggtgcagagtaaatggaagtcaaatcagattccaacttctactcaactcccagtaggccccagactaaactctccagaacaatggtactgctcctgtggttttgcctgg

SEQ ID NO: 939383 - DNA, 754 bp, Homo sapiens
ccatgtgtggggagcattaagaaaaataggccacctgtataagactagtggcaaaaatctgactcggtgctacttctctgtttgtcctttacttaaaaggagaaccataattaaaatgatccagaaaagagaaccaagcaggagactgagttgcttggggaaaggaccatgttgcattgatttttacataaccaatgccagcagtgcatcgggtacacaacaggttctcaatwaattgttaaatggataagttgatagaataaaaaacaaggtctcttcccactgctgcatgcaaaaaagctcagagtgaattcttatttgcaaagatgagagatttttagtcttctgatggctgtttcctcctctctgttttctttgccacagtttaggggcaaagaaaagtttctacctctctgaaatggtaggagaaacccttggggcttaggtaacaaatcaggctctctctttcacatgttgtgagaaaagaaatatttaaccatcagcaccaacaatgtcatttgcataagggagtgacttcctggctgagagatggtcagaataacatagagcctagagtgaaggcagtcaagtttgtgagcctagggctctgcttctggtgtctgcttcatggctgtgtgatcttgggcaagtttcctacattttctgcttctcagttttgtcatccataaaatgataacaacagtacctgcctcaaatagtgtgtggaagaggcttaaacaagctaatgtaagtc

SEQ ID NO: 939384 - DNA, 644 bp, Homo sapiens
gaaatttgcataagcaacaaggacccaaatgttcatccccaagacaatggggaaaatatctccaggacatgtcagagacctttgtggcagtccctcccatcacaggccaggaggcctaaaaggaaaaaatggtttcctgggctggattcagaggccccctgctgtgtgccactttgagacttgatgccctgcatcccagccactttagccatggctaaaaggggccaaggtacagcgtggactgtggctacagagggcgcaagccccaaaccttggcagtttcacatggtgttgagtctgtgggtgcacagaagtcaagaactgaggtttgggaacctctgcctagatttcagaggatgtatggaaacacctagatgtccaggcagcattttgctgtggggtgcrgggggccctcatggaaaacctctgctaggacagtgcagaagggaaatgtagggttgaagcccccacagagtccccactcgggtactgcctactggagctgtgagaagtaggccaccgtcctctggacaccagaatggtagatacaccaacagcttgaccatgcacacaggaaggccacagacaatgccagctcatgaaagcaaccaggaggggggatatgtcctgcaaagccacagggg

SEQ ID NO: 939385 - DNA, 503 bp, Homo sapiens
gatagacttgagtatccacggttctggagtgcaagggaagagaaaggaaaggtgcattcagacaaaaaaaatgtgtacagaacacaccagggatatcagaagaggctgctcatggcaaggcgtggtggctcatacctgtaatcccagcagtatgggaggccraagtgggtggatcacctgagctcaggagttcaggaccagcgtgggcagcaaggcgaaaccccatctctaccaaaaatacaacaaaattagctaggcatagtggcacatggctgtggttccagttacttgcgaggctgaggtgagaggattgcttgagcctgggaggcagaggttgcagtgagcccagatcgtgcctctgcactccagcctgggcaacaaagtgagaccccgtctcaaaacagaacaaaacaaaacaaaaaaagagactgatcaagaccagactcggctcctaggccttgaactccagtcccacctcacaccctaaggttcctaaagaatca

SEQ ID NO: 939386 - DNA, 503 bp, Homo sapiens
gatagacttgagtatccacggttctggagtgcaagggaagagaaaggaaaggtgcattcagacaaaaaaaatgtgtacagaacacaccagggatatcagaagaggctgctcatggcaaggcgtggtggctcatacctgtaatcccagcagtatgggaggccaargtgggtggatcacctgagctcaggagttcaggaccagcgtgggcagcaaggcgaaaccccatctctaccaaaaatacaacaaaattagctaggcatagtggcacatggctgtggttccagttacttgcgaggctgaggtgagaggattgcttgagcctgggaggcagaggttgcagtgagcccagatcgtgcctctgcactccagcctgggcaacaaagtgagaccccgtctcaaaacagaacaaaacaaaacaaaaaaagagactgatcaagaccagactcggctcctaggccttgaactccagtcccacctcacaccctaaggttcctaaagaatca

SEQ ID NO: 939387 - DNA, 408 bp, Homo sapiens
ggtagaaatgtggtgttgtcatgtagcccaggtttgtgtcaaactcctgagctcaagtgatctgcctgcttcaccttccggaagtgctgagattacaggtgtgtgccaccatgcccgactgatgtaaccatttggaaagcagccactgagcccagccttcaccagtataccaatatttgttaatatcgttttattttttacaattttcccatttttaaaaacatattcttttacctgtattattgattataataaacaacraataattttgtagtagagtccccccaaaaagtatttattgtttaattgaagtagtttttttttttaacctggatatatattttttcattttcactttatttttagtgtttatttttaaaaattatttacatatatttttattttaat

SEQ ID NO: 939388 - DNA, 715 bp, Homo sapiens
gcagaacagttgtctaggaaagtcagtcttgcggttgtgatacagtctagcttccctgcatgagcatgagccactggtatgaaatgtttgtggaaccaatcataaaatatatccctggcgacctatgcctttttgttagcataataattgatggataagaaattcccttcttgaaaacagagaggatgcaagctttgcctaccaggcaagtttacacttaatrcctgcctgctgcattagtgcaccccagcacagttattctgtccttggcatccttagaccaggggtcatcttgccacctgtagtcggtgtctttctggggcaataatgtcaaaacagtgatgtttcctcagcattatagactttttatggtgtcagatttttatcagcaatgaccttcgcaaactcatcaacgatttcttcactgcttcatgatcagatgatttatcaccacaaagctgtaaaaatcaaatatcatgtcttttcttaaatgtctgcaaccagcctgttcagtgttcacagttcccttcaattttcagttcatcatgatagaacctcgcttgtttcataatcagaatatcattaagtggcatgtgttcactgccatgccgacagatgcaatcatctaatacacaattgagatcttcatttttagctttacacagtattttttaaaaagttttcattaacttctgtttaccgctttcagcataga

SEQ ID NO: 939389 - DNA, 730 bp, Homo sapiens
acaggtccctggtgaaatgccatcttcaagccaggaaggtgactgcctaaagcctgggggcagggttgccagttctgggtcggggagttaaagtccggagtgaaaactcaaggtgctttttccaggcctgcccaaggacacccacggaccaatcagcacacacttcttccttccagagcttataaagaccgcagactcatctagattcacacagacgttgggacaacctgcctgtggaaaggagctacccactgtaggtctcctctccactgagagctagactctcaccaggacaacctgcctatggaaaggagctacccactgtagatctcctctccactgagagctagactctcaccaggacgacctgcctatggaaaggagctacccactgcaggtctcctgagaactgttctgttgctcagtgaaggtactctctgccatgctcaacctccagttgtctgcaaacctcattsttcctggatgcggcacaagaacttggaacccactgaatggcgggactgaaagagctgtaacacaaacagggctgaaacatgctccgccacttgccatgttgcgggtgacgagaaggagagaagagctggggacctttggggagcccagacccaggggctccttgagccaaggctgtgacaccctctttgggactctgtggttcctggcatctccaggcttcaagatgccaccgcggtcctctcgtagagatgtg

SEQ ID NO: 939390 - DNA, 832 bp, Homo sapiens; identical to SEQ ID NO: 938844

SEQ ID NO: 939391 - DNA, 754 bp, Homo sapiens
ttaacttctgtttaccgctttcagcatagaacttcaacagtttatccttctgtttcggcaagtcctgtatggtcatttccacaccacgctcttctgtaagatgtttcacactggcactgctgtgcagtttctccagcagcttgactttctgtgctagagacaaacataagtgcttcctctttgtttagtcactgttacccataggggtatctacaggccttttattttatttaagttatagtatacatgtgcagaacgtaagggtttgttacataggtatacatctgccatggtggtttgctgcacctatcaacccatcgtctaggttttaaaccctgcatgcattaggtrtttgtcctaatgctctccctccccttgcctcccacaccccaacaggccccggtgtatgatgttcttctccctatgtccatgtggtctcactgttcaacacccacttatgagtgagaacatgcggtgtttggttttctgttcctgtgtttagtttgctgagaatgatggcttccagcttcagatatttaacaccaccttcacaccacagagtagaaactaagcaaaaaataaaaaataaataaaaataaaaaaaaataaacccacagtgggtaatgcacgtaggtctcggcaccacatggcgtgcaatggggaacctgtcactggcgagtccagcctgtacacatgacagtttcttaccctttgcgggctgctagtgtggggaaatctgggcttgtgtggaaaa

SEQ ID NO: 939392 - DNA, 754 bp, Homo sapiens
ttaacttctgtttaccgctttcagcatagaacttcaacagtttatccttctgtttcggcaagtcctgtatggtcatttccacaccacgctcttctgtaagatgtttcacactggcactgctgtgcagtttctccagcagcttgactttctgtgctagagacaaacataagtgcttcctctttgtttagtcactgttacccataggggtatctacaggccttttattttatttaagttatagtatacatgtgcagaacgtaagggtttgttacataggtatacatctgccatggtggtttgctgcacctatcaacccatcgtctaggttttaaaccctgcatgcattaggtatttgtcctaatgctctccctccccttgcctcccacaccccaacaggccccggtgtatgatgttcttctccctatgtccatgtggtctcactgttcaacacccacttatgagtgagaacatgcggtgtttggttttctgttcctgtgtttagtttgctgagaatgatggcttccagcttcagatatttaacaccaccttcacaccacagagtagaaactaagcaaaaaataaaaaataaataaaaataaawaaaaataaacccacagtgggtaatgcacgtaggtctcggcaccacatggcgtgcaatggggaacctgtcactggcgagtccagcctgtacacatgacagtttcttaccctttgcgggctgctagtgtggggaaatctgggcttgtgtggaaaa

SEQ ID NO: 939393 - DNA, 603 bp, Homo sapiens
tacttacctactatgtaccaaaatagtgttctaagcattgggatacagcagaaaacaaaaaacaccaggtcttttctttcattgagatttcattctaaaggcagaggatagacattaaacaaaaatctaataaacataatgaataagcaaaactaacactttgcccttccaccatagtgaccaaacacaccacataccacagtcagggctggtgggggagcacgttttttaaggagtacttctacatcatgaaataaacttcaaaaacaggaatttcccatctagagttagtcctcaaaataaatgagaccttgagccctttytcagaaattgctaagtcattagtgaacatattttgcccgtgacttttgcaatgccagcatcggcagatatgtgatgaccctacagatgtaataattatgtgagaaaaccactatcatttcccatcatgaacagttaactaatgataaccttgaagagtttctttccataaacacttgccatgtcctttacctggagagccagttctgaaggctggtctttcttgcaaaacattgcaagtaaaaatccttttgctttctcattgcttttatttctgagttg

SEQ ID NO: 939394 - DNA, 615 bp, Homo sapiens
gtcatcagatggcttccaattgttagcaacttcatgttctactcagctatggagagctgctttgtccaaagtcatgtccattctaggtctgcctgaatatgagacagagataaatgagggtacagaaatctgccattcgagctcagtgggggacaacctgttggatactcactccagagctccttgccccgtggctttctgaaatctacatgatatttcaatctttctgttctttcatgttttcttcctgttatggaatgaactttttctccttcaaatggatatgttgaagccctaggccccaatgtgactgtatttggagaaggggtcttttgagaggtaatccaggttaaatgagatcatgaaggtgaaactttaatctgatagaactggtgccattatgagatgaggaagaggcatcagagatctttctttcttcatgcatgcagaaatgaaagaccatataagcaytacagcaagaagtagcccactacagtctattaaaaaaaggtctcactagaaatggcacctcaatcttgaacttctagccattagaactgtgacaaaatagttttctgttgtgtaagctgcccagtctctggtattttgttatgg

SEQ ID NO: 939395 - DNA, 632 bp, Homo sapiens
atagagatggagtcttgctatgagttgtccaggcttgtctcatgggctcaagtgatcctccaaccttggcctttcaaagtgctggggttacaggagtaagccacagtgcctggcctgtgctgtgttttgattccagaatcaaatccacactcttgactgctaatcggctgggagaaatgacctgcagttccttaagtggtaataggaaggaactggacatgcaggatcttggtggaggtcagggaraaggatggggattgccctcagtgatgggagagtgtttattaatgcacaggggatgagctctgaggaccctctagaacactgattctgtcagccctcccatttctgcagacacgtggccccaccctcctccacttctcttgccaagcaggatgtgcagtcgatgcacagggattggctctgcgcatgtgctgtgtgctgcagggagaggagagagaagtctctagaatctgtcagcatccctccaggaaagcctggtgtcacactcaccattcctgatttcttttgttagtctcagaatagtgacttagaacaattatattcatttcacaattaacattcttttttggacactagctgagaagtaatggaacctggactctccactt

SEQ ID NO: 939396 - DNA, 665 bp, Homo sapiens
attagtaaaatccatctcgggaggagccaagatggccgaataggaacagctctggtctacagctcccagcgtgagtgacacagaagacaggtgatttctgcatttccatctgaggtaccgggttcatctcactagggagtgccagacagtgggcgcaggtcagtgggtgcgcgcaccgtgcgcgagccgaagcagggcgaggcattgcctcactcgggaagtgcgaggggtcagtgagttccctttcctagtcaaagaaaggggtgacagaaggcacctggaaaatcgggtcactcccaaccaaatactgcgcttttccgacgggcttaaaaaacagcacaccaggagattatatcccacacctggctcggagggtcctatgcccacggagtctcgctgattgctagcacagtagtctgagatcaaactgcaaggcggcagcgaggctgggggaggggtgcccrccattgcccaggcttgcttaggtaaacaaagcagccaggaagctggaactgggtggagcccaccacagctcaaggaggcctgcctgcctctgtaggctccacctctgggggcagggcacagacaaacaaaaagacagcagtaacctctgcacacttaaatgtccctgtctgacagctttgaagagagcagtggttctccca

SEQ ID NO: 939397 - DNA, 591 bp, Homo sapiens
agattctcctgttttacgcacatgcgtataacttaattacttaattacaaaagtccttacatgtggtagggggaggcagaagaatggtcaatgtcagagagatgtgatatgagaaagactgaacttgccattgctggctttgaaggtggaggaaagggctattagccaaggaatgaaaacagcctctagaagttggaaaaggcaaggaaacagatccttcaaaaagcaatcccaataaaaagtggacaaaggaagtgaacagacacttctcaaaagaagayagtcatgtggccaataaacatatgaaaaaagctcaacatcactgatcattagagaaatgcaaatcaaaaccacaatgagataccatctcactccaaccagaatggcaactattaaaaagtcaagaaacaacagttgctggcaaggctgtggcaaaataggaacacttttacattgttggtgggaatgtaaattagttcaaccattgtggaatacagtgtagcaattcctcaaagacctagaaccagaaataccatttgaccaagcaacccattactgggtatatatccaaaggaagataaatcattctat

SEQ ID NO: 939398 - DNA, 605 bp, Homo sapiens
cagttgactttgcccagatccatcagaagaatcactatctatggcagctaaagacttaaaaaatatatttcttaaatagtaagacttgaaagttgaaattacttcttgatgcataggctgcaggatggatgttatataagtaggcatgaaaataatactaattaccttgtacctccccaccagtgctcttgagtgactaaatgcattgtcagtgatgagtaatattttgaaatgaatattaaatgagtagtaggtctcaacactaggattaaagtattcagtaagctgtgctataaatagatatgctgtcatcagacttggttctatttatagagtataggtaaagtagcttgagcaaaatccttaagggccctaggagtttcagaatggaaaatgagcattggctacaacatmtagtcaccagctccactagcttctaaccagagagtcagcctgtcctttgaagctttgaagtcaggcattgacttctcctctctagctaggaaggtcctagatggcatcttcttccaatggaaggctgtttcctctacatcgagaacctattgctcagcgtagccacctttatcaattaccttagctggagc

SEQ ID NO: 939399 - DNA, 637 bp, Homo sapiens
cacctaggtaggaaatggcaaagttagactcaaactcaggtttctaattccacatcctgtgcctttcactttccttccaggccatacggaagcctatctctcacaccacatctttcagggtggtttgtcaactgggtttatgttacaataaaatataactttcctgcataatcccttgatcttgaactgttgtaattgatcaaggcctatttgttgcctgagtataaatggaggcaaataatatactttgatctccttacacaggatytgcttccaagtatgttgcacaaacttgctaaatatcatctaatattaaagtggcagaaaaacattttattccatttatttttatttttttgctcagctagaatggccaagaagaagccaatgaattatagttgaatttgtatttataaatgttatcaccaagaaattgttagatttgatgttatcatttctgtaattacagaagaaatatccactccactggaagttaccacaatatgagagtaattgctatgccattacagaatagttgcatgatatggttattcttgtcacagaaactataaattatgtactaaatgtaatataatttataatgaaaaacttaacatggcttaaagtagctgctgaa

SEQ ID NO: 939400 - DNA, 598 bp, Homo sapiens
cactaggcagggccttgggctctaaaattattttccaaagtgtctgggggcaaagacatacagtgaaaggaatttagagtctgatagtctggggtccaaaggtttgctctgccactcactaatatggtatttgagcaaaaatattcagtgatacatattagtccttctaatcttaagattcaatgatggaattataggtttgctataaaataaaaatgttcacatttkttataccaaatatcactctttcagtatttatggtggtctagaaattccaaaatcaatgatattttaaattatcttttaattccgtttaaaaaccacccaaagtattcaatgtgtttcctccgagatcgcacctcatttttgctccccaagcacatgagtgtgccccaatctcccaccatttccaacatattttattccaaaagtcttttaactgtctttaaaactcaaattcatctgaaagtacaaagatgtattagtgagtacattagatgaatctaccttaggttttaaagcatttctcaaaaaatattttgagtcaaacagcagaattagaatatgagctttagtgccagattggagttggattgac

SEQ ID NO: 939401 - DNA, 586 bp, Homo sapiens
caagtagctgggactacaggcctgcaccaccatacctggctaatctttgtattttttgtacagatagggtttcaccatgttgcccaggctggtcttcaactccagagctcaaagccatccccctgccccagcctcccaaagtgctaggattagaggcatgaatcactgtattagtccattttcacactgctataaagaatacctgagactgcgtaatttataaagacaagacatttaattgactcacagttcctcatggctggggaggccttaggaaacttataatcatggcagaagacaaaagggaagcaaggcatgtcttacatggtggcaggagacagccagggcyggggaaagccaaacattttaaaatcatcagatcttgtgagaactcattcactagcatgagaacagcatgaggaaaccgcccccataatccaatcacctcccaccaggtccctctctctacatgtggggattacaattcaagatgagatttgggtggtgtattagtttattttcatggtgctaataaagacatacccaaaagtggaacaaaaggaggtttagttggacttacagttct

SEQ ID NO: 939402 - DNA, 794 bp, Homo sapiens
cctagtggatcctgccctggggccacaggcggagctgccggccagtatcggcatgcacccgcactcctcagcccttgggggtttgatgggacggggcgctgcagtgcagatggtggcgcccattggggaggcttgggccgcacaggagcccatggcggggagccggggggaaggctcaggcatggcaggctgcaggtcccaagccctgccccacagggaggcagcaaaggtccagcgagaattcgagtgcaccacgggcgggccggcactgctgggggacccggsgcaccctccaagctgctggcccagttactgagcccttactgccggaggctggcggcgccggccggctgctccgagtgcggggccgccgagcccacgcccacccggagctcgcgctggcccgcaagcaccgcgtgcagccccggttcccgcctgcgcctctcccaccaaacctccacgcaagctgagggagccggctcaggctttggccagcacagaaaggggctcccacagtgcagtggcgggctgaagggctcctgaagcgtgaccagagtgggcgctgacgccgaggaggcgcctagagcgagcgagggctgccagtacactgtcacctctaaataagataaacatttgaagagtgcctttaatgttcaaggaattgtgaaagacacaaagttgaacatgacatggtatctgctttggagaggctcatagctaaagaagtgtattggtttgctagggctgctgtaacaaaataccacagactgggtggcttaaatgaccacacagaa

SEQ ID NO: 939403 - DNA, 761 bp, Homo sapiens
catctgcaagacagtccttgccaggagccaaatcagctggcaacttgatcttggacttccagcctccagaaccaggaggaacaaatgtctgttatgtaccccagcctatggcattttgttatgacagcccaggtagactaagacaagggtcaacattcaggtttcaagaaagaggaattcagaatcagccaaaatgagtgcatacaatggacacacatgccggtcaagtgtgggttcaaagccacatctcttgagcctgaatcccttctccatcactcactcactcactcactcacacactcactcactcacacactcactcacwcactcactcactcactcacacactcactcacacactcactcactcactcactcactcactcactcacggctgcatggccctgggcaagttatcaagctcttctgcacctctgtttccatgttagagaaatggaaatgacaatggtaccaaaccccagggttgcacttcagggcctctagcacttggcacatcctcagctctcccacgtggctgtcaatatgactgttgccaccaccaccatcctagccttggagcctctgtggttcaccatgattatgtcatcggggttcctagatgtggggtgtcacaaacttaggagcagacacaagtgctgtgtcctgggatcccagaagagggagcagaatgtgtcgagaggtgaagctaagagacctagcaggcaaagaatcaaagggatctttcttagattcagacaacc

SEQ ID NO: 939404 - DNA, 569 bp, Homo sapiens
tttgaagcatgcaaacccctgaggctctctcaagaattaataggtctctgaatagccacacatttgttaaagacattgcgtttgtagtttaaaaacctttcacaaagaaaattccagacccagatggcttttctggaaaattccaccaaagcacttaaggaagatattgtatccattctacagaaactcttcccaaagatagaagtgaaaagaatttttcaactcattttctgaggctgccattaccctgataccaaaactggaaaacaacatcacagaagaaagytacagaccaatatttctcatgaacatggacacaataattcttaacaaaatacttgcaagttgaatccaactaaatataaacagaatgacattatgtcaaaatggggtttgtctcagcaattcaaatgttggtttaacagttgaaaatcaatcattataattcagcatcttaacaggctaaaaagaaaaacacatacgatcatcttggtagatgcaaaaaaaaccattttttataaactccaacttccatttctaataaagactcagtagactaggaacataca

SEQ ID NO: 939405 - DNA, 771 bp, Homo sapiens
ttatgtcccataaaaaggacagcagctttgggaagaaaagcaccatagtagtagacctcctcgtttattgaatgaagcatgagattagtttactcaaggtattcatgtaaacatggacacttaaaaaataaatagaaaagaaagaaagagctaaatttaccagatgaggaagaaacttagctgcagagatatttctaacttatagtcctcacacacagtgtgagaagtctgaaaaatgaaattttagtcattagaacctgacagcttccagtcataatatgctgacatgtgtaacgggaattaagagattctaccagcggaatgaacgttcataatttttttttgaagcaaatcatttatttcagctccgtgaatcacagtgcagcagcagatcaccggacatttataaatggcataatacaactttctcaggctttgtgtcctttcttaagtagattccacttagagacactaattactggttgaatggaagcactctctgtgaggcaaagcaaaggaggtctattcagaatgaaaataagcttccaggggcttccagaggggctgggaccactgaaattctgcwctttggtatcttgctaaggtgattttgagttttaattggttcaccttttcagggaaggaccacagcctcccccaattcactcatcactaacagacacttataagtgttctgtgcatcacacattgtcccagctacaggagcaccgagaggattacgaggaggacttctgtctcatttaactcctt

SEQ ID NO: 939406 - DNA, 636 bp, Homo sapiens
atatatgtgtgttagtataaacatgtatttttctctatcagctgagagtgcctagaaacaatgatatccaaatattaaccaacatccagaattcatatcttggttgctaagacccttctccaatagtaggaaccagaatcatttagagaaatgattgatcctaggactgaagatgaaaatataccagatgagcttggagcatcctattgtaccagaaagtaataatgtgctaaagcaacaacaacaacaacaacaacagcagcagcagcaacaactcatagtcataagaatacgtcaaagggacacagggacaacagaggtaccatctgaaagactccctacagctagacctggaaaaatttgggtaacatttctttaatttgttttaaattataactcaaaatataaaataagtatccatgagatcatactgcyatacataagtgatttaaaaagtaaataattggagtaacaaattaatgtcttttttggtttgatttcaattattttatgtggaaactctattctcaaagaggtggaatataacttctgttcccttatgtatggaccgtgtatagtgatttttacctaaagaacaccatatggaaagggagaagaaaagaataagtttacagt

SEQ ID NO: 939407 - DNA, 636 bp, Homo sapiens
atatatgtgtgttagtataaacatgtatttttctctatcagctgagagtgcctagaaacaatgatatccaaatattaaccaacatccagaattcatatcttggttgctaagacccttctccaatagtaggaaccagaatcatttagagaaatgattgatcctaggactgaagatgaaaatataccagatgagcttggagcatcctattgtaccagaaagtaataatgtgctaaagcaacaacaacaacaacaacaacagcagcagcagcaacaactcatagtcataagaatacgtcaaagggacacagggacaacagaggtaccatctgaaagactccctacagctagacctggaaaaatttgggtaacatttctttaatttgttttaaattataactcaaaatataaaataagtatccatgagatcatactgccatacataagtgatttaaaaagtaaataattggagtaacaaattaatgtctttttyggtttgatttcaattattttatgtggaaactctattctcaaagaggtggaatataacttctgttcccttatgtatggaccgtgtatagtgatttttacctaaagaacaccatatggaaagggagaagaaaagaataagtttacagt

SEQ ID NO: 939408 - DNA, 568 bp, Homo sapiens
aaattctcctctaccctctaggatctccaataggcctaagaattaaactgacggccgggcgcggtggctcacgcctgtaatcccagcactttgggaggccgaggcgggcggatcacgaggtcaggagatcgcgaccatcctggctaacrtggtgaaaccccgtctctactgaaacaaaatagaaaaaattagccgggcgtggcggcgggcgcctgtagtcccagctactcgagaggctgaggcaggagaatggcgtgaacccaggaggtggagcttgcagtgagccgagaccgcgcctgggcgacagagcgagactccttctcaaaaaaaaaaaaaaacaaaaacaaacaaaaaaaaagatttaaaccgacaaggcagattaataggataaaagtatacaagttttattaaatttttagatgcacatggagcccttcacaagagtcccaagacccaaagaagttgaacagagtagaaagcttttataccttctagtcaaagcaatgctaagtttttgaagtgatgaccagacaaaggggtttgggttaggggcagtaaattgtgggga

SEQ ID NO: 939409 - DNA, 568 bp, Homo sapiens
aaattctcctctaccctctaggatctccaataggcctaagaattaaactgacggccgggcgcggtggctcacgcctgtaatcccagcactttgggaggccgaggcgggcggatcacgaggtcaggagatcgcgaccatcctggctaacatggtgaaaccccgtctctactraaacaaaatagaaaaaattagccgggcgtggcggcgggcgcctgtagtcccagctactcgagaggctgaggcaggagaatggcgtgaacccaggaggtggagcttgcagtgagccgagaccgcgcctgggcgacagagcgagactccttctcaaaaaaaaaaaaaaacaaaaacaaacaaaaaaaaagatttaaaccgacaaggcagattaataggataaaagtatacaagttttattaaatttttagatgcacatggagcccttcacaagagtcccaagacccaaagaagttgaacagagtagaaagcttttataccttctagtcaaagcaatgctaagtttttgaagtgatgaccagacaaaggggtttgggttaggggcagtaaattgtgggga

SEQ ID NO: 939410 - DNA, 421 bp, Homo sapiens
ttcctcctgcttgaaaaaaaatgaaggaagagtaaaggggactttgtcttgcagcttgggtaccagctcagccacagtggaatagaataccaagctagctgctgggatcctcaattcaaggccttggctactggaagacatttctagacccaccctaggtctgaggaggagaccactaccctgaaggggaaactgaggtctggcaacrttcaacaagctgactgaagagaccttgggccttcagtgaacattggcaggagccagacagtactgtgggcctggaacaatggtagccatggggaaagactcatttgctttaggaaaggggaaggaagagtgagaagaactttatcttctggcttggatgccagctcagccacaatagaatacagcaccaggtaaattcccagtgttcctgact

SEQ ID NO: 939411 - DNA, 742 bp, Homo sapiens
agtacagtggcactatcatagctcactgcagccttgaatcccgggctcaggggatccttcctccttagcctgccaagtatctgggactacaggcatgtgccaccatgcccaactaattttttaaaaaatttgtagagaaaggatctcactatgttgccgtgaatggtctcaaactcctgggctcaagtgaacctcctgcctcagtgtcccaaatgcacagagtacaggcctaaaccactacacccagcctctgtgtactctttaggtgaaaaggagttagtcctttgaagaggagagaaaacaccaactctctaagttgaaggagcacataggaggtgcacataggrtgacgacgaattgtcctgaattgcctgggactgaggcgattcctgggatgcagaactttcagctttaaagccaatatagtctcagacaaatcatgatggattggtcacattgtgtatgcattggtctgtgtggcaggcataataacagccacccaaagacgtccaaattctaatttctggaatctgcaagtatgtcaccttataggccaagacggactttgcagatgtgattaagtaaaggattttgaaatggggagattatcctgtactacaattgtccttataagggaaagaaagaagagggtgagagtcagaaaagggagacgtgctatggttgcagaggttagagtgatgcagttgctggaagtgccccacagccaaagcaagcaggtgac

SEQ ID NO: 939412 - DNA, 775 bp, Homo sapiens
tgtacaactcagatgtttctcattaaaaaacaaaattagccagacttctgttgtactgaattctgtaacaaagcagttcagtggtatgcttaatcttccaaaaaacaaaaattattatttttaaaatatttggagagggccttttattctaagtcttatttacagaattaacttagctctggaccctcgtgtatgtgtaaattaaattactcagcgtgtgaccctcagctattgtagggaatggcaaaggcagcatggcatgagaggtggacgcaaagggaaggatcttatacccagtttactctactcttttttttttttttttgacagagtctcactctgtcagtcacccaggctggagtgcggtggcccaatctcggctcactgcaacctttgccttccaggttcaagccattctcatgcctcagcctcctgagtagctgggattacaagcacacaccaccatgcctggctaattattatatttttaatagagacggggtttcgccatgttggccaggctggtttcaaactcctgacctcaactgatctgcccacctcggcctcccaaagtgttgsgattacaggtgtgagccaccgcacctggattcccagccctctccatggcaaatgaacaggcaaagccccttgttgcccatttaagtccagtagcattttactttctacctaaacaaagaggataggcatcggcatttcccctttcttattggaagatactgaacacagttcctaacctgcatctgttggcagccac

SEQ ID NO: 939413 - DNA, 580 bp, Homo sapiens
acttaaaaaaaaatgtggcggggctgggcacagtggctcatgcctgtaatctcagcactttgggaggccttggcaggcagatcgctggagcccaggagttcaggaccagcctggggagcatagtaaaaccccatctctacaaatattaaaagaattagccaggagtggtggtgtgcaccccagctactcggcgagggcgggaatggggtgggatggggcgctgcggtgggaggatcgcttgagcccaggaggtcgaggctgcagtgagccatgatggcgccactgcactctagcctgagcaacaggagtcagaccctgtctcaaaaaaaaaaaaaaaaaggtgtcaaatcttattaagtgaggatactttgtttcaaaataggcctataaacagaaggttcactttgaatttgaaaagtcccttagcagacgtaaataagaacyaaaccctgctttcacatgctagaaaattctagaattgcttcaattccacttatatacataaatatatatggatatataatatggctctgccaagtattggtaactgatttttcttccttactgaaatctaagatag

SEQ ID NO: 939414 - DNA, 680 bp, Homo sapiens
tcaaagagagagtagttatctacaggagatggcaagactttcccaaagttttaagagtctgttgtgattcacctatacaggcctgtcagaggctccaaacagcacctctatcagccattgacacttcaagcatcatcagatctgctagatcataaggcctaagtggcggagcagctttcacagtgacctggactactacagagccttcttttgtyctggtcccactcaaaactagctgctcttcagtttcagttggtaaatgggtcaaagtagtgcactgaagtgaggaatatattgcctgcattatccaaagagacccactaggtattagccttttttgccattgtaggaggggctagatgcaacaaattatccttcaccttacatggtgaaggataccccacactattggacccatagaaatttcagtgaggtggaaggtccctgaatttttgtcagatttatttccaccttctgacactcaaatgtcttaccaataagtctagagtagttgctacttcttgctcagtagctccagtgagcataatatcatcaatgtaatgaactagtgtgatatgttttggaagggaaagataatcacattacccatgtactaaattatgacatagacctggagaattgatatatccctgaggtaggacagtgaaggtatattgttt

SEQ ID NO: 939415 - DNA, 785 bp, Homo sapiens
actcctagttcatattgggaagctcaggttgcatagatagtaacttggtggcccatggttaagcattcagtctctactaaggcccagtagcaggccaaaaactgtttctcaaagagagagtagttatctacaggagatggcaagactttcccaaagttttaagagtctgttgtgattcacctatacaggcctgtcagaggctccaaacagcacctctatcagccattgacacttcaagcatcatcagatctgctagatcataaggcctaagtggcggagcagctttcacagtgacctggactactacagagccttcttttgttctggtcccactcaaaactagctgctcttcagtttcagttggtaaatgggtcaaagtagtgcactgaagtgaggaatatattgcctgcattatccaaagagacccactaggtattagccttttttgccattgtaggaggggctagatgcaacaaattatccttcaccttacatggtgaaggataccccacactattggacccrtagaaatttcagtgaggtggaaggtccctgaatttttgtcagatttatttccaccttctgacactcaaatgtcttaccaataagtctagagtagttgctacttcttgctcagtagctccagtgagcataatatcatcaatgtaatgaactagtgtgatatgttttggaagggaaagataatcacattacccatgtactaaattatgacatagacctggagaattgatatatccctgaggtaggacagtgaaggtatattg

SEQ ID NO: 939416 - DNA, 596 bp, Homo sapiens
gtatcctatggtgtgcctgtccccagcacatgtgggctctgtcctggacactgtggggaattagaagaaggaaagaagggggacagggctccaggctcagaaagcacgtggtctgctagggggcagggcacatatrgaaacagtcctattaggtcccagtcctagcacagatggggaattacacggatcagtagggaaggagttgggaggtaggttctgggaggggatggggtttggtggaatggaccagaattctccattccccagcaagccctaaccaagtgtggcaccgtgctcacatgcacaatctgggtcctggggtgactgctgggggccagggcactgcattctcttactggcttggccgtctcagccttctctgcctgatgctttttggttctacggtccttgcttttactcttccagtgctgttgggcactttctatgtagggcacttgacttggacatcttttttttaaattttaatttaatttttaattgacaaataataattgcatctatttatggagtacaatgtggttttttttttttttgagttggggtcttgctctgtcacccaggctggagcgcagtgg

SEQ ID NO: 939417 - DNA, 588 bp, Homo sapiens
ttgtagccaaaagtcatgtagcactagatactgaccatttgcatctccactgctcctacaggtaggatttctgacattggaatcataaggcttttgcttaagaattgtttaaggccaggcccagtggctcacgcctgtaatcccaactctttaggaggccgaggcgggcggattgcctgaggtcaggagttcgagaccagcctggccaacatggtaaaacttcatctttactaaaaatacaaaaattaaccaggcatggtggcgggcacctataatcccagcctccctagcctccctactcaggaggctgaggcaggagaatcgcttgaacccgggaggcagaggttgcagtgagccaagatcacaccattgcactccmgcctgggcgacaatagcaaaattctgtctcaaaaaaaaaaattgcttaaaatgtttttcagatcacaaattccagtgaaacagctgacaccaacaagtttgaagacaccaacagaggaatggaatcagcatgagaatacagctgcttctctctctgtccaatgatttcaccctgttccctttggccaatcagcagtctccacacttcag

SEQ ID NO: 939418 - DNA, 691 bp, Homo sapiens
aaaaagtaagtaagaatgcaaacgtttacttttatagagtgttaattggatatattacatagtaataaatctcagtaaacagtggctcaaagtcatatgcctgctctgattttctaaagttgctaagtaatttgaccagtactatggtattagagcagctaaattatgaacataatgaaacaaagagtgccactttttcttgcccaatccacacagaaaagagaattttctatgtatgcccagccaaactgtcaagagtgagggtagaataaataaaatattaaataagccaggtgtcaaaaaaattgcttcttttttgccctttctcaggaagctatggagggggtattctatcaaatgaaggaataaattaagaaagaggaaggcaagggatgctggaaccaggggcttcaactagtgctaccaaagaacagagaataatcaaaaatactcatcacatggaagattgaaataaaaatttggagataggggaaagaaaaaaaataggtaagagaatggaagctagagataagaggaaaagaaatgcatactctkagcctatacagtttcaaaaactggatggcaaatctgtctctcaggtttcctaacatcgaaagccaaggagaaaatatgcccagttgcaagttgcataatatcctttacagttgattcccaaaagacctcctctgga

SEQ ID NO: 939419 - DNA, 669 bp, Homo sapiens
tatgaccctgaaggagatgaaagaccattttgtcctgtgtagacattttcacaaactttcttattgcctgttttttctcctgcaaatgcatttatttttccaaaaagtcatttgtttcccataagtgcctttatccctttacttattaaaatggtatataagccccaaattctaaccacccctttgagttactcatcaccaagctctcccacatgtacgcatgttgcatgaatgaataaacattgtaattttctcctgttaatctgttttttgttagtctgattcacgggccctggtggctaaacataaagaaggcagaagaaagttttttgccccctcccctacatattatatttctatctgtgctatgtttataaggataatagacttttttcccctcaagaagaaatttcatttcctgggaaaacaatattacyctcattgagaatgtatgagttaaaatacaaaaaacaaccccatattaatggtcaaggaagaaagctatagtgtctaggaagtttagtaggtcaaaatcctggtagtagcaattcagatacacaaacaaacctgttgatatttcatgggttatttaccacaagggctgttttgagtttcatgcctggaatagaaatgagcaggcagttctggccccaaaaatgcccatcaaaa

SEQ ID NO: 939420 - DNA, 709 bp, Homo sapiens
ccctcatctctgctgtcaaaatgcaaccttccctcaagagtcatttcacaggacccctctttctatgaagccctcaggtggaaataattttttgcctttttttccattttatttttggagtgtttatggcatttaacataccttactttgtatacaaatatttgccttgctccctcttttgcaaatttcttaaaggtagagaccattgtatgttttcttcatatgttgctggtgcctaacagaactatggccattgtccacattcatttagcagcctttgtagttattgctttgaggagcttyctctcatgaatgcccttgctttctctcccacagagtcatccccctatatatgacctgactgccatgaaagtgcctactgctatttgggctggtggacatgatgtcctcgtaacaccccaggatgtggccaggatactccctcaaatcaagagtcttcattactttaagctattgccagattggaaccactttgattttgtctggggcctcgatgcccctcaacggatgtacagtgaaatcatagctttaatgaaggcatattcctaaatgcaatgcatttacttttcaattaaaagttgcttccaagcccataagggactttagaaaaaatagtaaccaacaatgaggttgtcccccagcaccctgggggagatgcacagtggagtctgttttccaagtcaattgt

SEQ ID NO: 939421 - DNA, 709 bp, Homo sapiens
ccctcatctctgctgtcaaaatgcaaccttccctcaagagtcatttcacaggacccctctttctatgaagccctcaggtggaaataattttttgcctttttttccattttatttttggagtgtttatggcatttaacataccttactttgtatacaaatatttgccttgctccctcttttgcaaatttcttaaaggtagagaccattgtatgttttcttcatatgttgctggtgcctaacagaactatggccattgtccacattcatttagcagcctttgtagttattgctttgaggagcttcctctcatgaatgcccttgctttctctcccacagagtcatccccctatatatgacctgactgccatgaaagtgcctactgctatttgggctggtggacatgatgtcctcgtaacaccccaggatgtggccaggatactccctcaaatcaagagtcttcattactttaagctattgccagattggaaccactttgattttgtctggggcctcgatgcccctcaacggatgtacagtgaaatcatagctttaatgaaggcatattcctaaatgcaatgcatttacttttcrattaaaagttgcttccaagcccataagggactttagaaaaaatagtaaccaacaatgaggttgtcccccagcaccctgggggagatgcacagtggagtctgttttccaagtcaattgt

SEQ ID NO: 939422 - DNA, 582 bp, Homo sapiens
ctcctcagaaaatatgtttttctttactgtcacatcatcaggctgcaaattttccaaactttaatgctctgcttcccttttaaacataagttccaattccaaataatctctttgtgaatgcataaaactgaatgcttttaaaagcacccaagtgacatctttgctttgttgcttagaaatttcctccactagatatgctaaatcatctctcttgagttcaatgttccaaagatctctagggcagggacaaaatgccactagtctctttgtgaaagmatagcaagaatcacctttattgcagttctcaacaagttcctcatctccatttgagaccacctcagcctggacttcattgtccatatcattattggcattttggtcaaagccactcaacaagtctctaggaagttccaaactttcccacatcttcctatcttcttctgagccctccaaactgttccaacctctgcctgttaccctgttccaaagtatcttccacattttcgggtatctttatagcagcaccccactttctgtagtacaaattcagggtatttgtttattttcatactgttataaaga

SEQ ID NO: 939423 - DNA, 645 bp, Homo sapiens
ggtgtcaaaatcatttttacatcaaaccccagcaacacacaatttacccatgtcacaaacctgcccacgtaccccctaaacctaaaagttggaaggaaaaaaatggcaaaaaaacatgaacagacatttctcaaaagaagacatgtgagtgtccgataaacatamgaaaaatgctctttatcactaatcatcagaaaaatgcaagtcaaaaccacaatgcaatatcatctcacaccagtcagaattgctattagtaaaaagtaaaaaaaaaaaaaaatagcaggtgctggagaagctatggagaaaagagaatgcttatacactgttggtggtaatgtaaattagtttggcctctgtagaaagcagtgtggagatttttcaaagaacttaaaaaaacaaaactaccattcaacccacaactgcattcctgggtatatacctaaaggaaaataaatcattctgtaaaaaagacacattcactcatatgcttattgcagcactatttacaatagcaaatacacggaatcaacttatgtttccatcagtggtagattcgctgaagaaaatgtggtacatataccacggaatatgccatagaatactatgcaaccataagacagaatgaaataatatcctttgcagcaa

SEQ ID NO: 939424 - DNA, 826 bp, Homo sapiens
gcaatcaaaaatgcctcatagatagaatgcaaccattccaccctcaaagcagtgggaaaaaatgaggcaaatatttgaaaaattccatttcaagaatgttcttttccttgaaatttccatttaaattaaaagtgatttttctttttttaccatgaattattcatataatttccacaacttttgcgtagcaaatattgcatggttgaaggaaaaggagtccattcagcacgagcgaacaaatgttaatcgtgtcctgctgtgaaattccccactggataggaggcttttcactatgaagaatgatctgtatgtgtttggcttttgatgcggaagcctctttcccagtgtaaattctgaaataaaatcactcaatgccagcaagtgcttgcctattaacacagtaagacctttcagtgtttttccattactttgatctccaaggaattatccactaacaacacatatgcccactagtagatactattatcaatataaaaatatcaacatcgttaaagaaaaagtgccaagcttggcaactggggtaagtgtacactgtattgtatatgatgtkgaatatcaataaaatcaataaaagaacaaaagaactggaatttatctgaaacaggagaacaatatatggtcctagagcttcttttaagaaaccatatcatgtaagtttttatttcacattattatattcattgagaccattgcttctttaaaatgcttgaatgtgataagagttagtagagacattccatttgcctcacactgacccttgggttaaacataaatgcctaagagtactccagtgatggtatcactc

SEQ ID NO: 939425 - DNA, 710 bp, Homo sapiens
tattttgattttggagacaacacattcctcctttggttatgttactctagcccatttactgagtgacctgaaaggctgcaagtttttgagggggatacagaacaggagaaggctctccaacaagtccaggctgctgtgcaagctgctctgccactggggccatgtgacctcgcagatccaatggtgcttgatgtgtcagtggtagatagggaagctgtttggagcctttgacaggctcccataggagaactgcagcagggtcctcttaggattttggagcaaggcctagtcatcttttgcagataattattttccttttgagagactgctcttggtctgttactgggctttagtggaaactgtacgtttgactatgggtcatcaagtcaccatgggacctgaagtgcctgtcatgaacttggtgctttctgacccatctagtcataaagtgggtcatgcacagcaacattctatcatcaaatggaagtggtatatacatgatagggctcgagaaggtcctgaaggcacaagtaagttacatgaggaagyggctcaaatgcccatggtctctatttctgccaccctgacttctcacccccagcctgcaccaatcgcctcatgggaacttccctataatcagttaacagaggaagagaagactaggacctggttcacagatggttctgcacgatatgcgatatgcaggcaca

SEQ ID NO: 939426 - DNA, 475 bp, Homo sapiens
gtcatcatccaatgggcccatgaacaaactggacatggtggcatgcatggaggttacacatgggctcagcaacatgaacttccactcaccaaggctgacctggctatagccactgctgagtgcccaatttgcctgcagcaaacaccaacactgagccctctatatggcaccattattcggagtgatcggccagccacctgatgrcaggttgattatattggacctcttccatcatggaaagggcagaggtttgtcctcactggaatagactcttactccagatatgggttttcctattctgcatgcaatgtttctgccaagactaccatccgtggactcacaaaatggcttatccaccatcatgctattccacacagcattgcttcttaccaaggcactcactttatggctaaagaagtgcaacagtgggctcatgctcatggaattcattggtcttaccatgtttcctatcatc

SEQ ID NO: 939427 - DNA, 737 bp, Homo sapiens
agcagttcttgtagtgctggcttggtagtggcaaattctctcagcatttgtttgtctgaaaaagtctgtatctgtccttcatttatgaatcttattttcacaggatacaaaattattggcagataattgttttgctttaggagactgaagatagggccttaatcctttttagctagtagggtttctgctgagaaatatactgttaatcygatagcttttcctttataggttacctggtgtttttgtctcacagctcttaagattcttaccttcttcttaactttagattacctgatgacagtgtgtctagttgatgatcttttggtgatgaatttcccaggtgttatttgtgcttcttgtatttggatgtctaggtctctagcaaggctggtgaagttttcctcaattattcctccaaataagcttttcaaacttttagatttctcttcttcctcagaaatgccaattattcttagatttagtcatttcacataatcccagacttcttagaggctttgttcatattttcttatatattttttgtctttgttggattgggttaattcaaagaccttgtcttggagctctgaatttcttttttctacttgtttgattctattgctgagactttcttgagcattttgcatttttataagtgcaataactgattttatataactgattttataataactgattttataataactgatgatattttgacactagtatgtgat

SEQ ID NO: 939428 - DNA, 586 bp, Homo sapiens
aacatgttactattaccaaaatagatatactgaccaatggaacagaacagagacctcagaaataacaccacacatctacaatcatctggtctttgacaaacctgaccaaaagaaggaatgggaaagggattccctatttaataaatggtgctgggaaaactggctagccatatgcagaaaactgaaactggaccccttcyttacaccttatgcaaaaattaactcaagatggattaaagacttaaatgtaaaaatctaaaatgataaaaaccctagaagaaaacctagacaataccattcaggacacaggcatgtgcaaagacttcttaaataaaacaccaaaagcaattgcaactaaagccaaaattgatgaaggggatctaatcaaactaaagagcttgtgatcagcaaaataaactatcattagcgtgaacaggaaatttacagaatgggagaaaatttttgcaatctacccatgtaataaaggtctaatatccagaatctacaaggaacttaatcaaatttacaagaaaaaaaccatcaaaatttgggtgaatgatatgaacagacacttctcaaaagaagg

SEQ ID NO: 939429 - DNA, 815 bp, Homo sapiens
ggaggctgaggcaggagaatcacttgaatccaggaggtagaggttgcagtgagacgaggtcacaccattgcactgcagcctgggtgacagagtgagactccatctcaaaacaaacaaacaaaaaacaaaacactgttttgtaaactaaagagactggaagacttactatctagggagagtgtctggaaaagttatgagaccaatctgagtgttccattccaacggagggaaagaactcaatgaggcttattaatggacaacgatggaaaggaatacaactgttctttgcgtaaatcctttagaatctgctcatcaggtaaaagcagttaccctctactgctttgtccaatttagagtaacatggagggatcactccatttggatgataagccmcctgggcaggtaatttgaactttctaagccttaatttcttatctgatatctaaagtgtagaaaataacagtgaataccttacaagaaacttctgagttttaaatgagaccatgccaggcacttagcagatgctcaataaaaggaggtacccatgtagcaatctcaccctcttgcatgagcaagggggtccccagcttagacaaaatgacttattgagttgaggacaaaggccaggataaaactcagtggccagtaatgcttgccactttgactaaacaggaattggactgctcaggtgcaaaatgaagcaagcagtctgctcacttgtaatgcttttctcatcaggtgctgggtttaaatggagaagttgaaagctctggtgaagggtgcctagaagtgaaatgctaggagaacctcttcac

SEQ ID NO: 939430 - DNA, 642 bp, Homo sapiens
accgcaatctccacctcctgggctcaagcaattctcctgcctcagccccctgagtagctggaattacaagcgcccaccactatgcctggctaatttttgtatttttagtagagacagagtttcaccatgttggccaggctggtcttgaactcctgacctcagatgatccacccatctcggcctcccaaagtgctgggattacaggcgtgagttttttcatcagtacaatgggggtgtcaatgcaataagccaagtaccgggaatagtgccttgcccatcataagttgttaatttttactttcctgactacgctattctggatatgagtgatttgctgacatcacttcaaagtgtggtttggaagtgtaactggccacttccaggaagcctgcactggatcccagtagcagacastatttggcttcctcattttggatatactgtaccaataagcacatgtgatctttcaactattttgtgtaaagaaaaatttcccttttattagactcaattctattcacctgggaacataacattcccaaaacagtttgcatccaccattccagggtgaaggacctcaccagtgtttgtgtggcaatcaggattccaaggcaagctgctgggtcacacaacataatccgc

SEQ ID NO: 939431 - DNA, 476 bp, Homo sapiens
tttttgtcctttctttataattgttggtttaatgtctattttgttagaaataagaatagtaactcctgcccttttttgtttttcatttacttgatagatttttctcctgtcctttagtttgagcctatggatgacattgtatctaagatgggtctcttgaaaacagcatccagttgggtcttgcttttttatccaacttgccactctatgccttttaagcagggcttttagcttgtttacaytgaaggttagtactgatatgtgctgatttgatcctgtcatcctgttataagcttgttgttatgtagacttgattgtgtggttgctttagagtgccaatggtttatgtagttaagtgtgtttttgtggtagctggtaatgatctttcatttccctgtttagcactcccttaagggtctcttatcgggggaacccacccccaatatttcaatgtaggttctttctattttctgtaa

SEQ ID NO: 939432 - DNA, 632 bp, Homo sapiens
gaaactctctcttgatatttacatttcaaaggaatggctcccaggtccttgagaaagatattcctgggttgtgaaactggtaagatactagcactggaagaaaattaatatctcaaagggacaatatcgggggaaattcagccagatatcaggcaaaattcacccccgatatttcatgtagtttcttttctattttccstaagtgtgggccagtatgagaaataaagggacagagtacaaaagagagaaattttaaagctgagtgtccaggggagacatcacatcggcagggtccgtcatgccccacaagctgcaaaaccagcaagtttttattagtgattttcaaaaggggaggaggtgtacgaatagggtatgggtcacagagatcacatgcttcacaaggtaataagatatcacaaggtaaatgtaggcagggcgagatcacaggaccacaggacgggggcgaaattaaaattgctaatgaagtttcgggcacgcattgtcattgataacatcttatcaggagacaaggtttgagagcagacaaatggtctgaccaaaatttattaggtgggaatttccttgtcctaataagcctgggagcgctacgggagactggggcttatttcatc

SEQ ID NO: 939433 - DNA, 806 bp, Homo sapiens
aaaaataagagctagatggccataatcagaaggaagaaggggcaggcagagagcaaaggagaaaatggaacattaaaaatgggcagcggcttgagcagcccaccgattcaaatgagtctgagttttctcaagtgtccatcagggtttagtgaagagacagaaatcacattagtgagttaaacagaaagaatttaatataaagaattgttggccaggagcagtggcttgtgcctgtaatcctagaattttgggaggcccaggcaagagactatccctcaaggccaggagttcgagaccagccttggcaacagacaccccatctctgcgaaaaaaaaattttaattagccaggtgtggtggcgtgtatgggtagtcctggccattcagaaggctgmggtatgaagattccgtacacccaggagttcaaggttgcaatgagctgtgatcgtaccactgcactgcagcctgggcaacagagtgagatctcctctcaaacaagaaaaaagaatttgttacttagacataaagctattaccagagtaactgaacaggtaaaactcgaaagaatcatggtggtagcaactttagagagctatgtccattcctagtgtgtccagaattggtgggttcttggtctcgctgacttcaacatgacttcaggaatgaagccgcagaccctcgtggtgttacagttcttaaagatggtacgaccggagttttttccttctggtgggttcacggtctcactgacttcaagagtgaagctgcagaccttcaccatgaggcttcagctcataaaaacagcac

SEQ ID NO: 939434 - DNA, 806 bp, Homo sapiens
aaaaataagagctagatggccataatcagaaggaagaaggggcaggcagagagcaaaggagaaaatggaacattaaaaatgggcagcggcttgagcagcccaccgattcaaatgagtctgagttttctcaagtgtccatcagggtttagtgaagagacagaaatcacattagtgagttaaacagaaagaatttaatataaagaattgttggccaggagcagtggcttgtgcctgtaatcctagaattttgggaggcccaggcaagagactatccctcaaggccaggagttcgagaccagccttggcaacagacaccccatctctgcgaaaaaaaaattttaattagccaggtgtggtggcgtgtatgggtagtcctggccattcagaaggctgaggtatgaagattccgtacacccaggagttcaaggttgcaatgmgctgtgatcgtaccactgcactgcagcctgggcaacagagtgagatctcctctcaaacaagaaaaaagaatttgttacttagacataaagctattaccagagtaactgaacaggtaaaactcgaaagaatcatggtggtagcaactttagagagctatgtccattcctagtgtgtccagaattggtgggttcttggtctcgctgacttcaacatgacttcaggaatgaagccgcagaccctcgtggtgttacagttcttaaagatggtacgaccggagttttttccttctggtgggttcacggtctcactgacttcaagagtgaagctgcagaccttcaccatgaggcttcagctcataaaaacagcac

SEQ ID NO: 939435 - DNA, 720 bp, Homo sapiens
atgagttcaactaacaacttctaccgaggacccctggactgacctgctggcccttccactggcctaaagagttcccctctggaggacactacacctacagggccccttcttcgcccctatccagcagaaagtagctagagcagtcatcagccaaattcccatcagcaattggggtgtcctgtttagaggggggattgagaggtgaagctggctgggcttctgggtcaggtggggactcagagaacttttctgtctagctaaaggattgtaaacgcaccaatcagcactctgtgtgtagctaaaagtttgtaaacgcaccaatcagcactctgtcaaaatggaccaatcagcactctgtaaaatggaccaatcagcactctgtaaaatggaccaatcagcactttgtaaagtggaccaatcagctctctgtaaaatggaccaatcagcaggatatgggtggagccaaataagggaataaaagcaggccaccccagccagcagcggcaacctgctcgggtctgcttccacgtcgtggaagttttgttctttcgctcttcgcaacraatcttgctgctgctcactctttgggtccacactgcctttatgagctgtaacactcaccacaaaggtctacggctttactcctgaagtcagtgaaaccacgaacccaccgggaggaacgaacaactccggacgcgccacctttaagatctgtaacac

SEQ ID NO: 939436 - DNA, 502 bp, Homo sapiens
ggtcctggtctttttatggttggtaggctatttattactgcctcaatttcagaacttgttattggtctattcagggattcaacttcttcctggtttagtcttgggagggcgtatgtgtctaggaatttatccatttcttctagattttctagtttatttgcatagccatttcttctagattttctagtttatttgcatagagccatttatagtattctcagatggttgtttgtatttctgtggggtcagcagtgatatcccctttatcattttttattgtgtctatttgattcctctctcttttcttctttattagtctagctagcagtgtatttattaatttcttttcaaaaaarcacctcctggattcactgattttttgaaagttttttcgtgtctctgtctccttcagttccactctgatcttagttatttcttgtcttctgctagcttttgaggttgtttgctttgggatttctagtgcttttagttgttatgttag

SEQ ID NO: 939437 - DNA, 658 bp, Homo sapiens
catttttgcataaccacactataacttttaaaataagaaaaaaatcacatgactaacatttaatcagaccttattcagttttccccaaatgttccactaatgttctttataacagaagttatgaaatcatacagtaaattttagttgtgtgattttcaagatcacacattgcattcagtttccatgtctttattctctttcagttctctttcaatctggagtaattccgtagtctttccttgactyttatgactttgacactctttgttcattgttttgttttcttttttaacttcccatactatgccagtgtaatgaccttgacactcttgaagattatgggaaggttatgttgtagaacaccctctctttgagtttatctgatgttctctcatgattctattcagcttattcatctttggtagataatattacagaagtagtgctgtgattttgttatgttctatcagatggcatatgattttaatgtgttgcattattgatgatgctaactttgatcacccagttaaggtggtgtctgcaggatctctccactatgaaattactctttttccatttgtaattaacaagtattctaggcccggcacggtggctcacgcctataatcccagcactttgggaggctgaggagggagga

SEQ ID NO: 939438 - DNA, 733 bp, Homo sapiens
agtgcagtggtgcaatctcggctcactgcaacttctgtttcccaagtttgagcgattctcctgcctcagcctccctagtagctgggaccacaggcgtgtgccaccacgcctggctaatttttgtatttttagtagagatggggtttcaccatgttggccaggctggtctcgaactcctgacctcaggtgatccacctgcctggacctcccaaagtgctgggattacaggtgtgagccactgtrcctggtgcttgtgctttttatgtcatatttaagaaatatttcctaacccaagttcacagagatttacaccccttcaaatagctttatagttttgtctcatatttaggtctgtgatttatttttagttcacttttgtatacgttgttaagtagggatcaacacttattcttttgcatgtggatatccagttgtcccagcaacccttgttgaaaagactattatttccctattgaattgtcttggcagtcttattgaaaatcaattgactatagtgtgagggtttatttctggaccctcaattctattccattgatttatttgctcatccttatgccagtaccacatcatcttgattactgtagccttgtagtaagttttaaaatcatgaattgtaagtaatccaattttgttctatttcaagattgtttttgctattctgaatccttcaaatttccatatgaattttaggatcagtttgtcaatttctgca

SEQ ID NO: 939439 - DNA, 767 bp, Homo sapiens
atgttttagctctgcctcatgagggattacttgtgtataattacttgttccatgtgtataagacaaggcagatatttctgcttctgccccacacagagacagatctcatctgagacatacaacctgctccaggaacattcaagccctttgagccaaacygtccacacctatgggcaggacccaacaacgtaaagcttaagatgtgtgtgttcaggtcagagggctgaaatcctagctgactctcaactctcttgcactctggttcctgcctacttaaatctatggaacccacctactgcttcctaatctacctgcctcctctggacaagtttccacctattgttcttgctgactttgctggacctctatttcttggctgaagtatgagtcttgactctccttaggcctgtttaatttattcaacaaatactagtttagtacttaatatatgcaaagttctgttctaggtgctggagatacagcccctggcaacaagtcagacaaaaatctctgctctcatggaacttacattctagttagtctctaatatgctgatgtaacaaagagttcactactctatctcaaaaaaagattggctgatgtaagtctgtattcatcaggtatgagtaaccttctttgaaccttaaaaaggatagttataattttatgccttaatgacgtctaacaaacaggtcagacacatcctcccctctaaatcatggtgcttccttgagctttctctgtttctctgttattttccccactac

SEQ ID NO: 939440 - DNA, 709 bp, Homo sapiens
gtgtggccacgtgactagattcttaacagaaaatagaagtgctatgagtcatttccagaccttggtacaaaatattgcacatgagctctccatgactgtttccatctctcaggaaccataggaacccagcatcgacctagcagatggcagctactctaattcttatgctggtaatacaagaaacctgggtccctggatgacagcgtgaagtagatccaccctgccaaccaggttctttttttaaacttgtcacaagaatgtaagtttcctttttctgtaaataccactgcattgttgggtctttgggtacagaattccaaaaaamtgtaggtaatgaaaatggtgtctctaatgagaaacaaaacctagttggaaaagtaagtccttgtatagatgtttaggaaggagtttcatgaacttatagttagttattgtactaggttcaccaagtgagtgaatcagaaggacacagaaaagtacctggaaaggagtgacaggaagacaggtgaaagaaacattggagaaaacacaatcaaaattaatcagatccaatattgtaattttttaatacaggatatgttgctctaagctttttatgttcagcctcacttttacattcttctgcatataatagaatcctacataactgaggtgtgtctgggaaggacattttgtgagattttgttgccaaaatactaaactttcagaa

SEQ ID NO: 939441 - DNA, 811 bp, Homo sapiens
tgggtttctggattgggtggggacttggagaacttttgtgtctacctaaagcactgtaaacgcaccaatcagcactctgtaaaaacacaccaatcagcactctgtgcttagctaaaggattgtaaacgcaccaatcagcactctgtaaaatggaccaatcaccagaatgtgggcagggccaaactaagggaataaaagctggccacccgagaaagcagccgtaacctgctggggtccccttccacgctgtggttggtttgttcttgcactctgtggaagctttgttcttttgctcttcacaataaatcttgctgctgctcttctttgggtcygcactaactttgtgatctgtaacactcaccgcgagggtctgaggcttcattcctgaagtcagcgggaccacaaacccaccaggaggagcaaacaactccggaagcaccacctttaagagctgtaacactcactgcgaaggtctgtggcttcactcctgaagccagcaagaccacgaacccaccagaatgaagaaactctggacacatctgaaggaacaaactctggacacaccatctttaagagctgtaacactcaccacgagcgctggtggcttcatttttgaagtcagtgagaccaagaacccaccagaaggaataaattccggacacactaagaccaagctgctagccttcacacaggtgagcatagaactggaatcatgtcctttacaatatattctcttagtcaaagccttcatagtccagccaaggtccagggaaggagagatggtcttggacttttctcgacgagaatgcca

SEQ ID NO: 939442 - DNA, 811 bp, Homo sapiens
tgggtttctggattgggtggggacttggagaacttttgtgtctacctaaagcactgtaaacgcaccaatcagcactctgtaaaaacacaccaatcagcactctgtgcttagctaaaggattgtaaacgcaccaatcagcactctgtaaaatggaccaatcaccagaatgtgggcagggccaaactaagggaataaaagctggccacccgagaaagcagccgtaacctgctggggtccccttccacgctgtggttggtttgttcttgcactctgtggaagctttgttcttttgctcttcacaataaatcttgctgctgctcttctttgggtccgcactaactttgtgatctgtaacactcaccgcgagggtctgaggcttcattcctgaagtcagcgggaccacaaacccaccmggaggagcaaacaactccggaagcaccacctttaagagctgtaacactcactgcgaaggtctgtggcttcactcctgaagccagcaagaccacgaacccaccagaatgaagaaactctggacacatctgaaggaacaaactctggacacaccatctttaagagctgtaacactcaccacgagcgctggtggcttcatttttgaagtcagtgagaccaagaacccaccagaaggaataaattccggacacactaagaccaagctgctagccttcacacaggtgagcatagaactggaatcatgtcctttacaatatattctcttagtcaaagccttcatagtccagccaaggtccagggaaggagagatggtcttggacttttctcgacgagaatgcca

SEQ ID NO: 939443 - DNA, 704 bp, Homo sapiens
gacccagggatccctgcactctcatggacctgggaaaacccctgcccccacaggcctagaagtacctgctcctgctgcctggcctctccctgctgtctgtgcccactccagtgcagagccaagttgtggccaagcccaggcactgtcgtgacccagctaggtgtgcatacacttggggtggcactgacacaccatccacctgctgcctcagctccctctggactttggacaccaatcagcatggaaaggaagctatggggcagagggaggctcagcacgggtttgagggttccactcagtgcaaasagactgggcactgtggacagaatgttgatggtggcaggaggcagacagattcctaggcaggaaggggcaggtccctgtgaaacctcaccttcaggccagggatggcctgaaacctggggtccaggctgccagttccaggttgagtctgacccagagtaagaatttcactgatgccttttggccaatcagatggtgctttttccaggcccacccgtggttgcccatggatcaatcacacacttcctccattttgagcacataaaaaccccagactcagccaaacttagaaactcatcaggatgacctgcctgtggaaaggagctacccattttgggtctcttgagagctgttctcttgcttaataaaattcctctcttccttgctcaccctccagtcgt

SEQ ID NO: 939444 - DNA, 616 bp, Homo sapiens
gacaatgcttaacattttgctcactgtaaaagggaaatccaggccactaatatggaaaaggtactcttagagcaaatccacagctatgaggcaataaattgataactggcacatgccccaaagtagaaaccacacaaatgtccaccagcaggtggtacatctttacaatggtatactactcagaaataaaaaggaatgaactactatgtgcataacaacacagatgcatctcaaaaacattttgctgatatgagaagccaggccccagatagtacatcctgtgtcattctatttacatgaaaaactttaacaagcaaaccagcagttgtctgttactcaggtgaggcatcactgcmaaagggcatgagagactctggagtgatggaagtgttctatatttgattttacagtggtggttacttgagttatgttcatttttcaaatcttatagagctctatactaaatgagtgcatattatttatataagttatgctttaataaaggtaatgtttgaatgttaatggaaaactatggcctttcaataaaagcaggatcattgagaattcaaacccttcaacgttgcaggtttgggtcaccactgggttaagtaggatc

SEQ ID NO: 939445 - DNA, 755 bp, Homo sapiens
taccggttgttcctttccatgcttagtgcttccttcaggagctcttttagggcaggcctggtggtgacaaaatctctgagcatttgcttgtctgtaaagtattttatttctccttcacttatgaagcttagtttggctggatatgaaattctgagttgaaaattcttttctttaaaaatgttgaatatcggcccccactctcttctggcttgtagagtttctgccgagagatccgctgttagtctgatgggcttccccttgtgggtaacccgacctttctctctggctgcccttaacattttttccttcatttcaactttggtgaatctgacaattatgtgtcttggaattgctcttctcaaggagtatctttgtggcgttctctgtatttcctgaatttgaatgttggcctgccttgctagattggggaagttctcctggataatatcctgcagagtgttttccaacttggttccattctcccygtcactttcaggtgcactaatccgatgtagatttggtcttttcacatagtcccatatttcttggaggctttgttcatttctttttattcttttttctccaagcttctcttctcacttcatttcattcatttgatcttccatcactgataccctttcttccagttgatcgaatcggctactgaggcttgtgcatttgtcatgtagttctcgtggcttggttttcagctccatcaggtcctttaaggacttatctgcattggttattctagt

SEQ ID NO: 939446 - DNA, 619 bp, Homo sapiens
aattggaattcccatcggttacatttatgacaatccgtgaccactcttcaaggttcatctggcttctgcacaggctaaactggtaagttaaatgggagatattatagctatcaccacctctgcttgtttcaaggttttgatagtggcatttacttctgcagctctcctaggaatgcagcactgcttctggtttacyatcctggtagggaagttccaggtgctaccacttagcctttcctaccatagtgatcttcactgcatgggtcagagaaccaatgtgggaatgtgccagttgccatgtgtgtctgttccatgtatgtctgctctgtagtgtgtacctactccctttgatcttgctgagatctgtcctgacgtatagatctctctacatttaggagctgggaaacaactgcagggtgggtctgtggactaatttggtccactgttagtgagacgtaggactccatctatcatctaaccaccataagcctctactttgacttgctgaccataataacattttgaagccctaggaattagcaccaattcagagtcagtttccagctttccctaaaaggtcggggcatttcttgttctccaatgcacagtcactttagta

SEQ ID NO: 939447 - DNA, 601 bp, Homo sapiens
accctgtttgcctgggtatcagcagcagaggctgcagaacagcagatattggtgaacagcaaatgttgctgcctgatcgttcctctggaagttttgtctcagaggagtacctggccctgtgaggtgtcagtctgcccctactggggggtgcctcccagttaggctcctcgggggtcagggacccacttgaggaggcagtctctgttctcagatctcaagctgcgtgctgrgagaaccactgctgtcgtcaaagctgtcagacagggacatttaagtctgcagaggtttctgctgcctttatttggctatgccctgcccccagaggtgaagtctactgaggcagacaggcctccttgagctgcggtgggttccacccagttcgagcttcctagccactttgcttacctactcaagcctcggcaatggcgggcgcccctcccccagcctcgctgccgccttgcagtttgatatcagactgctaatgctagcaatgagcaaggctctgtgagcgtaggaccctccgagccaggcatgggatataatctcctggtgtgccgtttgctaagactgttggaaaagcacagtattagggtgggagtga

SEQ ID NO: 939448 - DNA, 632 bp, Homo sapiens
ttgctggaggcccaccccagaccctgtttgcctgggtatcagcagcagaggctgcagaacagcagatattggtgaacagcaaatgttgctgcctgatcgttcctctggaagttttgtctcagaggagtacctggccctgtgaggtgtcagtctgcccctactggggggtgcctcccagttaggctcctcgggggtcagggacccacttgaggaggcagtctctgttctcagatctcaagctgcgtgctgagagaaccactgctgtygtcaaagctgtcagacagggacatttaagtctgcagaggtttctgctgcctttatttggctatgccctgcccccagaggtgaagtctactgaggcagacaggcctccttgagctgcggtgggttccacccagttcgagcttcctagccactttgcttacctactcaagcctcggcaatggcgggcgcccctcccccagcctcgctgccgccttgcagtttgatatcagactgctaatgctagcaatgagcaaggctctgtgagcgtaggaccctccgagccaggcatgggatataatctcctggtgtgccgtttgctaagactgttggaaaagcacagtattagggtgggagtgacccaattttcc

SEQ ID NO: 939449 - DNA, 630 bp, Homo sapiens
cagtcacattataagtatcattatatatgttaaagttcaaaatatgtggacccttctatttcggagatgctcacatcctctgctgcatggtaaatcactgttccatggaacttgcaattcctctcccttttcctctttccaggatcattttgagggttatgcatttgcccttcagcagtgatgaatggagtgttgtgctaatgctggactctaccattattcatgtccccatcctctgtccaggccgttaattgcagcatcctggaagtggaagcaaaaactgtattacagaggaaactttcatcttcctgattataatacctgrcaaaaggcaggcttttctattaatctcagataccttccaccggagaggcatccattcactcactgtacatacacagggcccacatccaggcatcatcacacagaaacagaatatgtggctcatgggatctataacttcggtctgaagaagctgagctgataatcatatcactccactgccacatccttaatcagcctattatgggcataaattaagagttttagtgaagaaaatctgtgtcccagaatttctgattgccaggacccagatgagctctgctgaatataaagtattccaccatattc

SEQ ID NO: 939450 - DNA, 565 bp, Homo sapiens
gctacttgggagacagaggttacagtgagccaagatcatgccactgtaccccagcctaggcaacagagcaagacccagtctcaaaaaagctaaaataaatttaatattaaaaaaaaaaaccctagagacaaatcacagattgggagaaatagttacaaatcacctatctggcaaaggacatttatccacagtatataaagaactctcaaaattcaataataagcaatccagtagaaaaatgagcaaaagatttgaatagacactttaccaaagccatatataacaaatcaacaaattaaaattaattcagcatcattaatgaaacccctctaaaatgggcttaaacattagagatcaagtattggatcccactaggaaattccacggagagattaacatcaatcaatcyaaacctttaacagagttattcatgacaccatcactttgctgggcagcagaagggaggcccttcactctgctactgaggcagacaggcccccttccatggccatgagatgaatgccagctcagccaagctacagtctggtaggagcatttcttagaa

SEQ ID NO: 939451 - DNA, 782 bp, Homo sapiens
gttacaacaacagagtgatgtttcattcacatcatatacttgttctggcatcatttacatcagtgataatcttggcaaacccatcaatgaatttgtccactttgtgatcagcagttgctttatcacaagtctttacagatttaatgctacgtcttttcttaaatttctgcaaccagcctgttgaatagtcaccgttcccttcaattttcagttcattgtgatagatctatgcttatttcataatcaacatactattaaatggtatacgttcattgtgacactgatccattattttaatataggaccaagatcttcagtttcagctttatgcagtatttatctgtttttcactaacctccatacatcactttcagcacagaacttcaacagtttattcttctgttcttcaggtcatatatagtggtcattccaaaactatactcttctgtaagatgtttcaggcttacactgctgcatattttctccagcaacttggctttctgtgctgtagrtaaacataaacacttcctctttttcttatcattgttacccatagggatatctgcagacatttttgacattttccacatctttataccagaaagcagaaaataagcaaaaacaataataacaacaacaacaacaaaaagtgagtaatgcacataggtcttggccccacgtagggcatcatgtggaacctagcattggcatgtcccgcctgcatatgtgtatgtgccattttattagcctttgtgagtgtgctgacataggggagtctgggc

SEQ ID NO: 939452 - DNA, 782 bp, Homo sapiens
gttacaacaacagagtgatgtttcattcacatcatatacttgttctggcatcatttacatcagtgataatcttggcaaacccatcaatgaatttgtccactttgtgatcagcagttgctttatcacaagtctttacagatttaatgctacgtcttttcttaaatttctgcaaccagcctgttgaatagtcaccgttcccttcaattttcagttcattgtgatagatctatgcttatttcataatcaacatactattaaatggtatacgttcattgtgacactgatccattattttaatataggaccaagatcttcagtttcagctttatgcagtatttatctgtttttcactaacctccatacatcactttcagcacagaacttcaacagtttattcttctgttcttcaggtcatatatagtggtcattccaaaactatactcttctgtaagatgtttcaggcttacactgctgcatattttctccagcaacttggctttctgtgctgtaggtaaacataaacacttcytctttttcttatcattgttacccatagggatatctgcagacatttttgacattttccacatctttataccagaaagcagaaaataagcaaaaacaataataacaacaacaacaacaaaaagtgagtaatgcacataggtcttggccccacgtagggcatcatgtggaacctagcattggcatgtcccgcctgcatatgtgtatgtgccattttattagcctttgtgagtgtgctgacataggggagtctgggc

SEQ ID NO: 939453 - DNA, 609 bp, Homo sapiens
atgaatgggtaatgaattttgtcaaaggcattctcaggatctatagaaatagacatataaattttccttagatttatcaatatagcgtattgtataaatagatttcctaatgttgagccaacttgtatcctttaaatatatgctatttcgtcatattgtattattattattattattattattattatgtatatattttttgmgacagagtctctctctgttgccaggctggagtgtagtggtgccatctcaggtcactgcaatctcctcttcctgggttcaagtgattccctagcctcagcctcccgagtagctgggactacaggggcacgccaccacattcagctaattttatttgtattttaatagagaacggggtttcaccctgttggccaggatggtctcgatttcctgacctcatgatccacccaccttggcctcccaaagtgctgggattacaggcgtgagccaccacattgggcctgtatcattctttttaatgtggtagtggattctatttgctaatattttgtttgctgattcccttaacttttgccacacctttaaaaagaccccatcccaatttttttttttttttttcaaaatccc

SEQ ID NO: 939454 - DNA, 633 bp, Homo sapiens
ttccatacttgacacagtgattgtggcacccactggtctagctgtggtctacaaggaacccccaaagggaagggcacagtgagcaggggcattgtcctgagtgacaaggattggagggggcagggtggatgcagggagaggactggccagatgccatgtgtctggccttagactgcctggttcaaattgggcttcaccctttttgacttcatgatctggtacaagttatatgaaaatgtgttgctccttttctagtctgtaaaataatcctgaaatgtgcactaataactgggagactacgcagatgaaatgaaacaagctgcagagagcacagagctcagagcctggcctttaggaagccctcagtaagggttcatgatgtcgtggtgtctgtcaccatcctctttatcctcatcatcaccttcatcatctttttattgttctgagggaatagtttagaggggctcattccctgctatcgtgggtgagaygtctatgaaaaggacaaccagtgggggagggaagcaaaattttgaagaagattcctgagagagaccccccaccacaaccaagaacagaaactccacagtctgctgagctgacagttagcacattggtctcctcccatctgcc

SEQ ID NO: 939455 - DNA, 633 bp, Homo sapiens
ttccatacttgacacagtgattgtggcacccactggtctagctgtggtctacaaggaacccccaaagggaagggcacagtgagcaggggcattgtcctgagtgacaaggattggagggggcagggtggatgcagggagaggactggccagatgccatgtgtctggccttagactgcctggttcaaattgggcttcaccctttttgacttcatgatctggtacaagttatatgaaaatgtgttgctccttttctagtctgtaaaataatcctgaaatgtgcactaataactgggagactacgcagatgaaatgaaacaagctgcagagagcacagagctcagagcctggcctttaggaagccctcagtaagggttcatgatgtcgtggtgtctgtcaccatcctctttatcctcatcatcaccttcatcatctttttattgttctgagggaatagtttagaggggctcattccctgctatcgtgggtgagacgtctrtgaaaaggacaaccagtgggggagggaagcaaaattttgaagaagattcctgagagagaccccccaccacaaccaagaacagaaactccacagtctgctgagctgacagttagcacattggtctcctcccatctgcc

SEQ ID NO: 939456 - DNA, 441 bp, Homo sapiens
gatcttggacagcttctcccctgtggctttgcagggtacagatgttctcctgctgccttcatgggctggcattaagtgtctgtggcttttccaggcacacagtgcaagctgtcagtggatctaccattctggggtctgaaggatggtggccctcttctcacagctccactaggcagtgccccagtggggactctgtataggggctcccaccccacatttttcttccacactgccctagcagaggttctccatgagggatctgcccctgcagcacacccctgcctggacattcaggcatttccatayatcctctgaaatctaggtggaggttcctaaaccttaattcttgacttctgcataccctcagtcccaacaacacaggtgagctgccaaggcttggagtttgcaccctctaaagcaatggcctgagctctacattag

SEQ ID NO: 939457 - DNA, 594 bp, Homo sapiens
attagaagtagctaaccaggtgtttgtaaacagggatgcagtaagctgtaaggaaaattgcaaagagaatgaacgtcaggcccggcgaaacaccgacctgtttgttagctgcagcaatcagaggggtacccccaaagaggcaagggaaggggagccctgggaaagaaactcagccttgagaaacagctccagtctacagctcccagcgtgagcgmtgcagaagatgggtgatttctgcatttccatctgaggtaccgggttcatctcactagggagtgccagacagtgggagcaggacagtgggtgcagcacactctgcgagagccaaagcaaggtgaggcactgcctcactcgggaagtgcaaggggtcagggagttccctttcctagtcagagaaaggggtgacagacggcacctggaaaatcgggtcactcccaccctaatactgcacttttccaacaggcttaaaaaaatggcacaccaggagattatatcccgcacatggctcggagggtcctatgcctgcggagtctcactgattgctagcacagcagtctgagatcaaactgcaaggtggtagcaaggctgggggag

SEQ ID NO: 939458 - DNA, 594 bp, Homo sapiens
attagaagtagctaaccaggtgtttgtaaacagggatgcagtaagctgtaaggaaaattgcaaagagaatgaacgtcaggcccggcgaaacaccgacctgtttgttagctgcagcaatcagaggggtacccccaaagaggcaagggaaggggagccctgggaaagaaactcagccttgagaaacagctccagtctacagctcccagcgtgagcgatgcagaagatgggtgatttctgcatttccatctgaggtaccgggttcatctcactagggagtgccagacagtgggagcaggacagtgggtgcagcacactctgcgagagccaaagcarggtgaggcactgcctcactcgggaagtgcaaggggtcagggagttccctttcctagtcagagaaaggggtgacagacggcacctggaaaatcgggtcactcccaccctaatactgcacttttccaacaggcttaaaaaaatggcacaccaggagattatatcccgcacatggctcggagggtcctatgcctgcggagtctcactgattgctagcacagcagtctgagatcaaactgcaaggtggtagcaaggctgggggag

SEQ ID NO: 939459 - DNA, 627 bp, Homo sapiens
ccagaggtacaaagaggcgctgctaccattccttctgaaactattccaaacaagagaaaaagagggaatcctccctaactcattttatgaggccagcatcatcctaataccaaaacctggcagaaacacaacaaaaagaaaatttcaggccaatatccctgatgtcccatcaatgtgaaaatcctcaataaaatatggcaaactgaatccagcagcacatcaaaacttatccaccatgatcaagtcagcttcatacctggaatgcaaggctggttcaacatatgcaaatcaataaacgtaatccagcatataaacagaaccaatgagaaaaaccacatgattatcttaatagatgcagaaaaggccttcaacaaaattcaacaccccytcatgctaaaaactctgaataaagtaggttttgatgaactgtatcttaaaataataagagctatttatgacaaacccacagccaatatcatactgaatggacaaaaacttgaagcattccctttgaaaactggcacaagactaggatgccctctctcaccactcctattcaacatagtgttggaagttctggccagggcaattaggcaggagatggaaataaagagtattcaaatagga

SEQ ID NO: 939460 - DNA, 483 bp, Homo sapiens
cggagcacacagtctggggatcagggaattgcccaacccattccatcatcattggcacatgaacactccttccaggatctgaaggtggacctagtcactcagttgttactacttcagctggcatctactggcacacaccatytatgggcctggagattggcctgcttagccaattgcagccaccaccatcaccagcatgcaccacttgggaactagagggttgacctcccactgccattgccattgcccaaattacatcagctgtcaaggggcccactaacccacccatccacctagcccaccattgtcactactggcatttgagtaaactccttggaagcccaatatttggcctgcttggacccactaataccaataccagcatatgctgccctggggcccagggacatgcacattcagcctaccgctactaccactgagtcttgaagactggctcacttggcatcccagtctccagcaaaa

SEQ ID NO: 939461 - DNA, 627 bp, Homo sapiens
cagtaacttctttgtgatgtttgcattcaagtcacagagttgaacattccctttcatagagcaggtttgaaacactctttttgtagtatctggatgtggacatttggagcgctttcaggcctatggtgaaaaaggaaatatcttcccctgaaaactagacagaagcattctcagaawctaatttgtgatgtgcgccctcaactaacagtgttgaagctttcttttgatagagcagttttgaaacactctttttgtaatatctgcaagaggatatttggatagctttgaggatttcgttggaaacgggattgtcttcatataaactctagacagaagcattctcagaagcttcattgggatgtttcaattgaagtcacagtgttgaacagtccctttcatagagcaggtttgaaacactctttttgtagtatctggaagtggacatttggagagatctcaggaatacggtgataaaggaaatatcttccaataaaagctagatagaagcaatgtcagaaactttttcatgatgtatctactcagctaacagagttgaacctttcttttgagagagcagttttgaaacactctttttgtggaatctgcaagtggatatttgtctagctt

SEQ ID NO: 939462 - DNA, 615 bp, Homo sapiens
tctttttgtggaatctgcaagtggatatttgtctagctttgaggatttcgttggaaacgggattacatataaaaagcagacagcagcattcccagaaacttctttgtgatgtttgcattcaagtcacagagttgaacattccctttcatagagcaggtttgaaacactctttttgtagtatctggatgtggacatttggagcgctttcaggccaatggggaaaaaggaaatatcttcccctgaaaactagacagaagaattctcagaatcttatttgtgatgtgcgccctcaactaacagtgttgaagctttcttttgrtagagcagttttgaaacactctttttgtaaaatctgcaagaggatatttggatagctttgaggatttctttggaaacgggattgtcttcatataaactctagacagaagcattctcagaagcttcattgggatgtttcaattgaagtcacagtgttgaacagtccctttcatagagcaggtttgaaacactctttttgtagtatctggatgtggacatttggagcgctttcaggcctatggtgaaaaaggaaatatcttcccctgaaaactagacagaagcattctcagaaactta

SEQ ID NO: 939463 - DNA, 530 bp, Homo sapiens
tcaggagatcaagaccatcctggctaacatggtgaaaccccgtctctactaaaaatacaaaaaaaaaccatagccaggcatggtagcgggcacctgtagtcccagctactcgggagggtgaggcaggagaatggcatgaatccgggagtcggagcttgcagtgagctgagatagcgccactgcactccagcctgggtgaaagagcgagactccgtcaaaaaaaaaagttgtggccaggtgcggtggctcatgcctgtaattatagcactttgggaggccgatgtaggcagatcacytgaggtcaggagttcaagaccagcatggtgcacttctgtctctactaaaaatacaagattagcttggtgtggtggcgggtgcctgtgatcccagctacttgggaggttgaggcaaaagaattgcttgaacctgggaggtggaggttgcagtgaaccgagatggtgccattgcactccagccagggcaacaagagcaaaactccatctcaaaaaaagacttctacatgcagacga

SEQ ID NO: 939464 - DNA, 530 bp, Homo sapiens
tcaggagatcaagaccatcctggctaacatggtgaaaccccgtctctactaaaaatacaaaaaaaaaccatagccaggcatggtagcgggcacctgtagtcccagctactcgggagggtgaggcaggagaatggcatgaatccgggagtcggagcttgcagtgagctgagatagcgccactgcactccagcctgggtgaaagagcgagactccgtcaaaaaaaaaagttgtggccaggtgcggtggctcatgcctgtaattatagcactttgggaggccgatgtaggcagatcacttgaggtcaggagttcaagaccarcatggtgcacttctgtctctactaaaaatacaagattagcttggtgtggtggcgggtgcctgtgatcccagctacttgggaggttgaggcaaaagaattgcttgaacctgggaggtggaggttgcagtgaaccgagatggtgccattgcactccagccagggcaacaagagcaaaactccatctcaaaaaaagacttctacatgcagacga

SEQ ID NO: 939465 - DNA, 576 bp, Homo sapiens
agaaagacggggaggtaaaccagaaggagcagagagcaccgccagttaggccctgtccttgctgtttgtaggagatgatattactgctcacctatcctgtgcctctatcctgtgcccctcacatggaggattatataccttcatcctgttcaattctggtagaktcacaagacttgttttggccaaggaagcataagcagaagtgatgtgtgtcacttctaggaagatgcttctaagagccaatgtgtggttgctatattctctggtccatctgacagagttccagatagaggctgctcagtcagcttgggccctaggcagagactgaagtggaacagagccacagctaagcaacatggccacatagcacagtagggagttgaaagttgtagctgcacattaaggtttagggatcatttgttacctaagcataattgaaactatcctgactgactccctttttgtcctccttcttcagccctctaacatgggccgtgtgttcccactctgggttcccttgaaaagcccctatgtgtttctatgtcctaacatgtaccatggcatattggaacatgt

SEQ ID NO: 939466 - DNA, 584 bp, Homo sapiens
aaaaaagaaacaaaggatatataagacaataagaaaacacttaacaaaaagacaggagtaaatcctcacatatcaataacaaccttgattgtaaaccatttaaattcagaattagaagatatagactgtctaaatgtataaaaaaaagaccaaactgtattctgcctccacaaactcactttacctgtaaaaacacatatagactaaaagtgaggggatggaaaaagatattctatacaaatgaaaaccacaagtaaacaggaatatctatacttacatcagataaaatagaccttaagtcaaaaaaagacaaaaagagacaaagaaggttattatgtaatgataaatgtatcaattcatcaagaggatataacaattgtaaatatgcatgtacccaacaccagaacatccagatatataaaacaaatattaytaaagctaaagggaaagatagaccccagtacaatagtagttgagaacttcaacatcccactttcaggattggaccagtaatctagatagaaaattaacaaacattggactgaacccgcaatatagaatagatgaacctaacgaatatttta

SEQ ID NO: 939467 - DNA, 728 bp, Homo sapiens
caggaaggatggatgttgtgatagtaaatagggaaggcctcactaacaaggaacatttaagcaaagtcacttagatatttgagggaagagctttataagcattgagaggaactttcatcaaggctttgggtgggagcaaacctgtgtgttagaagatagcccggaggccaatgtgcctggaaaggagagaaggagggagagcccaatgggagacgaggccagagagaagtgggtagcaacctctaggccataataaaaactttgtcctatcctgtcagtgagckgtgaggccagggaaaatttaaatagaagaataacaagatctgacttacattttcaaagactactctgattgctactgaaaataggtatttgctattaaaataggtatttgctgttgctattgaaaacaggaaaaaacagatgcagtaagtctagttaagaggctattaatatattccagacagcaaataatgggaacttgggccaaagtaatagtggtgaagatgatgtgaagtgtgtagattctggaaatattattaagatagggctgacggcaattgctggtgggccagatacaggttatgagaagaagactggagtcaaggatttcagtctgagcaaatgaaaggacacagttgtcatttattgagatgagataaagcatcttggtgagggaagcagattttggggaagatgattaggagttcagggttggccgtcttaag

SEQ ID NO: 939468 - DNA, 598 bp, Homo sapiens
atagatctcatgactgtgaatacacaggtgattcttgaacacagatcttttatctgcaggtccagaggtctccccactatagcagggtggtctcctgaggtcatccttgatatcaccgcctaaaacggacagagtgagggctttaagaatgaggattttattcataaatgtatcaccagtacctagaacagggcctggaacattgycaatggttcaaaaccataactagttaaatgaacaaacaaatagaggactatctacccatccactaaatagaagtaatgaaatattttgacttaaacactttctttctaaatatatccttattttctataacattctgggtgacaatcaacacaaatcctggctttgtggaatgagttcctctcctgccttgagtatctgtcgtttaagttaatttttttaaaggacattttctcccaacattcccccatcaatatccattacatgctgcttttgccagtctttttctggcttaacagtgtcaggcattaatgcatctatctacaagggaaaacactattaatctaaaaaaattatagcatctctgccatgccataaatccaaattttatcaa

SEQ ID NO: 939469 - DNA, 737 bp, Homo sapiens
ggcaggctgtgcttctcttaccaaccctgcttcggtgacaccgggttgtttgcctgacattggccgtggtgtgagtgttgacctcacagaaacgggcccgggctaccagccggggctgcgttctcccagagcactggaggatacacatctgccggtcacacgctggccatgtcttttcacattcagaataatttcctgatcactcttctgcccatatgagcaaaagtccagtctccatgattgccctgccccggcctgctcatagctcaccctcccgtgttcccaggaatcccaggagcccgcctcgagggccgtatcctgcttccagaggcatcgtggacagagaaaggaagcccgaggcccatccctggcttgactgcgtgggacgcgttctccgctgcccttgcttccctcacgtggagcggagagcaggcgctgagaaggggccctgcgtggtgacccactagggttagttcagagccttgtgcacacagacccgagggggttttcaaaggaagctgacrcccccgcgagctgagggtggctgttctcacgcatgctcagtggcgctccctgagtgctgagagccacggtcggtgagagaggagcttcctgatgagcctcagacggtgctgaaaccagccgactctgcccaggatcctgagtcctggtttcctgttgacccttccttccctcacgacttatttcccctgggaactatcgatgttcttttggcc

SEQ ID NO: 939470 - DNA, 777 bp, Homo sapiens
ggctctgcgtaaattactttttctctattgcaattcccctgtcttgataaatcagctctgtctaggcagtgggcaaggtgaaccccttgggcagttacaaatgtgtgggctcatccgggattgcccttgtggctgcctgcccatggttcagtagccccctctccagcgatggatccagaggccagaccaagcggccacgtagttctctcggactaggggctaattgtggtattctctctgctggtggggcgctgccgacrcaatatgcatggatttaattgcaatagaattatagtcctggggaggcatctcttaactgtaaccctatcacaggatgtctgtctgtagccccatggtggggtatatgtttgtaaccccattgcaggatatctgggttggtgagtatcctaggcattgccaatgcctccttccttctgctgactggttctgtaccctccggtggggtgtctgtagccccactgagggatgttggcttgtagctccaccatggggtgtctgtgtctgtaacccaattcggggtgtctgtctcagtttgtctcctgggggtctcagttggctctttcttttatatttattttttgagacagagtctccctctgtcacccaggctggagtgcagtggcacaatcttggctcactgcaacctctgcctcctgagttgggatcaagtgattctgctgcctcagcctcctgagtagctggcactacaggtgtgcaccagcatgcccggctaatttttgcattttttgtagagat

SEQ ID NO: 939471 - DNA, 777 bp, Homo sapiens
ggctctgcgtaaattactttttctctattgcaattcccctgtcttgataaatcagctctgtctaggcagtgggcaaggtgaaccccttgggcagttacaaatgtgtgggctcatccgggattgcccttgtggctgcctgcccatggttcagtagccccctctccagcgatggatccagaggccagaccaagcggccacgtagttctctcggactaggggctaattgtggtattctctctgctggtggggcgctgccgacgcaatatgcatggatttaattgcaatagaattatagtcctggggaggcatctcttaactgtaaccctatcacaggatgtctgtctgtagccccatggtggggtatatgtytgtaaccccattgcaggatatctgggttggtgagtatcctaggcattgccaatgcctccttccttctgctgactggttctgtaccctccggtggggtgtctgtagccccactgagggatgttggcttgtagctccaccatggggtgtctgtgtctgtaacccaattcggggtgtctgtctcagtttgtctcctgggggtctcagttggctctttcttttatatttattttttgagacagagtctccctctgtcacccaggctggagtgcagtggcacaatcttggctcactgcaacctctgcctcctgagttgggatcaagtgattctgctgcctcagcctcctgagtagctggcactacaggtgtgcaccagcatgcccggctaatttttgcattttttgtagagat

SEQ ID NO: 939472 - DNA, 777 bp, Homo sapiens
ggctctgcgtaaattactttttctctattgcaattcccctgtcttgataaatcagctctgtctaggcagtgggcaaggtgaaccccttgggcagttacaaatgtgtgggctcatccgggattgcccttgtggctgcctgcccatggttcagtagccccctctccagcgatggatccagaggccagaccaagcggccacgtagttctctcggactaggggctaattgtggtattctctctgctggtggggcgctgccgacgcaatatgcatggatttaattgcaatagaattatagtcctggggaggcatctcttaactgtaaccctatcacaggatgtctgtctgtagccccatggtggggtatatgtttgtaaccccattgcaggatatctgggttggtgagtatcctaggcattgccaatgcctccttccttctgctgactggttctgtaccctcyggtggggtgtctgtagccccactgagggatgttggcttgtagctccaccatggggtgtctgtgtctgtaacccaattcggggtgtctgtctcagtttgtctcctgggggtctcagttggctctttcttttatatttattttttgagacagagtctccctctgtcacccaggctggagtgcagtggcacaatcttggctcactgcaacctctgcctcctgagttgggatcaagtgattctgctgcctcagcctcctgagtagctggcactacaggtgtgcaccagcatgcccggctaatttttgcattttttgtagagat

SEQ ID NO: 939473 - DNA, 775 bp, Homo sapiens
ccactgagggatgttggcttgtagctccaccatggggtgtctgtgtctgtaacccaattcggggtgtctgtctcagtttgtctcctgggggtctcagttggctctttcttttatatttattttttgagacagagtctccctctgtcacccaggctggagtgcagtggcacaatcttggctcactgcaacctctgcctcctgagttgggatcaagtgattctgctgcctcagcctcctgagtagctggcactacasgtgtgcaccagcatgcccggctaatttttgcattttttgtagagatgggattttaccacactggccaggctggtctcgaacttctgtcctcaagtgatcctcctgccttggcctcttaaagtgctgggattacaggcgcgagccactgcgcccagcctcagttggctctttctaactagtagaaagagtcttggtttgggagacttctcctcaatcaggaagatttcgaggagatttctcagatggagaatagaaggacagtttggaagggacactcttggagttcttggttagggatctgatttggaaaacgctgtgttcatcttgtctttatgtgtgtttgtatatgtggaggggatctcagagggaattgctgatggacgttcagcaggcctaactcagagaaccctccttatttgtctggtcacattcggtgagccctgaaaaatgctcagcaggcctgtctcggggtgactatgtgctcttcgccttgcccagagaccccattgtgaattaccct

SEQ ID NO: 939474 - DNA, 775 bp, Homo sapiens
ccactgagggatgttggcttgtagctccaccatggggtgtctgtgtctgtaacccaattcggggtgtctgtctcagtttgtctcctgggggtctcagttggctctttcttttatatttattttttgagacagagtctccctctgtcacccaggctggagtgcagtggcacaatcttggctcactgcaacctctgcctcctgagttgggatcaagtgattctgctgcctcagcctcctgagtagctggcactacaggtgtgcaccagcatgcccggctaatttttgcattttttgtagagatgggattttaccacactggccaggctggtctcraacttctgtcctcaagtgatcctcctgccttggcctcttaaagtgctgggattacaggcgcgagccactgcgcccagcctcagttggctctttctaactagtagaaagagtcttggtttgggagacttctcctcaatcaggaagatttcgaggagatttctcagatggagaatagaaggacagtttggaagggacactcttggagttcttggttagggatctgatttggaaaacgctgtgttcatcttgtctttatgtgtgtttgtatatgtggaggggatctcagagggaattgctgatggacgttcagcaggcctaactcagagaaccctccttatttgtctggtcacattcggtgagccctgaaaaatgctcagcaggcctgtctcggggtgactatgtgctcttcgccttgcccagagaccccattgtgaattaccct

SEQ ID NO: 939475 - DNA, 812 bp, Homo sapiens
cccccacttatctatcataagtgggacacacatatgggaggaaaagtttccttttccttctacccatcctaggttctctggctgaggtcctataaattagaatggcaaaagacaggttgacaaaatagaaacaaacaaggttattaacatgctcakcatgcacacacatgggagcactcagccatgagtcactccaagggtttattagaacttgggctgatagagcttctaaacaaaataatgacaaattttagaggagtgacaagacaaaggaaaagacctttgggcttctaggacagcaaactgcagccagctaaacacatgggaaatgaatggaggataagggctagttcctagtagtcaagtttgctgagtagattcctccagtgctgtctccaggctgataaggcctagacttgccccagtgattggcttctgtccttcctggtagagacaggagtggggacaccttcactaaattatgtcctgcttttaggcaaagaggggcaggagagagagcttcacttatatctacatcttaaaaattgtcttcagctcaaaatgatccttatgccaaagtggtgtctttgggggtggctgactctgctgctctttacttaccttgaactcccaccatcatggctgcctcagaatcccacagggcatcgagaatgttctatgcaaatggagaggccaggagcagtggcagacgtgcaggtggcacaaatctctgctctcaggcctgctcccggtcccagtgacgtttagagcacacgtccaaagatatgatgaagaatttccaggtggtgaca

SEQ ID NO: 939476 - DNA, 812 bp, Homo sapiens
cccccacttatctatcataagtgggacacacatatgggaggaaaagtttccttttccttctacccatcctaggttctctggctgaggtcctataaattagaatggcaaaagacaggttgacaaaatagaaacaaacaaggttattaacatgctcatcatgcacacacatgggagcactcagccatgagtcactccaagggtttattagaacttgggctgatagagcttctaaacaaaataatgacaaattttagaggagtgacaagacaaaggaaaagacctttgggcttctaggacagcaaactgcagccagctaaacacatgggaaatgaatggaggataagggctagttcctagtagtcaagtttgctgagtagattcctccagtgctgtctccaggctgataaggcctagacttgccccagtgattggcttctgtccttcctggtagagacaggagtggggacaccttcactaaattatgtcctgcttttaggcaaagaggggcaggagagagagcttcacttatatctacatcttaaaaattgtcttcagctcaaaatgatscttatgccaaagtggtgtctttgggggtggctgactctgctgctctttacttaccttgaactcccaccatcatggctgcctcagaatcccacagggcatcgagaatgttctatgcaaatggagaggccaggagcagtggcagacgtgcaggtggcacaaatctctgctctcaggcctgctcccggtcccagtgacgtttagagcacacgtccaaagatatgatgaagaatttccaggtggtgaca

SEQ ID NO: 939477 - DNA, 812 bp, Homo sapiens
cccccacttatctatcataagtgggacacacatatgggaggaaaagtttccttttccttctacccatcctaggttctctggctgaggtcctataaattagaatggcaaaagacaggttgacaaaatagaaacaaacaaggttattaacatgctcatcatgcacacacatgggagcactcagccatgagtcactccaagggtttattagaacttgggctgatagagcttctaaacaaaataatgacaaattttagaggagtgacaagacaaaggaaaagacctttgggcttctaggacagcaaactgcagccagctaaacacatgggaaatgaatggaggataagggctagttcctagtagtcaagtttgctgagtagattcctccagtgctgtctccaggctgataaggcctagacttgccccagtgattggcttctgtccttcctggtagagacaggagtggggacaccttcactaaattatgtcctgcttttaggcaaagaggggcaggagagagagcttcacttatatctacatcttaaaaattgtcttcagctcaaaatgatccttatgccaaagtggtgtctttgggggtggctgactctgctgctctttacttrccttgaactcccaccatcatggctgcctcagaatcccacagggcatcgagaatgttctatgcaaatggagaggccaggagcagtggcagacgtgcaggtggcacaaatctctgctctcaggcctgctcccggtcccagtgacgtttagagcacacgtccaaagatatgatgaagaatttccaggtggtgaca

SEQ ID NO: 939478 - DNA, 599 bp, Homo sapiens
ttgggccctaaggtggaggcaggaccttcctgacttccaccctccaaacgcctactcctatgatatggatgcacgcacatgccaaagcatccatgtttatacacatctgcatgcctggacaggctcaaaggtgcagatgcaaaagcatgcctatgacaagtatatggatttgggcaaccatgcaaacaagattttaggaaccttcagcttggctcataccttgcccccagagctggtcatccctgagtgctagttcttgagtgctcttcccctactgtcctacctttaggtctcaaacgggtcmcatctgtgtactcatcatccatctattcattcatccatttatccatttacctatccaccttccacccatctgctatccaccatccatccatccatccatccatcatctgtccattcatctatcatccatccttctatcgtctgtccatcaatccattcataatccatccattcatccatttatcatccatacagctaccatccatccattcaccatccaccatccatccattcaccatccactcatccaccatccatccatttactattcatctatccatcctgctgttcatcca

SEQ ID NO: 939479 - DNA, 590 bp, Homo sapiens
cagtgatgtgaacataggtcagtgtagcctccaccccctgggctcaagcgatcctcccaccgcagctttgcaagtagctgggattacaggcacatgcctccacagggtctcactatgttgcccaggctggtcttgaactcctgggctcaaacagtcctcccaccttgacctcccaaagtgcygggattacagacatgagccatggtgcctggccaagtcccacttctgacaccaattctagagaacaacacactcactgtttttctcctattatactctcacagcacagaacactctgtgaccagatgtgtgggggccaaacaccaagcaattctctagcagacagcaactggctgtccacacttcaattcaattctgatactttctatgtggagttagagtcagatttcatagatgaagagctcagtcccacaagactgccccacttcagatgccagtgggaagtcccaagccacccacacttctgactgaacagctatgaaatggggttcccactacccctccttgagtttgattaacttgctaagacagctcccagaattcatagaaatacttgtattgagcagctg

SEQ ID NO: 939480 - DNA, 590 bp, Homo sapiens
cagtgatgtgaacataggtcagtgtagcctccaccccctgggctcaagcgatcctcccaccgcagctttgcaagtagctgggattacaggcacatgcctccacagggtctcactatgttgcccaggctggtcttgaactcctgggctcaaacagtcctcccaccttgacctcccaaagtgctgggattacagacatgagccatggtgcctggccaagtcccacttctgacaccaattctagagaacaacacactcactgtttttctcctattatactctcacagcacagaacactctgtgaccagatgtgtgggggccaaacaccaagcaattctctagcagacagcaactggctgtccacacttcaattcaattctgatactttctaygtggagttagagtcagatttcatagatgaagagctcagtcccacaagactgccccacttcagatgccagtgggaagtcccaagccacccacacttctgactgaacagctatgaaatggggttcccactacccctccttgagtttgattaacttgctaagacagctcccagaattcatagaaatacttgtattgagcagctg

SEQ ID NO: 939481 - DNA, 678 bp, Homo sapiens
tgatatctattggggaatagagaagcctcatctctattaaaaaataaaattaggcctggcatgttggctcacgcctgtaatcccagcactttgggaggccaaggcaggtggatcacgaggtcaggagttcaagaccagtctggtcaacatggtgaaaccccgtctctactaaaaatacataaattagcagggtgcagtggtgggcgcctgtagtcccagctactcaggaggctgaggcagaagaatcacttgaacccaggaagtggaggttgcagtgagccgagatcttgccactacactctagcctgggtgacagagcgagactccgtctcaaaaaaattaaattwaatttaatttaaattaaaaagaaaaaaaaaagaccagttgtggtggctcatgcctgtaatcccagcactttggaaggccaaggtgggcggatcatttgaggccaggagttcgagacgagcctggccaacatggtgaaacctggtctctactagaaatacaaaaattggcccggcgtggtgacacacacctgtaatcccagctactcgggaggctgagacacaataatcgcttgaacccgggaggtggaggctgcagtgagccaaggtcgcaccactgcgctccagccagggcaacagaacgaaactctgtccgtctcaaacaaggacaaca

SEQ ID NO: 939482 - DNA, 571 bp, Homo sapiens
  misc_feature 1, 2, 3, 4, 5, 6, 7, 8, 9, 10, 11, 12, 13, 14, 15, 16, 17,18, 19, 20, 21, 22, 23, 24, 25, 26, 27, 28, 29, 30, 31,32, 33, 34, 35, 36, 37, 38, 39, 40, 41, 42: n = A,T,C or G
nnnnnnnnnnnnnnnnnnnnnnnnnnnnnnnnnnnnnnnnnntgtaggtgtggttcatggcccaggtggtgtggtttgggggcaaagagctgtcctagaagtttcctaatttggcaggtggttttcctgttcagcagcttcagcagcagtggtagtatactcatacataatcagaaatattccagttatctgttgctgtrtaatgaaccatccccaaacttagtgacttaaaacaaaatttattattacttctcatggtctaagcataaactgggctcaagtaggtaagcttcccttgggctctcttatgacgttacattcagatgtgcaccgggctacagttatttgatggctcaactgggctggatgtcctggggtctcactctctggcagttgaagccagctattggctgggaattcaccagaatttggtggctgacgcacctaccgtgacacacctcactgtgttgttcaggctgcccatgacgtggtgtccaggctcagaggaggcacatcccaacagtcagcattccaaacagcaggaatcagaagctgccagaagccgcagtta

SEQ ID NO: 939483 - DNA, 571 bp, Homo sapiens
  misc_feature 1, 2, 3, 4, 5, 6, 7, 8, 9, 10, 11, 12, 13, 14, 15, 16, 17,18, 19, 20, 21, 22, 23, 24, 25, 26, 27, 28, 29, 30, 31,32, 33, 34, 35, 36, 37, 38, 39, 40, 41, 42: n = A,T,C or G
nnnnnnnnnnnnnnnnnnnnnnnnnnnnnnnnnnnnnnnnnntgtaggtgtggttcatggcccaggtggtgtggtttgggggcaaagagctgtcctagaagtttcctaatttggcaggtggttttcctgttcagcagcttcagcagcagtggtagtatactcatacataatcagaaatattccagttatctgttgctgtgtaatgaaccatccccaaacttagtgacttaaaacaaaatttattattacttctcatggtctaagcataaactgggctcaagtaggtaagcttcccttgggctctcttatgacgttacattcagatgtgyaccgggctacagttatttgatggctcaactgggctggatgtcctggggtctcactctctggcagttgaagccagctattggctgggaattcaccagaatttggtggctgacgcacctaccgtgacacacctcactgtgttgttcaggctgcccatgacgtggtgtccaggctcagaggaggcacatcccaacagtcagcattccaaacagcaggaatcagaagctgccagaagccgcagtta

SEQ ID NO: 939484 - DNA, 617 bp, Homo sapiens
atgaccctcggtttttggtgagaattgctaacttgtataagtgctgaagggaagtccaaagcctttctctttgagggtcaaacgacaaagtggaagcatgtgtgtgtgtgtgtttgtgcacatccatgtctgtgtgtatatgtgtgtgactgtgtgagtgtattaataaatgtaatgagtgtgttcttgtgtatatatgtgtatgcacatgtgtacacacaaatgcgtgtgtttgcaagctcgtgtgtgtattaaggggtgtagtggcattgggactgagctgttcctagtgagtgctytgcagaggagggggcgctacacaggcagtctgttttgctgggtgaccttgcagcctcccacagggctgttgtgagacttcttcaccatggctcacgtgcagaggtgtctgccacacggtaccctgctggctgttccgagctggggaatcagtcacccttccttggtgagggcaaacattcagggaaagtagaaggaggaggtcctgggaaggggaagtggcaggaagtaaaacaaatgggagctttatcctggctttggcaaattacgtggcctcttcgtgcctcagtttcctcatctgaaaatgggatatcattagt

SEQ ID NO: 939485 - DNA, 652 bp, Homo sapiens
aacagcagtccctccctctctcagttatgatgagctccttatctctctgtgcaaatcaggagcacttcatggtaatccagcccagctccagcctcagcagactctccaaaataaaagagctggatcagagtcatcgaacatttcagttcccctaccgctgcccccgccagcagccaggactgcgaggagcrggtgatgctgcatgtcctcccacttccctgggcctcctccccagcctgagcccctcctccccagtctctaggtgcccaagagcccacggccagcttcccctcatgtcctaagagagtcaggccttgagcagagtccgtgccctacagaggaaccaatcataacaatacccatccttcagagagactcagaaccagccaagcactaagccaggcgctcgctaggccaggagcttggcatgagtgacctcatttaagctcacgatgggaaggagctttagtcccatttttcagatgaagggcagagaggtacacctagtgctggtaagtggtgggagtaaacagcaacacccccaccacctaaaccactctgctcctgggcacccttgctgcccccacctcccccacacaggcacccacccctgggaaaagaccgacagttatgttaatgcagccgtacacat

SEQ ID NO: 939486 - DNA, 847 bp, Homo sapiens
ccactgcactccagcctgggcgacagagtgagactccgtctcaaaaacaaaacaaacaaacaaaaaaaattagctgggcgtggtggcgtgtgcctgtagtcccagcttctggggagactgaggcaggagaatcacttgaactcggaaggaggaggttgcagtgagcggaggttgagccacggcactccagcctggcgacagagctagattctgtcaaaaaaaaaaaaaaaaaaaaaaagtaaaagaaaagaaaaaatggcaaaaaagactttattcaagactatgcaataggggtaaaaacaattgcaatttaaaaaggaaattaaattgaactctgttgaaacaaargcaagaatattttttaacactgggactaacaaatggaaaaatattggaggactttagaggagaggaagatcaatattattaggctatctgtatttgctaacagtccttatcaaagttgagctcctgccctcccacagagattgggagacaggggctctacctttcctgattacatttcatacagatgggtcacaggtccttgagaaagattttcctgagttgtataaatttacatctgaaaggggcagaaaaagaatttacaatttcaatttttctaaagtaaacactctaagaaaagggcggtcaggggcttatagttgggaaaagcttctaaagtttaatcaagctgagggagacactggactagattggtcaatgccaacaacctccaataaaaacatacctgaagctcctccctttgccttttctatgataaagctttcctatttccctgcctacctttctgtctctgcaaaacacaagcattagtgttgcaggg

SEQ ID NO: 939487 - DNA, 630 bp, Homo sapiens
catttcatattatactctgtaattattcttggtataaaaaacttctaattttacataaaagtagcctgaggcagttgttcttattttctgaaacccaaccagatcaggagaagagaaaaagtgctcgtatcaaagctaagtcattgagaacaagagtgtagattcagcagccaatgctgactacccgtgaaccagtatcagatttaaatacacaaggatgtgtaggtaagctgtgtactttcaaccaaaacccttctgacgcacacctgttgttccttaatcagtgtgccyataaaagactagagatggggaatgtgctggggaataagtgtggatctaatattattggaagcataaataacattttcattatggatatcaatgattctagcttaaaacgtatacacacactgggccgggcacggtggcccacgcctgtgatcccagcactttgggaggctgaggtgggtggatcacgaggtcaggagattgagaccatcctggctaacatggtgaaacccccgtctctactaaaaatacaaaatattagccaggcatggtggcaggcgcctgtagtcccagctattcgggaggctgaggcaggagaatggcatgaaccagggaggcaga

SEQ ID NO: 939488 - DNA, 630 bp, Homo sapiens
catttcatattatactctgtaattattcttggtataaaaaacttctaattttacataaaagtagcctgaggcagttgttcttattttctgaaacccaaccagatcaggagaagagaaaaagtgctcgtatcaaagctaagtcattgagaacaagagtgtagattcagcagccaatgctgactacccgtgaaccagtatcagatttaaatacacaaggatgtgtaggtaagctgtgtactttcaaccaaaacccttctgacgcacacctgttgttccttaatcagtgtgcccataaaagastagagatggggaatgtgctggggaataagtgtggatctaatattattggaagcataaataacattttcattatggatatcaatgattctagcttaaaacgtatacacacactgggccgggcacggtggcccacgcctgtgatcccagcactttgggaggctgaggtgggtggatcacgaggtcaggagattgagaccatcctggctaacatggtgaaacccccgtctctactaaaaatacaaaatattagccaggcatggtggcaggcgcctgtagtcccagctattcgggaggctgaggcaggagaatggcatgaaccagggaggcaga

SEQ ID NO: 939489 - DNA, 606 bp, Homo sapiens
tctcctttttttatttatgtctgactggattatttcaaaaacctgtcttcaagctctgagagtcttacttctgcttaatttagttgattgtagaagctttcaaatgtattttgtatttctttcaataaattcttcatcccaataatttatatttgatttttttaaatgatctatttggtaaatttctcatttatatcctttttttatttttgtgttattttttagcattctcttctatttccttaggtttccttataagtattaattkttttctatttgaatagctttagggctataagtggtttttgattactagatgaattgtactgttgtgaagtctagaattttagtgtactcaccacctgagtagtggacattgtacccaataggtagtttcgcatcccttatggctcttccaacccttcccccttctgagtcttttgtttgtttgtttgtttgtttttgagacagggtcttgctctgttacccaggctggagtgcggtggcatgatctcggctcactgcaacatccgcctcctgggttcaagtgattctcatgcctcagcctcctgagtagctgggactacagatatgcaccgccatgcc

SEQ ID NO: 939490 - DNA, 479 bp, Homo sapiens
atgaatagacattgctgaaaagaatacctgacaatggaaaataggcatatgaaaaaatactcaacatcactaatcatcagataaatgcaaattaaaactacaatgagaggtcaggtgcagtggctcacacccgtaatcccagcattttgggaggccaaggtgagcggatcacctgaggtcaggagttcaagaacagcctggccaacatggtgaaaccccrtttctactaaaaatacaaaattagccgagtgtggtgttgggagcctgtaattccagctactcgggaggctgaggcaggagaattgcttgaacccaggaggcagaggtttcagtgagccaagattgtgccatcgcactccagcctgggcaacgagagcaaaactccacctcaaaaaaaaaaaaaaaaaaaaccagtaccttagatatattaaaatgataagttatattacaacatttttaatactgtattacctttgcat

SEQ ID NO: 939491 - DNA, 479 bp, Homo sapiens
atgaatagacattgctgaaaagaatacctgacaatggaaaataggcatatgaaaaaatactcaacatcactaatcatcagataaatgcaaattaaaactacaatgagaggtcaggtgcagtggctcacacccgtaatcccagcattttgggaggccaaggtgagcggatcacctgaggtcaggagttcaagaacagcctggccaacatggtgaaaccccatttctactaaaaatacraaattagccgagtgtggtgttgggagcctgtaattccagctactcgggaggctgaggcaggagaattgcttgaacccaggaggcagaggtttcagtgagccaagattgtgccatcgcactccagcctgggcaacgagagcaaaactccacctcaaaaaaaaaaaaaaaaaaaaccagtaccttagatatattaaaatgataagttatattacaacatttttaatactgtattacctttgcat

SEQ ID NO: 939492 - DNA, 621 bp, Homo sapiens
taatccattaacattgatgctctatttctgcttttaagtttgaactgaggctgattaatgttcagtcaattctcctttgagcagggattggtgtcaatcaaagacaaatcacaacaagtgattgtccagggtgtccatgagctctatgatctggaggagactccagtgagctggaaggatgacactgagagaacaaatcgattggtcctcattggtaagtctcaaaggattcacagttttgaaacaaagtgaaaaatatatttgaaagggatatcatgtgccacttaaacagattaaccattcaggtcctcttttaaaactaaataagcttgtggtcaatgtttcatctttgtcacattacaacgttcgtaaaagcttgttaggacttktgttcttcttcaattttagaaaagtggttaatccaaggaccaatgtgactttgatgtactgacctggaaagttaaagatggaatcactcaattactattctttttgtaaatttttaaacaccataaagcatttaatgaactggaattgataggtgaactgtgtcattttaataagcataatgtaatcacgtcatattttgttttgtttgcaggcagaaatttagataaggat

SEQ ID NO: 939493 - DNA, 738 bp, Homo sapiens
gccagaggctccaaacagcatccctatctgccactgacacctcaagctccattggatctgctgggtcatatggcccaagtggcagaacagctttcacagcagcctggacctgttgcagagccttatcctgttcaggatgtaggtcaaaactagcagcctttctgttcactcaataaatgggctggagtaacatgtccaaatgaggaatgtgttgcctccgaaatccaaataggcccacgaggcgttgtgcctctttcttcgctgtacgaggtgccaaatgcagcaacttatccttcaccttagaaggaatatttcgacaggccctgcrtcactggacccctaaacattttaccgagggaaaagttccctgaattttactcagatttatttcctaccccctagcacacaaatgtctcaccaataagtccagtgcgtttgctacttcttgctcactggatccaatcagcataatctcatcaacgtaatggaccagtgtgataccttgtggaagggaaaaacgatgaagacctctgcaaacacgattatgacacgaaggtgaagagttgatatacccccgagataggacagtgagggtatattgctggccttgcaggctaaaggcaaattgcttctggtaggccttatggacaggaatgcagaaaaaggcatttgccaaatcaatggctgcataccaggtaccaggagatgtgttaatttgttcaagcagtgaaaccacat

SEQ ID NO: 939494 - DNA, 738 bp, Homo sapiens
gccagaggctccaaacagcatccctatctgccactgacacctcaagctccattggatctgctgggtcatatggcccaagtggcagaacagctttcacagcagcctggacctgttgcagagccttatcctgttcaggatgtaggtcaaaactagcagcctttctgttcactcaataaatgggctggagtaacatgtccaaatgaggaatgtgttgcctccgaaatccaaataggcccacgaggcgttgtgcctctttcttcgctgtacgaggtgccaaatgcagcaacttatccttcaccttagaaggaatatttcgacaggccctgcgtcactggacccctaaacattttaccgagggaaaagttccctgaattttactcagatttatttcctaccccctagcacacaaatgtctcacmaataagtccagtgcgtttgctacttcttgctcactggatccaatcagcataatctcatcaacgtaatggaccagtgtgataccttgtggaagggaaaaacgatgaagacctctgcaaacacgattatgacacgaaggtgaagagttgatatacccccgagataggacagtgagggtatattgctggccttgcaggctaaaggcaaattgcttctggtaggccttatggacaggaatgcagaaaaaggcatttgccaaatcaatggctgcataccaggtaccaggagatgtgttaatttgttcaagcagtgaaaccacat

SEQ ID NO: 939495 - DNA, 738 bp, Homo sapiens
gccagaggctccaaacagcatccctatctgccactgacacctcaagctccattggatctgctgggtcatatggcccaagtggcagaacagctttcacagcagcctggacctgttgcagagccttatcctgttcaggatgtaggtcaaaactagcagcctttctgttcactcaataaatgggctggagtaacatgtccaaatgaggaatgtgttgcctccgaaatccaaataggcccacgaggcgttgtgcctctttcttcgctgtacgaggtgccaaatgcagcaacttatccttcaccttagaaggaatatttcgacaggccctgcgtcactggacccctaaacattttaccgagggaaaagttccctgaattttactcagatttatttcctaccccctagcacacaaatgtctcaccaataaktccagtgcgtttgctacttcttgctcactggatccaatcagcataatctcatcaacgtaatggaccagtgtgataccttgtggaagggaaaaacgatgaagacctctgcaaacacgattatgacacgaaggtgaagagttgatatacccccgagataggacagtgagggtatattgctggccttgcaggctaaaggcaaattgcttctggtaggccttatggacaggaatgcagaaaaaggcatttgccaaatcaatggctgcataccaggtaccaggagatgtgttaatttgttcaagcagtgaaaccacat

SEQ ID NO: 939496 - DNA, 727 bp, Homo sapiens
gccagaggctccaaacagcatccctatctgccactgacacctcaagctccattggatctgctgggtcatatggcccaagtggcagaacagctttcacagcagcctggacctgttgcagagccttatcctgttcaggatgtaggtcaaaactagcagcctttctgttcactcaataaatgggctggagtaacatgtccaaatgaggaatgtgttgcctccgaaatccaaataggcccacgaggcgttgtgcctctttcttcgctgtacgaggtgccaaatgcagcaacttatccttcaccttagaaggaatatttcgacaggccctgcgtcactggacccctaaacattttaccgagggaaaagttccctgaattttactcagatttatttcctaccccctagcacacaaatgtctcaccaataagtccagtgcgtttkctacttcttgctcactggatccaatcagcataatctcatcaacgtaatggaccagtgtgataccttgtggaagggaaaaacgatgaagacctctgcaaacacgattatgacacgaaggtgaagagttgatatacccccgagataggacagtgagggtatattgctggccttgcaggctaaaggcaaattgcttctggtaggccttatggacaggaatgcagaaaaaggcatttgccaaatcaatggctgcataccaggtaccaggagatgtgttaatttgttcaagcag

SEQ ID NO: 939497 - DNA, 677 bp, Homo sapiens
gtgctggaggtagggcctggcgggaggtgattggatcgtgagggtggggttctcatgaatggcttagcaccctccccacttgataccacatggtgagtgagttctcatgagatctggctgtttaaaagtgtgtggcacctcccccagcaatctctcttgctcctgctccagccatggaagacrtgcctccttctttgccttctgccatgattataagttttctgaggcctcccaagaagccacgcagatgccagcaccatgcttcctgtacaggctgcagaaccacgagccaattaaaccacttttcttcataaattctccagtcttggccgggtgcagtggctcacgcctgtcatcccagcactttgggaggccgaggcaggcggatcacgaggtcaggagatcaagaccatcctgactaacacagtgaaaccccatctctaccaaaaatacaaaaaaattagccgggtgtggtggtgggtgcctgtagtcacagctactcaggaggctgaggcaggagaatggcgtgaaccccggaggtggagcttgcagtgagccgagatcacgccactgcactccagcctgggcgacagagagagactccgtctcaaaataaataaataaataaaaataaaataaattctccagtctcaggtcattctttatagcagcacaag

SEQ ID NO: 939498 - DNA, 677 bp, Homo sapiens
gtgctggaggtagggcctggcgggaggtgattggatcgtgagggtggggttctcatgaatggcttagcaccctccccacttgataccacatggtgagtgagttctcatgagatctggctgtttaaaagtgtgtggcacctcccccagcaatctctcttgctcctgctccagccatggaagacgtgcctccttctttgccttctgccatgattataagtttyctgaggcctcccaagaagccacgcagatgccagcaccatgcttcctgtacaggctgcagaaccacgagccaattaaaccacttttcttcataaattctccagtcttggccgggtgcagtggctcacgcctgtcatcccagcactttgggaggccgaggcaggcggatcacgaggtcaggagatcaagaccatcctgactaacacagtgaaaccccatctctaccaaaaatacaaaaaaattagccgggtgtggtggtgggtgcctgtagtcacagctactcaggaggctgaggcaggagaatggcgtgaaccccggaggtggagcttgcagtgagccgagatcacgccactgcactccagcctgggcgacagagagagactccgtctcaaaataaataaataaataaaaataaaataaattctccagtctcaggtcattctttatagcagcacaag

SEQ ID NO: 939499 - DNA, 624 bp, Homo sapiens
gttccaccctagctgtcttgtaatgactgtgcctcacttcctcacaatttaaacccaaggattcactcctccactttccttttagctgatcaaatcaatctacagctaagaagaaaaagttttgtcagtatcatgttagttaaaattttataataaaacatggacaataaagcccaacatccaaaatcaaattagatttatatataaaaagaatcaaaatgggtatatggccatgtgggacatttattttgtggsttctaactaggatgctttaattttacatcgccatctctgtatttggtaaggccataggtggagatcagtagtgaaatgaaccaacaataataatattatgcctttgaataactttttaaatatgattaaaattattagccataatatattaattaatgaattctagccttaatttaatgctatatatctaattataattaaattctactttaatatatcatattcagttataaaatgcgaatccatggcaattttcctatatagttggctgaaagcaagcagcttgcaagtaatacagtttatctttaagaaatctttatttttttctgtgtaaaatgctaatgcattttcataaatcaatttacttgt

SEQ ID NO: 939500 - DNA, 533 bp, Homo sapiens
ggcacttatgtcctatggagaaatacatcaggtattatagggattcagttgtaggggattaatgaaaagactgcttagttaagcaagtagtctgtttatctaacttattctttgatctatttgattttaggtggtttggtttgtggggaccctgggtaagaatcrtacttcaaactcttggtattatcctcccgatagtcataatagaagtctccctggtgcgctgtgttctcttaaatattttaaatgtttgcacacagccatctctgaatgccaaatgatctctcttcaactggaatgacaagagctgaaagaaatgtatgaccacgaggacactttaatctgtgaatgacatgctgagatcggaaaccccaaatgatggtaactgagagtggtgcccaggccctaagttttagtcacactctcacctaagtgagaacctgaccaaaaagggggaattttttttttgaacaaaattacggaaggccattgctttggactgagctcatgcactaggccccagcagaccaaac

SEQ ID NO: 939501 - DNA, 621 bp, Homo sapiens
gtgctgctggagtcctcacacaggagccaagcccatgacctgttgtctttctatcaaaacaacttgacctcacagttctaggctggccctcatgtctgtgtggggcagcagccaccactttaatacttctagaggccctcaaaatcacaagctatgctccacttaccctctacagttctcacaatcttcaagcattaatatccttctcatacctttcacatttattgtytgcccctcaactcctccagctctattcactctttgttaaaactccaacagtaactattacccatgggcctgatttcagcccagcttctcacttagcacccaacacaagtcctgaatcacatgactgtatttctttaatacacatagcatcttccccttttcctcatatttctactcttccaattccaaacacagaccacacttagttaatctatggcaattcttctaaactcaatcaattttcaccagctaaagctggatatgctgtcatgtcccatacctctattatcgaagctgctgcacttcctccctccactacttcccaacaagccgaactgattgctttaactcatgtgctctctctcgctaaaggaatgcacattaacatttaca

SEQ ID NO: 939502 - DNA, 606 bp, Homo sapiens
ccccaagctgctaatcaccaaagtgcatgatactttagaaataacacttgatttctagtatttgtatggctggtgtacctactgtacagtctttgaaaaattataacagaagattctttagtcggggctatgcacttcacaagcttcacttgctaataatcacaacagggaattaagtattgctcatactaccacctgttcacgtacggcttctttcttgccttgctggtaagatttctgctcctcctcatcctttaaggcatgtctttagcttgatactggagtcatttctttggtttcagttaccctttctggttcatatgatagtcttctatatsaagcttggagcctgaaagagaagtaacttgtcagttaaaaaaaaaaaaaaaaaaaaagataaatgccaaagatcaggatgtttgagaaaaaaaaaatattaacttggttcttttcttccctaattactccccccaaacaagaccccaaggagtttcatttctaaaacataactctctatattaagaagacccccagttcaggttgataaatacccatagggcctatctctcaccatgaacctgcacaggcaagggcagaaaactctct

SEQ ID NO: 939503 - DNA, 606 bp, Homo sapiens
ccccaagctgctaatcaccaaagtgcatgatactttagaaataacacttgatttctagtatttgtatggctggtgtacctactgtacagtctttgaaaaattataacagaagattctttagtcggggctatgcacttcacaagcttcacttgctaataatcacaacagggaattaagtattgctcatactaccacctgttcacgtacggcttctttcttgccttgctggtaagatttctgctcctcctcatcctttaaggcatgtctttagcttgatactggagtcatttctttggtttcagttaccctttctggttcatatgatagtcttctatatcaagcttggagcctgaaagagaagtaacttgtcagttaaaaaaaaaaaaaaaaaaaaagataaatgccaaagatcaggatgtttgagaaaaaaaaaatattaactkggttcttttcttccctaattactccccccaaacaagaccccaaggagtttcatttctaaaacataactctctatattaagaagacccccagttcaggttgataaatacccatagggcctatctctcaccatgaacctgcacaggcaagggcagaaaactctct

SEQ ID NO: 939504 - DNA, 627 bp, Homo sapiens
tggggtcgctcagtggatgccaatggcagggggtggttccaatggactttgtctaatttccttttttttttttttttttttttttttttttgagacagagtctttctctcttgccctggctggagtgcagtggtgcattctcggctcactgcaacctccacctcccaggttcaagcaattctcccaggttcagcctccgagtagctgggattacaggygcccgccaccacacctggctaatttttgtatttttagtagagacggggttttgccatgttggccaggctggtctcgaactcctgacctcaagtgatccacccacctcagcctcccaaagtgctgggattacaggtgtgagccaccgcgcccgaccttaatttccttatttttcacagtaaaggagacgcacaattctgccttactgtgcatcagacaatcatggggtcacttttgactcactgagggatggaaactggaagggggtgagtcggggctgagacacatgttccagaagaaatgcccttctctgcagaaagagtgggaccctcgggctgtgtcgggaagacagagagaggaaagcaggtagctgtgcggccaatgagccagtggtcccggcagcccagggcg

SEQ ID NO: 939505 - DNA, 627 bp, Homo sapiens
tggggtcgctcagtggatgccaatggcagggggtggttccaatggactttgtctaatttccttttttttttttttttttttttttttttttgagacagagtctttctctcttgccctggctggagtgcagtggtgcattctcggctcactgcaacctccacctcccaggttcaagcaattctcccaggttcagcctccgagtagctgggattacaggcgccygccaccacacctggctaatttttgtatttttagtagagacggggttttgccatgttggccaggctggtctcgaactcctgacctcaagtgatccacccacctcagcctcccaaagtgctgggattacaggtgtgagccaccgcgcccgaccttaatttccttatttttcacagtaaaggagacgcacaattctgccttactgtgcatcagacaatcatggggtcacttttgactcactgagggatggaaactggaagggggtgagtcggggctgagacacatgttccagaagaaatgcccttctctgcagaaagagtgggaccctcgggctgtgtcgggaagacagagagaggaaagcaggtagctgtgcggccaatgagccagtggtcccggcagcccagggcg

SEQ ID NO: 939506 - DNA, 664 bp, Homo sapiens
tggggcacggaggattcttagggcagtgaaacaattctgtatgatgcaaaaacggtggggacaagtcattatacatttgtccaaacccacagaatgtacgacaccaggagtgaattccattcaattccacttaatttttctggaaacccaaaactgctttttttttttttttttttttttttttttttggagacagagtctcactctgtcacccaggctggagtacagtggcacgatcttggctcactgctgcaacctctgacttccaggttcaggtgattctcctgcttccaccaccagagtcctgcctccaccaccagagtagctgggattacaggtatgcgtctccacgcccggctaatttttctgttttagtagagatgagatttcaccatgttggccaggctggtctcgaactcctggcctcaagtattttgcccgtctcagccttccaaagtgctgggattacaggcatgagccaccaygccccgccatcaaaattgctttttaaaagtgtgttaaattcaaaaaaagaagctagaggaaagagggcagagggtggcattcaggcagcagaagggctgtcctcatggtccttgtggtgaggggatgacctcctgctgaaggccagtccactgagctggcacccacagagggggacctg

SEQ ID NO: 939507 - DNA, 613 bp, Homo sapiens
tttctgcattcccaactgaggtacccggctcatctcattgggacaggttagacagtgggtgcagcccatggagggctagtcaaagcagggtggggcgtcgcctcacctgggaagtgcaaggggttggggaactccctcccctagccaatagaagctgtgagggactgtgccatgagggacggtgcatcccggcccagatactatgcttttcccacggtcttcacaacccacagaccaggagattccctcgggtgcctaaatcaccagggccttagatttcaaacacaaaactgggcagccattttgggcaggcaccgagctagctgcaggagttttttttttttttcataccccagtggcacctggaacaccagagagacagaacygttcactcccctggagatggggctgaagccagggagccaagtggtctagcttagtggatcccactgccatggagcccagcaagctaagatccaatggcttgaaattcttgctgccagcacagcagtctgaagttgacctgggatgctcaagcttggtggtgggaggggcatccgccattactgaggcttgagtaggtggtttccccctcacagtgtaaacaaagctg

SEQ ID NO: 939508 - DNA, 626 bp, Homo sapiens
agctgaattctaccagaggtacaaagaggagctgataccattccttctgaaactattccaatcagtagaaaaagagggaatcctccctaactcattttatgaggccagcatcatcctgataccaaagcctggcagagacacaacaaaaaaagagaattttataccaatatccctgatgaacatcaatgcaaaaatcctcaataaaatactggcaaaccaaatcaagcagcacctcaaaaaacttatccaccatgatcaagtgggcttcatccctgggatayaaggctggttcaacatacgcaaatcaataaatgtaatccagcatataaacagaaccaatgacaaaaaccacatgattatctcaatagatgcagaaaaggcctttgagaaaattcaacaatgcttcatgctaaaaactctcaaaaaattaggtattgatgggatgtatctcaaaataataagagctatctatgacaaacccacagccagtttcatactgaatgggcaaaaactggaagcattccctttgaaatctggcacaagacagggatgtcctctctcaccactcctattcaacatagtgctggaagttctggccagggcaataaggcaggagaaagaaataa

SEQ ID NO: 939509 - DNA, 611 bp, Homo sapiens
attaagaaagatagcctagtttggaagataaacattatatcccagtagtaatgtccattgtcccaccaggacctaactaccttctataaaaagaagtgctgttgttcccctcaagttcctttatttggttttattcttcttcgcagtacctacctccacttggcagattagatttattttttcatctttcaacagctatttgctgaatacctactagatgccaggcttkagatctagcaatgaacaagagctctgtgaaacttacattccagtaggagaaataaataataaaccaaaaatataatcgataaattatttaatatgctgggaagcaatatgtataatggaacaaagatgtagagtgatggattagggttctccagagaagcagaaccaacaattgactcatgtgattatggaggctaagaagtctcaagatcacagttagcaagttggagatgtaggagagcccctggtatgcttctgatttgagtccaaaggcctgagaaccaggagagatgatagtgtggttacagttcaaaagctggcagtcttgaggcccaagaagagccagtgttgcagttcaattccaaaggcagggaaaggccgat

SEQ ID NO: 939510 - DNA, 598 bp, Homo sapiens
tgtttttgttggaagggattgaggaaagaaggaaggcaagagggcaagaagtgagcaaaggaaggaaggtagtttcttcccaaacgtgaagctgcaatcatagtttctgtttagaaaattctctatttaacacctagcatctgagccaaaggatgcagaagaaaagggaaccaacatggatgaaagactcctgcaccatgtaccttagagaccacatctgcttgggagtcaggccatgcggatttaagggccagtcatctggacaagtcacttcacatctccaagcttcggttccctcaccaatgaatagggatgataatgcytacaacgggtagcagttgtgaaaattaagtgaaaagatgcatctacaaggcatcgtaaacctaaagtgctataaaacaagaaagaatttgtttctcttcccagacattgcaacccctcaccagctcctctccaggcactgagtttcattttccacttgagtttagaagtcaaatatttagctgtgctaatggggtattggatctttttattatggccccaccactcagtgcgtgcagctttgccgagataataaaagatgttagacctggtctcg

SEQ ID NO: 939511 - DNA, 598 bp, Homo sapiens
tgtttttgttggaagggattgaggaaagaaggaaggcaagagggcaagaagtgagcaaaggaaggaaggtagtttcttcccaaacgtgaagctgcaatcatagtttctgtttagaaaattctctatttaacacctagcatctgagccaaaggatgcagaagaaaagggaaccaacatggatgaaagactcctgcaccatgtaccttagagaccacatctgcttgggagtcaggccatgcggatttaagggccagtcatctggacaagtcacttcacatctccaagcttcggttccctcaccaatgaatagggatgataatgcctacaacgggtagcagttgtgaaaattaagtgaaaagatgcatctacaaggcatcgtaaacctaaagtgctataaaacaagaaagaatttgtttctcttcccagacattgcaacccctcaccagctcctctccaggcamtgagtttcattttccacttgagtttagaagtcaaatatttagctgtgctaatggggtattggatctttttattatggccccaccactcagtgcgtgcagctttgccgagataataaaagatgttagacctggtctcg

SEQ ID NO: 939512 - DNA, 854 bp, Homo sapiens
tccattttcatatctctaaaatgggcgtgacagcacatcccatcaacagttgtgtactgatcaaatgaagaaatatatgcaaagcattgagcccatagcaggcaagggatacatggctactttttttttctttttttctttttttgatggagtctccgtctatcgcccaggctggagtgcagtggtgtgatcttggctcactgcaaccttcgcctcctgggttcaagtgattctcctgcctcagcatctggagtagctgggactacaggcacgcgccaccaagcccggttaatttctgtgtttttmgtacagatggggtttcaccatgttggccaggccggtcttgaattcctgacctcaggtgatcctcccaccttggcctcccaaagtgctgggattacaggcgtgagccaccgtgcccggccgatacatggctactttctagtgagctcttctacagaactacagtcaactttttgggaatatacctgttggataaagtgagggattcttttaatatttggcacgttgttaaaattgtttatgttagccaattgctaaatatgggtaaaacgctgtgtgtgcacctctgtgtgagtgtgatgtatgcatgagagcgagagacagagagacagagagagagattcatgatgcagatgaagttggagctagctttggagccaggctgagggcttgagtcagccttttccacttactagccatgtgaccttgggtgagtcatttcacctcctctcatctcagtttcctcgataacacaccgtctttgcagggttgttgaggaaattaaaatgacacaagtttggaaagaacctaacgtccatcagtctcttgaa

SEQ ID NO: 939513 - DNA, 812 bp, Homo sapiens
atctggtctttaactcatataataatagtaaacatatagaaatactagaaattactcattcatttaattaaaacttaactatttattttgcatttttttttagagacagggttttgctctgtcactcaggctggagtgcagtgacatgatcgtagctcactgtaccctcaaatttctggactcgaacaattctcctacctcaagcctctcaagtagctaggactataggtgtatgccaccagactaggctaacccttccctccctctcttccttccttcctccctttctctctctttctctctctctctcttttcttttctttttttttttttttcagatgaattctgcctatgttgcccaggctgatcttgaattactaatctgaagcaacactcctgyctcagccttccgaagtgctgggattctatgtgtaagccgccatgcttggcctgcaaatatttattgaatacataatttttgaagtaatgaaaaactgaagtccaaagatttttcgttgtgatttaaaataagatttagaactattgtcatatccctatggaaatgaagcaagtgaaggagttttgtattattgagaggtgacagcgtgctggcagtcctcagagccctcgctcgctctgggcgcctcctctgcctgggctcccactttggaggcacttgaggagcccttcagcccaccactgcactgtgggagcccctttctcggctggccaaggccggagccggctccctcagcttgcagggaggtgtggagggagaggcgtgagcgggaacccgggctgccccaggcgct

SEQ ID NO: 939514 - DNA, 606 bp, Homo sapiens
tgttgttttttcattttcattcagttctaggtattttttaaaaatttcctttgataactacttctttgactcattgtcttagttcatttgggctgctataacgaaatatagtagtcccctgttatcagtaacctttggtcaactgtggcctgaatatattacatggaaaatttagaaataattcataagttttaaatcgcatgctgttctgagtagcatgatgaagtctyacgccatcttgcctggtacgtgacttatccctttgtccagcatgtccacactgtatatgctgttctcgtaagtcattgatatcatctgctcctgacatcccaccatggacgtcatcatggcttgatgacccaggatctctccaagcagatagttctctgtctgacctattgtcagaaggttgggagtagcctaaagctaggtcactactatgcctaatgtcattcaactcacttcatctcatcatgtaggcattttctcatctcacatcctcatgagaagtgtgagtatagtacagtaagttgttttgagggccaggcgtggtggttcacacccgtaatccaagcactttgggaagctgaggtaggaggatagctt

SEQ ID NO: 939515 - DNA, 515 bp, Homo sapiens
cagccaggcctgctggacagcggatacccagggtccctgagttctcgcagagaacaagactggtggggaccccctcccagagcccccagccctcccagcagccagggtaggggggagactttgggggaacagttgggggaaaggcccatgccaggacatgcctctgtccaccatgggcctgttgccactcccacggcacagccccctcctgccgcttcagggagcccggcgtycgtcttcagcaacagatccgtgcagccccctctctctgcgccttgtggtgggaagtgtgcttgggcttcggggccctacatgccctgcctggcgtggagagaagctcatcccctccctcactctagagatgctacctccgttgatgaagccatgggccccagctccccagcaccgggccgctacccagtgacacccacccctgagccgggtcgaggctccaccttccctttgttccatctcagggacttgcctgatgctcagggctgcctctgtcccgtcgg

SEQ ID NO: 939516 - DNA, 608 bp, Homo sapiens
acagtggcttatgcctgtaatcccaccactttgggaggccaaggcgggcggattgcttcagtccaggagttccagaccagcctgagcaacatggcaaaaccagtctctacaaaaaatacaaaaattagccaggtgtgatggtscacacatgtagccccagcgtcttgggaggctgaggtgggagcatcacttgaacccagaaggtcgaggctgcagtgagccctgacctgatcatgccattgcactacttcagcctgggctggaatgagaccccgtcttaaaaaaaaaaaaaaaaaaaaaaagattataccttctttcaaaaataatcttttgttttttaaatagttttggaagtcattcatggaggtgagtgatggagtcacttgaccgagccaggtaaacttcattgacagagaagtgcggtttgtgggcagcttagcccagcatgtcttttcttgacttgtagacgtgagtctcaagcaacaatagaactttaattttgctcagtctctgtttatgtagattatcctccttctattaattttgggttttgtttttgatgttttggtttgtttacagatgaaaagttattccccattggcggcagc

SEQ ID NO: 939517 - DNA, 608 bp, Homo sapiens
acagtggcttatgcctgtaatcccaccactttgggaggccaaggcgggcggattgcttcagtccaggagttccagaccagcctgagcaacatggcaaaaccagtctctacaaaaaatacaaaaattagccaggtgtgatggtgcacacatgtagccccagcgtcttgggaggctgaggtgggagcatcacttgaacccagaaggtcgaggctgcagtgagccctgacctgatcatgccattgcactacttcagcctgggctggaatgagaccccgtcttaaaaaaaaaaaaaaaaaaaaaargattataccttctttcaaaaataatcttttgttttttaaatagttttggaagtcattcatggaggtgagtgatggagtcacttgaccgagccaggtaaacttcattgacagagaagtgcggtttgtgggcagcttagcccagcatgtcttttcttgacttgtagacgtgagtctcaagcaacaatagaactttaattttgctcagtctctgtttatgtagattatcctccttctattaattttgggttttgtttttgatgttttggtttgtttacagatgaaaagttattccccattggcggcagc

SEQ ID NO: 939518 - DNA, 609 bp, Homo sapiens
taattcctcactcctagggctgaacagggagtacctctctctgggcagggcttggctggatactagcctcagaccctcctttgtctaagctccattcggaagccttgaagacacctgctcatgccagatacacagtgtatcttctgccggagcagaccagcaggtgggtgagtgctctgtctttggcactcacccttgctccctgcctccagtcatccaggctctggttgaagctctctaccagcccaataccctccccatgttccaaytgccctatcaaactagcactccctgtggtggtggtggtgggaagagcaatcagtttaaatttataaaacgatttgcactaaggtataagtgacccacgacttcaccttcccatgggcattagctgtttaaaaaggaagtctgttaacctaaattctgctctataattagtggaaagcgatgtgtgggaattctgagtccaggaggggatggcatccaggtctccttacctatcctggagcacagaaagaagaaaaccagatgaacaggagccaaacaccctctcttttcctccagcaataccccacaattgtttgaggaggcaggcaaggccatagagtc

SEQ ID NO: 939519 - DNA, 618 bp, Homo sapiens
agctactccaagtgggtaacctaggtagagggcgccaggaggcaggggtttataagatttcagcggacaggacttgggtgggcacctcccaagtcatgccctctctggggacattcctcactgatgtggtgatgctggacattgccatgaaagagtgtgtggatgtgagtgagcctggagcagacaggtcagggaccaggatcctgaggcctgggagaagagagtcttgaactgagctcctagatcccagtccttgccaaaattttttgcgagggcctcgcagccctcctcatcccgtaaacagggtattttactcatgagtgatggaggctccacagcagccatcagtcccactccctgagtagtgaagctgcagagctgcaagacctcttttgtgcacattccgtgaccctggtggctctggwggtggtgaagcttggaaatcgctggaaatggaggctagttatggaccagcggacctttctgatggtctttggctttctgtcttccagagaaatgtgatcaaaacccagaaaaacagaaaggtgagcagtagctgaagtcctcactttgagggagggtggaggtggaaatgagaaatcaccctgggcaggacat

SEQ ID NO: 939520 - DNA, 432 bp, Homo sapiens
gcggacctttctgatggtctttggctttctgtcttccagagaaatgtgatcaaaacccagaaaaacagaaaggtgagcagtagctgaagtcctcactttgagggagggtggaggtggaaatgagaaatcaccctgggcaggacattccctggtcccttcttccgcatctaagatttattgaaagggagtaatacacagagaaggaggagacctatcctaawgcagggtgcaatcaggggagtgaagttgatgacaacttcctagaggaagggccgtttacattcaactctgagaaccagttagggctgcatgatattggaggggaggtgagagccccttaaaagaaacacctcagagaccagccctcctcccttcttttataaggcccctacagagtctttcacccaggccctgtcagcatcctgtctttcc

SEQ ID NO: 939521 - DNA, 432 bp, Homo sapiens
gcggacctttctgatggtctttggctttctgtcttccagagaaatgtgatcaaaacccagaaaaacagaaaggtgagcagtagctgaagtcctcactttgagggagggtggaggtggaaatgagaaatcaccctgggcaggacattccctggtcccttcttccgcatctaagatttattgaaagggagtaatacacagagaaggaggagacctatcctaatgcagggtgcaatcaggggagtgaagttgatgacaacttcctagaggaagrgccgtttacattcaactctgagaaccagttagggctgcatgatattggaggggaggtgagagccccttaaaagaaacacctcagagaccagccctcctcccttcttttataaggcccctacagagtctttcacccaggccctgtcagcatcctgtctttcc

SEQ ID NO: 939522 - DNA, 640 bp, Homo sapiens
tcatagacattattcaaaatacctttcccatattttgaagtttgatactactttgttaatgtgaacacttgccatagcaggctctattaaatatctctgtgaatttaactgtcaaaacaacttatgaagtaggcacatgatccccattttacaggtgaggaaacaaatgttccaagattttgagtaattttattaactttacacagctttctggtgcattttgaatcttaagttggatctctttctccacaatgcgtgggcttacctccttttctattttgtgcctctctgctagcatctgcaagggtacattttatttttagtacatcttccacttgatggtgggaaacttgacaaacagatccttagtgggagaggaaactcactggcatttgtccttctctctgctccttcttaccctggcaggcatgagacttatcaagtgagatggagcagtggtagatcctgaccagtcctcacctggaatatttgttattataaaaamatagtcctctcattttttacaagtgtaacttctttgccttaaagttttgtctgggctttctcttacaggttcctgcgaattaagttgcaaatattgatgaagataatactactgccttgctgtcaaacagtaaca

SEQ ID NO: 939523 - DNA, 701 bp, Homo sapiens
agtccctgtagactgaagggactcaagtcacaagatggggatttcctcctcatggtttttattttgatgtttgaagtcttgatgcaacattctgagctgggtgttcctgacctgctgtgcccaagggactgacaaaggaaaaagttgtatttattctttgtgatttgacgcacagatgaaaaactaaacacataataacggaagttggtggttaataaatcacatcctagtctttcagagcttccgtaagcagacgacatcttcagtttctagggtcttgcagttttaacactgcaaaaccaatgagcatatgtccagaaycagctaaaaagagcgtcagattctttttctcttagtttgtctatttttcactgtctcttcttcaaaagtgtatctgaatgattaccttccggcattctctgttattactcgttggggtgctctcgattgtccccgtgtttgagggctggttgggagagggtgcttgggaaggatgtgccactgtcgggagtttatgagtcaccaggatgtctccagggaaggtcccttccatggatgcaggaagtcctcctggacccacacccaagatgcctggatgaatttcttgctggtctatttcccaccaaagcacagatgtgacaaagaattcctcgttcacacagtttcttaagcttcctgggatgcgacctgtgatggctcgg

SEQ ID NO: 939524 - DNA, 701 bp, Homo sapiens
agtccctgtagactgaagggactcaagtcacaagatggggatttcctcctcatggtttttattttgatgtttgaagtcttgatgcaacattctgagctgggtgttcctgacctgctgtgcccaagggactgacaaaggaaaaagttgtatttattctttgtgatttgacgcacagatgaaaaactaaacacataataacggaagttggtggttaataaatcacatcctagtctttcagagcttccgtaagcagacgacatcttcagtttctagggtcttgcagttttaacactgcaaaaccaatgagcatatgtccagaatcagctaaaargagcgtcagattctttttctcttagtttgtctatttttcactgtctcttcttcaaaagtgtatctgaatgattaccttccggcattctctgttattactcgttggggtgctctcgattgtccccgtgtttgagggctggttgggagagggtgcttgggaaggatgtgccactgtcgggagtttatgagtcaccaggatgtctccagggaaggtcccttccatggatgcaggaagtcctcctggacccacacccaagatgcctggatgaatttcttgctggtctatttcccaccaaagcacagatgtgacaaagaattcctcgttcacacagtttcttaagcttcctgggatgcgacctgtgatggctcgg

SEQ ID NO: 939525 - DNA, 701 bp, Homo sapiens
agtccctgtagactgaagggactcaagtcacaagatggggatttcctcctcatggtttttattttgatgtttgaagtcttgatgcaacattctgagctgggtgttcctgacctgctgtgcccaagggactgacaaaggaaaaagttgtatttattctttgtgatttgacgcacagatgaaaaactaaacacataataacggaagttggtggttaataaatcacatcctagtctttcagagcttccgtaagcagacgacatcttcagtttctagggtcttgcagttttaacactgcaaaaccaatgagcatatgtccagaatcagctaaaaagagcgtcagattctttttctcttagtttgtctatttttcactgtctcttcttcaaaagtgtatctgaatgattaccttccggcattctctgttattactcgttggggtgctctcgattgtccccgtgtttgagggctggttgggagagggtgcttgggaaggatgtgccactgtcgggagtttatgagtcaccaggatgtctccagggaagrtcccttccatggatgcaggaagtcctcctggacccacacccaagatgcctggatgaatttcttgctggtctatttcccaccaaagcacagatgtgacaaagaattcctcgttcacacagtttcttaagcttcctgggatgcgacctgtgatggctcgg

SEQ ID NO: 939526 - DNA, 637 bp, Homo sapiens
ccttccaaggtgggtcaaaagcatttttcagagaagattattcctaacagtaaaggataataacagatggataaaaatctcaaataaattatgcctctatttgcagaagcgtcactctccagagtctccaagatccagagaatttccatgaggtagagtagtttatggacatttagcaaagttggtcctgactgctgtctcagcctcttaatagatgtgcagctatagacaatttactggacttagaacagttatataaacctgggctgcaagaaaacgcataacactgattgcaagaatggcaaccacttctcattcctctctgatctgggccctctgcaatgtacacttgrggctgcttccatggagggaaagattttcttttcccaaatcttggatcgggctggccttatttgctctgcctcattcatactttttgttctaataaaataattaagatgtttagcgtctcatcccagcctttatcttgttaaaactatatcttataatatgtcatctctctttactatatttggttatattcattctattcaatactcaggtaattttttatctctgtttaatttagtgtttcacctataccttgtcctaatttttttattctttacattctacc

SEQ ID NO: 939527 - DNA, 637 bp, Homo sapiens
ccttccaaggtgggtcaaaagcatttttcagagaagattattcctaacagtaaaggataataacagatggataaaaatctcaaataaattatgcctctatttgcagaagcgtcactctccagagtctccaagatccagagaatttccatgaggtagagtagtttatggacatttagcaaagttggtcctgactgctgtctcagcctcttaatagatgtgcagctatagacaatttactggacttagaacagttatataaacctgggctgcaagaaaacgcataacactgattgcaagaatggcaaccacttctcattcctctctgatctgggccctctgcaatgtacacttggggctgcttccatggagggaaagattttcttttcccaaatcttggatckggctggccttatttgctctgcctcattcatactttttgttctaataaaataattaagatgtttagcgtctcatcccagcctttatcttgttaaaactatatcttataatatgtcatctctctttactatatttggttatattcattctattcaatactcaggtaattttttatctctgtttaatttagtgtttcacctataccttgtcctaatttttttattctttacattctacc

SEQ ID NO: 939528 - DNA, 775 bp, Homo sapiens
taatattacacttgctgatgaaagactaggctctttgcctcacagttgtgggaaacagataagcatggctactttcgctactctactaaattgaactaaaggtgttaggcagagaaattatataataaaaacaaataaaacttctaaatttataaaataaacttttattgtaaatggcatcaacttatattcaagaatttttaaagagtttacaaaaatcaactggaactaataaatgagttcagcaggtcacaakatacaagataaatgcacaatattaaattgcacttttatacagtaactaagggcaatcagtaaataaaattagaaaaaataattctactcattagctcaatgtgtagtggcttaaaattccaaatatgcattatgtcttattttctgttggctacaaatactgacacagcttagttgaatgggtctaccacaatgtcctcatgtgtccggaattggtcggttcttggtctcactgacttcaagaatgaagccgcggaccctcacggtgagtgttacagttcttaaaggcagcgtgcctggagtttttcccttctaatgtcagcatgtgtttggagtttctttcttctggtgggttcgtggtctttctggctcaggagtgaagctgcagacctttgtggtgagtgttacagctcataaaggcagtgtggacccaaagagtgagcagcagcaggatttattgcaaagagcgaaagaacaaagcttccacagtgtggatggggacccgagagggttgccactg

SEQ ID NO: 939529 - DNA, 775 bp, Homo sapiens
taatattacacttgctgatgaaagactaggctctttgcctcacagttgtgggaaacagataagcatggctactttcgctactctactaaattgaactaaaggtgttaggcagagaaattatataataaaaacaaataaaacttctaaatttataaaataaacttttattgtaaatggcatcaacttatattcaagaatttttaaagagtttacaaaaatcaactggaactaataaatgagttcagcaggtcacaatatacaagataaatgcacaatattaaattgcacttttatacagtaactaagggcaatcagtaaataaaattagaaaaaataattctactcattagctcaatgtgtagtggcttaaaattccaaatatgcattatgtcttattttctgttggctacaaatactgacacagyttagttgaatgggtctaccacaatgtcctcatgtgtccggaattggtcggttcttggtctcactgacttcaagaatgaagccgcggaccctcacggtgagtgttacagttcttaaaggcagcgtgcctggagtttttcccttctaatgtcagcatgtgtttggagtttctttcttctggtgggttcgtggtctttctggctcaggagtgaagctgcagacctttgtggtgagtgttacagctcataaaggcagtgtggacccaaagagtgagcagcagcaggatttattgcaaagagcgaaagaacaaagcttccacagtgtggatggggacccgagagggttgccactg

SEQ ID NO: 939530 - DNA, 695 bp, Homo sapiens
agcagcaggatttattgcaaagagcgaaagaacaaagcttccacagtgtggatggggacccgagagggttgccactgctggctcgggcagctgcttttattctcttatctggccccacccacatcctgctgattggtccattttacagagagccaattggtctgttttacagagagctgattggtcccttttcacagggtgctgattgatgcatttacaatccttgagctagacacaaagttcaccacgtctctactagattagctagatacagagtgttgattggtgtatktacaaaccctgagctagacacggggtgctgatttgtgtgtttataaaccttgagctagatacaaagtgtcgactggtgtatttacaatcccttatctagacataaagtttctccaagtccccaccagactcaggagcccagctggcttcacccagtggatcccgcaccagggccgcaggtggagctgcctgcctgccagtcacacgctgtgctcccgaactcctcagcccttgggttgtcgatgggactgggtgccatggaacagggggtggagctcgttggggaggctcgggccgcacaggagcccttggcaggagtgggggagaggctcaggcaaggcgggctgcagttcccgagccctgccccgtggggaggcagctaaggcctggcgagaagtcgagca

SEQ ID NO: 939531 - DNA, 695 bp, Homo sapiens
agcagcaggatttattgcaaagagcgaaagaacaaagcttccacagtgtggatggggacccgagagggttgccactgctggctcgggcagctgcttttattctcttatctggccccacccacatcctgctgattggtccattttacagagagccaattggtctgttttacagagagctgattggtcccttttcacagggtgctgattgatgcatttacaatccttgagctagacacaaagttcaccacgtctctactagattagctagatacagagtgttgattggtgtatttacaaaccctgagctagacacrgggtgctgatttgtgtgtttataaaccttgagctagatacaaagtgtcgactggtgtatttacaatcccttatctagacataaagtttctccaagtccccaccagactcaggagcccagctggcttcacccagtggatcccgcaccagggccgcaggtggagctgcctgcctgccagtcacacgctgtgctcccgaactcctcagcccttgggttgtcgatgggactgggtgccatggaacagggggtggagctcgttggggaggctcgggccgcacaggagcccttggcaggagtgggggagaggctcaggcaaggcgggctgcagttcccgagccctgccccgtggggaggcagctaaggcctggcgagaagtcgagca

SEQ ID NO: 939532 - DNA, 564 bp, Homo sapiens
gcgccaaggccgaggaggcaccaagagtgagcgagggctgtgagggctgccagcatgctgtcacctctcactcatgagactgaagctgtgtctcaactgaagcttgactgggaaggatgcacttctgagctcaatctggttagttgtgcattattgttttgactcagttcttagtttctttgtgtctttggtcagggcactgtctccattctctgtcacacaagcctgtaaaaatgaaagcttaaaacattgaagctcgcttctccagagcaaagtatgcgacagacagagagaaagacaggaaaaaaggaagtaaacaatatcacaagagagagaaagtaagaagcaagtgacaatcttttcataatcaaatattggmagtgacattccctattttccaatgtattctactgccatgaagtgagtcactaaccacttactgtttacatttgggtgtgtatagttggaaataaaaattattatgagccatcatgaaggctgtgcactacgtatgccaaggtgagacaaatgggcctgattctaaatataacgagaaggtactac

SEQ ID NO: 939533 - DNA, 625 bp, Homo sapiens
aacacattcaagtcttgcaatgaacggcataatgtatggtggtataattcagagtggttacaggggagagttaaagatcattttatacaatatcactcgagaatcttttgctgtaaaactgcagatgtgggttcctcaatttttagtggtaccttgtcaacaattaacccctgaggatgtctctgccccaacagaggctacatacagaactgggagattcagacgcactggtacacrtagcttaaatcctggagccaaaatatgagtacagcgtccatcacatcctactcctatggctggtgaacttgtagctatgggagaagaaactgaaggcatagtacagtttcctaaagatgaaaaacaatattatgttcccctctgttttggttattacagagaataacctgtttactaatggtcagtacctgtgtctctgtgtctgatgccaagaataaattcatcatctgcatagccaccactgcaacagaagccaactgcagtcaatgttggctatgcgtggaattgccagaggccaccaaaaatgggctacgttggagaatcgtccctgtaccttactgcataccgaatgttgtgtgtatatccctgacaattctcacactacgac

SEQ ID NO: 939534 - DNA, 622 bp, Homo sapiens
agctcctattactttgagatacgtctcatcaattcctaatttattgagagttttttgcaggaagagttgttgaattttgtcaaaggccttttctgcatctcttgatatctcaagataatcacatggtttttttgtcattggttctgtttataaggtggattacgtttgttgatttgtgtatgttgaaccagycttgcatcccagagatgaagcccacttgatcatggtggataagctttttgatatgctgctggattcggtttgccagtattttattgaggatttttgcatagatcttcatcggagatattggtctaaaattctctttttttgttgtgtctctgccaggctttggtatcaggatgatgctgtcctcataaaatgagttagggaggttccctctttttctattgattggaatagtttcagaaggaatggtaccagctcctccttgtacctctggtagattttggctgtgaatccatctggtcctggactttttctggttggaaagctaattattaattattgcctcaatttcagagcctgttattggtctattcagagattcaaattcttcctggtttagtcttgggtgggtgtatgtgtcgaggaatttatc

SEQ ID NO: 939535 - DNA, 684 bp, Homo sapiens
ttacactacacatgggcacaaaaactttcctctgggcatagacatttgcagcatttgcagtaataacataacaacggaacaatcagtattgacagaattgtaactatggttataaattgtattcacatttacttatctggacatggtcctcttagcttcggctgtgtgtacactagtcagcttccgggatgtgactagagcagagtttgaagaatccttaagcttcagccatgcttagactgaccagcctccagtgtggtcagagcagggcggttgtcctttttaccggtggctgagatttgccatagggctattcgagtggggcaatctgggtcttgttggctaatccacaggttgtcatcasgactcgctactgtcactggttttagatggctatggtgaatccaaggtgtggcacctgcaactttaacagcagtgggagtggacatgattacaatatggcgcctatcgtatatgggtcctagagtggttgaattccattttttacctaaacgaagtccctaggtttgaaagggtgtactgggtctgttagacttataggcatttttttacatacttaaccatgcattttagtatagccatacttaaagcctgcatttgccttcttaaagttagttttcccaatttacagagattaccctgaatctgatttttatggggggt

SEQ ID NO: 939536 - DNA, 684 bp, Homo sapiens
ttacactacacatgggcacaaaaactttcctctgggcatagacatttgcagcatttgcagtaataacataacaacggaacaatcagtattgacagaattgtaactatggttataaattgtattcacatttacttatctggacatggtcctcttagcttcggctgtgtgtacactagtcagcttccgggatgtgactagagcagagtttgaagaatccttaagcttcagccatgcttagactgaccagcctccagtgtggtcagagcagggcggttgtcctttttaccggtggctgagatttgccatagggctattcgagtggggcaatctgggtcttgttggctaatccacaggttgtcatcaggactcgctactgtcactggttttagatggctatggtgaatccaaggtgtggcacctgcaactttaacagcagtgggagtrgacatgattacaatatggcgcctatcgtatatgggtcctagagtggttgaattccattttttacctaaacgaagtccctaggtttgaaagggtgtactgggtctgttagacttataggcatttttttacatacttaaccatgcattttagtatagccatacttaaagcctgcatttgccttcttaaagttagttttcccaatttacagagattaccctgaatctgatttttatggggggt

SEQ ID NO: 939537 - DNA, 794 bp, Homo sapiens
tgcccacacacagagggaacatttaaaccacggctagccagaggaaaattgccaaacccagcagtcagaaattgagttcctgcaaacctcttcaccaccttgggctaaagtgctaaagggcatacttcaatctgagagaaaagaacgttaatgagaaatacgtaataacctcatgatacacaattcactggtaacagtaactacacagaaaatcacagaatattataacactgtaactgtggtgtgtaaactattcttatggtaagagcaaagactaaatgataaaccaatcaaaataataagtacagcaacttttcaagacatagacagcacaataagataaaaaaacaacaaaatcttaaaaagcaggaggacagagtcaaagtttagaatttcattagtttttttcttattcttttgtttgcttatgcaaataatgttaagctaccataggatccagcaatcctcctgctggatatatacccaaaagaaaggaaattagtacattgaagagatatctacactccmacatttgttgcagtactgtacacaatagccaagatttgaaagcaacctaagtgtccatcaacagatgaatgaatcaagaaaatggggtacatttacacaatagaggcactattcagccattaaatagaatgagatcctgtcatttacacaacatggatgtaactggacgatattatgttacatgaaatatgccaggtacataaatataaacattacatgctatcacttatttgtgggatctaaaaatccaaggaattgaactcatg

SEQ ID NO: 939538 - DNA, 637 bp, Homo sapiens
ttttgttttgcttgtttcagacaaggtctctgttgtccaggctggagtacagtagcgtgaacacagctcacggcagccttgaattcctgggctcaagtaaccttcctaccttggcatctcaagtagatgggactatggacatgtgccaccacacccagctatttttttatttttatttttagtagagatgaagtctcgctatcttgcccaggctggtcttaaattcctaggctcaagcgatcctcccacctcagcctcccataagtgttcggattacaggcgtgagccaccacacccagccagatataagagttagaaggcagttgcagacttctggtctttctctgactacactaacagtcaamttggccagctctgggttttccatgttactcgatggaagtcaaagcaaacacaagtgagaatctacagttatagtttccagtgttctcctgtaaattctgctggtgagatataaaataaagtttctttcacattgattgtcccagcattctgggtttttttgttttctgatttttggtttttgtatgctgaaatacccgtggagagaactacagaggatttgagatgcagaaccagaacaagcataacctacagcaaaatcccaaatcacaga

SEQ ID NO: 939539 - DNA, 595 bp, Homo sapiens
tctctgccaatttgcacacagcttgcagaagccagtgtggtcaaaaaggaccctgtcctccaaatgttaatttaagaatctatggtctgatcactagttgctgcttctgattaccaaagtgcagacaaagagtccagtgrccatggttgttgcaccttcatggtttgggtcacttttttctatggctgaagtgactttctgggagtttaaaagaccaagtccccttgtacctctttatttcctcttttggtagacagatactgaagattaggagattcaaaagtctccacttacatgagggaaattagggaataaccacaaatctccagaggaagatgaaggctcagaaaagacccaagatgaccttaagtttatatgtcaagataatccttagcaaagacacaagctacaccaactttttaaagtagcaaagcctggggaagggagtgaatctgattttcagagttaacacattattagattcaaatatgcaattttgacaaaaaaattacaaagtatacaaagaagcaggataatatggtccactcaaagattaaaaaaaagtgagccaacagaaattgtccctgaaaaagac

SEQ ID NO: 939540 - DNA, 560 bp, Homo sapiens
cttacatagcagaaggtgacaaggcccaagagcagacaaaatccctcactgaagccctttatgagggcacctaatccattataagggaggagccctcatggtgtaatcatctcttaaaggccctttctcttaatactatcacattgtcaataccggagttttggaggggacacattsaaaccataccagagagttttgcagatttggggagtaagaaggatgagttgtctgagagagagagaagacagataaagaatttcaggcagcctagccaggtagtgctgagaaatccacttgatgttggtgaacacgaagttaaaatgtggctaaatgtcatggctgtgtgctggctgctatcatgttcatctcatgggatcctgtcacagattaagcagattgtttaaccagtgctggggatttcatgggcaagtataccacagggagaaagaggcaagagcattcagattattttcaaaggaatgattattgtgtggcaccagaacatttagccaggaaagtgtatacatgagcaagataatagatcaataatggtcaatggc

SEQ ID NO: 939541 - DNA, 610 bp, Homo sapiens
ctcataaaaaatgtttatgccatgtactttaccccaaatgttactttattaattcagtcatgtgaccagggtattcttagatcaatgagaaataaatgtaaaaacaccttcttgagaagcatgctagcagcagtgaacagaggcgtggatgatagaaggctttcaaaagaagcttagcatgaagatgtcatgtatgtggttgcccatacttggaacacaatgactaaagacacagttgtgcatacctggaacacgctctgtcctgcaactatgttaagtgatgatgatgagcaagataattatttatgttaagtgaggaagaaaaatgatggtatgacctccttacagatgcaaaaactatacsttcagagtccgttagtaagctgggagaagtggatattgaagattttcaacatccataatgaggctccaggtgttcatttattgaacaatggtgaaatagccaaaatggttttgaatcagggtgacagtgataatagtgatgatgaagatgatgataacactgaagcaaaagtgcctatagatgacatggtgaaaatgtataatgggcttgttgaaggactagagcagcatgtattcataacaggac

SEQ ID NO: 939542 - DNA, 590 bp, Homo sapiens
catgatcagttcggtgaagacttctctggctctttactgcaaagttaactcttccttcattatattctgttgtcctttatacatgtccctcctagagcacttattatatcaaagttacttcttcatccacctatccctgaaaagatgatgagcttcatgaggatagacaatatgacctggctgattttataccctatgccttgagctatactgcatcacagattagatattgaataatcaatatcttttgttaaatgaataaacaaaaataattttaacatgaagatcttatgtttaatagttgttcaaacataaattgaaaatgtaagcccctaagaaatttagagtggtatagtagataggaaaatagttcttatatttawatttgctttcaagaaatatttctaaaccaagtttgataaaaactcatgacccagtcatgtgcttttggagaattgtaccatttctgtcaagctccagttcaaatgacattccattttgaaagattttattgttaactggtccgtgctaattagtatggctacaaagataaagaagattttcttcccacagaaacttcataaacaaaa

SEQ ID NO: 939543 - DNA, 590 bp, Homo sapiens
catgatcagttcggtgaagacttctctggctctttactgcaaagttaactcttccttcattatattctgttgtcctttatacatgtccctcctagagcacttattatatcaaagttacttcttcatccacctatccctgaaaagatgatgagcttcatgaggatagacaatatgacctggctgattttataccctatgccttgagctatactgcatcacagattagatattgaataatcaatatcttttgttaaatgaataaacaaaaataattttaacatgaagatcttatgtttaatagttgttcaaacataaattgaaaatgtaagcccctaagaaatttagagtggtatagtagataggaaaatagttcttatatttatatttgctttcaagaaatatttytaaaccaagtttgataaaaactcatgacccagtcatgtgcttttggagaattgtaccatttctgtcaagctccagttcaaatgacattccattttgaaagattttattgttaactggtccgtgctaattagtatggctacaaagataaagaagattttcttcccacagaaacttcataaacaaaa

SEQ ID NO: 939544 - DNA, 624 bp, Homo sapiens
ctgactcagtcccatagtcacaggcaccggaacagtccccagcctgccccttgactcagagcccccatctccaaactgtgcctcagatttgggagcactaacgcgataactttgacttcttttgtgctgtagtgaccagccttctgaaagtgcccagaaattctctctgaagtgtgtttgaggccatgggacggagggaagtggccttttagcagtactgggcaggcagaattggcaagagtaattggaaagctaaggtacctcagcagcaagaggtctgggaccacagaagcaggtcaggaagctgttttggggccactacgacctttggatgtggactttgctttcaggcttacacagtgcccrtaagtgagctgcactgcagccctagccctgccacttgtgagtgagctgatctcagcagggtggtatgctccctgctccgtgctcccctgctttgcaacaccacagcctgcgtggttaatatcccggatgacagttgcttgtttttattccaacatgaccagttagaagcagggcaaccgtggacaaggtggtgaacccctttgtacttctgtgttttcagttgaaaaatggagacgtcaagttccctagtcacagagc

SEQ ID NO: 939545 - DNA, 590 bp, Homo sapiens
actgtgagttttccagcctgctccctttctaaagtatattactctgcttttggttcatgaagttatccatttctgttttctggaacagctatgtattttctttatctatcatctatctatctatttaccatctatcttttctacctttcgctatcaagagcttgggtcaagcaggatagaattccagtgtatgttcactctaccatttaaaacaagagctcttgtaggcattctccatcacatcataaacctgagctttctaaaacagrgtgtggcaaactaccatgcatgggccaggtctgacacagtctgcgtttgtaagtaaagttgtaatgggacacagccacatacatgtgttatacaatgtctctggctactttcatggtataatggaagagctgagtcattgagagagggacaacatggcttggaaaacttgaaatatttaacatttagccctttgcagaaaatatttgctgactcttgttttagaagatctctctttagaatgctacctattgccttctggatagaatcacaactctttaccacaatcaacacacagccctgcttttattatttccactcct

SEQ ID NO: 939546 - DNA, 590 bp, Homo sapiens
actgtgagttttccagcctgctccctttctaaagtatattactctgcttttggttcatgaagttatccatttctgttttctggaacagctatgtattttctttatctatcatctatctatctatttaccatctatcttttctacctttcgctatcaagagcttgggtcaagcaggatagaattccagtgtatgttcactctaccatttaaaacaagagctcttgtaggcattctccatcacatcataaacctgagctttctaaaacagggtgtggcaaactaccatgcatggrccaggtctgacacagtctgcgtttgtaagtaaagttgtaatgggacacagccacatacatgtgttatacaatgtctctggctactttcatggtataatggaagagctgagtcattgagagagggacaacatggcttggaaaacttgaaatatttaacatttagccctttgcagaaaatatttgctgactcttgttttagaagatctctctttagaatgctacctattgccttctggatagaatcacaactctttaccacaatcaacacacagccctgcttttattatttccactcct

SEQ ID NO: 939547 - DNA, 791 bp, Homo sapiens
ggagaatcgcttgaacccaggaggtagaggttgcagtgagccgagatcgcgccgctgcactccagcctgaaagacagagggagactccatctcaaaacaatcaataaaattacacaagcaaaactttaaaatatccaagtattgttttgcagagatagcccttgactccccacccaccgtgtaccccactcaccccaaaggcacctgcatgtcccctaagaatctgtagcctgcatgtcccctaagaatgtttactcttcatttactcacacggaagcaccaggaagagcagcaaaaggcaagaaggaaggggagggcatgattctaatcagcacagtccagagaaagccttgctgagaargtgatatttgcagaaacctgaaggcaatgagggactgagtctgggctgaggagtggcaggtgcaaaggtcctgaggcagaagcgtgcttggtgtgttcgaggaacaacaaggaggaggtcaatgtgactggagcagaggaagcttagagagagagcgcacagtaggagttgtagttggggcgagtgagcatccggatcactgaggaccttgtaggacagagggaggactttgatttttactctgagtgaggcgggcagtcactggaagacaaagagcaacgaatatgatgatttcactgactgttttaaaagaagtcctggccaggcaggcatggtggctcatgcctgttatcccaacactttgggaggccaaggaaggaggatcacttgagcccagcagttcaagaccagcccgggcaacgtggtgaag

SEQ ID NO: 939548 - DNA, 634 bp, Homo sapiens
gtaattgtgctgctataaacatgcgtgtacaagtgtctttttcatttaatgacttcttttcctctggatagatactcagtagcgggattgctggatcaaatggtagtttctacttttagttctctaaggaatctccacactgttttccatagtggttgtactagtttacattcccatcagcagtgtagaagtgkttccttttcactgcatccacaccaatatctttttttttttttttaatggccattcttgcaggagtaaggtggtattgcattgtgggttttttttttttttgagacggaggtcttgctctgtcgccaggctggagtgcaatggcaccatcttggctcactgcaacctctgcctcctgggttcaagcgattctccagcctcagcctctcgagtagctgggactacaggcatatgccaccatgcccagcttatttttgtatttttaatagagacggggtttcaccatgttggccagatgatctcgatctcttgacctcatgatctgcctgcctcggcctcccaaagtgccgggattacaggcatgagccaccacgcctggccgccaggggttttgtttgtttgttttgttctgttttgttttgttttttgagatggagtctta

SEQ ID NO: 939549 - DNA, 634 bp, Homo sapiens
gtaattgtgctgctataaacatgcgtgtacaagtgtctttttcatttaatgacttcttttcctctggatagatactcagtagcgggattgctggatcaaatggtagtttctacttttagttctctaaggaatctccacactgttttccatagtggttgtactagtttacattcccatcagcagtgtagaagtggttccttttcactgcatccacaccaatatctttttttttttttttaatggccattcttgcaggagtaaggtggtattgcattgtgggttttttttttttttgagacggaggtcttgctctgtcgccaggctggagtgcaatggcaccatcttggctcactgcaacctctgcctcctgggttcaagcgattctccagcctcagcctctcgagtagctsggactacaggcatatgccaccatgcccagcttatttttgtatttttaatagagacggggtttcaccatgttggccagatgatctcgatctcttgacctcatgatctgcctgcctcggcctcccaaagtgccgggattacaggcatgagccaccacgcctggccgccaggggttttgtttgtttgttttgttctgttttgttttgttttttgagatggagtctta

SEQ ID NO: 939550 - DNA, 847 bp, Homo sapiens
gcaatcaaaaatgcctcatagatagaatgcaaccattccaccctcaaagcagtgggaaaaaatgaggcaaatatttgaaaaattccatttcaagaatgttcttttccttgaaatttccatttaaattaaaagtgatttttctttttttaccatgaattattcatataatttccacaacttttgcgtagcaaatattgcatggttgaaggaaaaggagtccattcagcacgagcgaacaaatgttaatcgtgtcctgctgtgaaattccccactggataggaggcttttcactatgaagaatgatctgtatgtgtttggcttttgatgcggaagcctctttcccagtataaattctgaaataaaatcactcaatgccagcaagtgcttgcctattaacacagtaagacctttcagtgtttttccattactttgatctccaaggaattatccactaacaacacatatgcccactagtagatactattatcaatataaaaatatcaacatcgttaaagaaaaagtgccaagcttggcaactggggtaagtgtacactgtattgtatatgatgtkgaatatcaataaaatcaataaaagaacaaaagaactggaatttatctgaaacaggagaacaatatatggtcctagagcttcttttaagaaaccatatcatgtaagtttttatttcacattattatattcattgagaccattgcttctttaaaatgcttgaatgtgataagagttagtagagacattccatttgcctcacactgacccttgggttaaacataaatgcctaagagtactccagtgatggtatcactcataagctacttatctaaaccc

SEQ ID NO: 939551 - DNA, 563 bp, Homo sapiens
gactggatcactggcacaggacccaagccaggcagaatgttgactgtgcttgttggatagacatgccgcagatgggcagagctggtggttgggctctctggttgggtgaggccactggcagggatgtggtctcattgtcatgatttgcatactgtttgctgtgagccccacccccttctttgttcctagctgactccagtggtctagccctcccatttcttccctatgaggcaagacagacatggatctcctggaaagcaccctggaaagctgggaaagttggggaagctgaatgtctgccttgggctttctttttcccactgcagaaactataggcccaggggatcactctctggccccatgtgggcctggtgaggggcgatgcagtcaaaaagtcaagccactcttacccgtctaatggggctkttggtatttgtgctccaagggagtgcttaagccctaggctctggaattttcacaaaggtgttcttgtctgtggataattactaattgacatttctgtgatagtgactagaacctggacctcctattccaccatcatg

SEQ ID NO: 939552 - DNA, 631 bp, Homo sapiens
cacagtcagtgatcagagcagtaaagcccttggtgaaacagtccccattcatccccaccctgtgcaggaggcagaaggtatagtctccagaaaatgggaaccagagaccaaagaggactaagcaccaggcacagtgtggggcagagtgaagtgaaagaacttaaacaaggattaagtaaaagcaacacaccagcrttccccaacatcagtcctcagccagaattctctggagaaaccctcacccaagcccttcacatgtttacattttggggacttccccggcaaagccaattaactttcaacctatagtgaagcttaatgatcagcaagcacacctctgacacacaaactttgtgactgttatttttttagtgcctcatacttaaacgtgaatagaaagccaaagccaccagcatgaaaacaccaaaccaaaagagggaatagacaaagcacttggaaatttaaaatatgataaagtaaaaattgtatttaaaaggtagtaagatttaggctgggcatggtggctcatgcttgtaatcccaacactttgggaggctgaggcaggaggatcacttgagcccaggagttcaagaccagcctgggcaaacagtgagacccccaactctacaaa

SEQ ID NO: 939553 - DNA, 631 bp, Homo sapiens
cacagtcagtgatcagagcagtaaagcccttggtgaaacagtccccattcatccccaccctgtgcaggaggcagaaggtatagtctccagaaaatgggaaccagagaccaaagaggactaagcaccaggcacagtgtggggcagagtgaagtgaaagaacttaaacaaggattaagtaaaagcaacacaccagcattccccaacatcagtcctcagccagaattctctgragaaaccctcacccaagcccttcacatgtttacattttggggacttccccggcaaagccaattaactttcaacctatagtgaagcttaatgatcagcaagcacacctctgacacacaaactttgtgactgttatttttttagtgcctcatacttaaacgtgaatagaaagccaaagccaccagcatgaaaacaccaaaccaaaagagggaatagacaaagcacttggaaatttaaaatatgataaagtaaaaattgtatttaaaaggtagtaagatttaggctgggcatggtggctcatgcttgtaatcccaacactttgggaggctgaggcaggaggatcacttgagcccaggagttcaagaccagcctgggcaaacagtgagacccccaactctacaaa

SEQ ID NO: 939554 - DNA, 631 bp, Homo sapiens
cacagtcagtgatcagagcagtaaagcccttggtgaaacagtccccattcatccccaccctgtgcaggaggcagaaggtatagtctccagaaaatgggaaccagagaccaaagaggactaagcaccaggcacagtgtggggcagagtgaagtgaaagaacttaaacaaggattaagtaaaagcaacacaccagcattccccaacatcagtcctcagccagaattctctggagaaaccctcacccaagcccttcacatgtttacattttggggacttccccggcaaagccaattaactttcaacctatagtgaagcttaatgatcagcaagcacacctctgacacacaaactttgtgactgttatttttttagtgcctcatacttaaacgtgaatagaaagccaaagccaccagcatgaaaacaccaaaccaaaagagrgaatagacaaagcacttggaaatttaaaatatgataaagtaaaaattgtatttaaaaggtagtaagatttaggctgggcatggtggctcatgcttgtaatcccaacactttgggaggctgaggcaggaggatcacttgagcccaggagttcaagaccagcctgggcaaacagtgagacccccaactctacaaa

SEQ ID NO: 939555 - DNA, 571 bp, Homo sapiens
gagaaggttcatcaattttgaaaggagagctttacttctcataaagggttacaggctgcagggtggccattctgagaagctgggaagcatagcttctggccagaagcagaaactagataatttgaggttgggaagaataagacagggatttatgctgaacaaggtggccaaatatacatatttaataagccacggaaggccatgaayatttatgaaaggagaaacaaacacacgtgcaattgagctttgtttctccccatgggacccatgttcaaaaaatgggggtgttagcatgatctgtgggtggagttttaagccctctcatgtcaaaaggtggagcagatgacacaaaagcccttactgtgagttttctgtagactggctagaaccactcatttcttgtgaggcaaaaagggaggagcaatgtcaaggagttagttaatactaatggtggagtcttttgaaagggctagcttctgtttagctcttggggaataatgattaatggtggttagcaggggaagggtataaacaagtcatgtatgacctcccatcgagtcatggcagagaa

SEQ ID NO: 939556 - DNA, 571 bp, Homo sapiens
gagaaggttcatcaattttgaaaggagagctttacttctcataaagggttacaggctgcagggtggccattctgagaagctgggaagcatagcttctggccagaagcagaaactagataatttgaggttgggaagaataagacagggatttatgctgaacaaggtggccaaatatacatatttaataagccacggaaggccatgaatatttatgaaaggagaaacaaacacacgtgcaattgagctttgtttctccccatgggacccatgttcaaaaaatgggggtgttagcrtgatctgtgggtggagttttaagccctctcatgtcaaaaggtggagcagatgacacaaaagcccttactgtgagttttctgtagactggctagaaccactcatttcttgtgaggcaaaaagggaggagcaatgtcaaggagttagttaatactaatggtggagtcttttgaaagggctagcttctgtttagctcttggggaataatgattaatggtggttagcaggggaagggtataaacaagtcatgtatgacctcccatcgagtcatggcagagaa

SEQ ID NO: 939557 - DNA, 595 bp, Homo sapiens
gctccctactcagtcagccactgtcttcaagacccctcttcgacctcgaccattgttttccatgcctttttctttcatttggccgttcagtgattcttctttagcaaagttcccattttcttctctttccatttcttctaccatcaccttagatctctttccccagatgttgacaagtaaactccaacttgaacatcttcatctcttgcagaacaaaatcagtgagcctggcattctagatcctattratcaggctttctcatctctttaatccaaccttccatggcttctcgttcaagttctcaactctaactttccaaaccagctcccttaccattcaccaaccacactgagtgcttttttttttcacctccaagatttgtttcctgctgtccgtttccatagaataataccccattccccattcccagctctgcgtctcaagatcccatctattcttcaaggcccaactcaaacataaccagccaggaagtcttccttgatatccctgctggaagtgccgtcttgctcacgtggggaaggtggtgcacattctggaatcagacagacccgagtctgaatcctgcctctgcca

SEQ ID NO: 939558 - DNA, 646 bp, Homo sapiens
agaatactgtcaagcagaaacaaaaatcatgtagcctagaggctgttagcttctgtacaggcatcactttacaagacttaatgatatttttcatttcattttgttttttaatttaatttttttttttttttgagacaagagtcttgccctgtcacccaggctggagtgctgtggcactatcttggctcactgcaaastccaccccccaggttcaagtgattctcatgtctcagcctcaccagtagctgggattgcaggcaccaaccaccacgcctggataatttttgtgtttttagtagagatagggtttcaccacgttggtcaggctggttttgaactcctgatctcaagtgatccacctgcctcggcctcccaaagcactgggattacaagtgtgagccaccttgcctggccaatatttttcaaatagttcattggtatcacatgtttactaaatacacaacaagagctgcagactggtctgtactgagtatgtctgccagagccctgaaagtgggagtgtatttatgaaatacatgtctttttctccctgcttacagaattaataaggatttttcatgaagaatccaaacattggagaaagaatgtcaaatgtgaaagcccctagaattccatcctccatgta

SEQ ID NO: 939559 - DNA, 593 bp, Homo sapiens
ttttctactgtaacaacccctagggaggagggcaaagagtaagggaaaaacctcgatgataatataagaaagagaaacaaaaaaaaaaatctacccaaaagaaaataattacaaaaatataaagtgtaagtgtctctggatgaaagggaaccagcacaataattctggcaccatgaataatctgaatatagtgacaacacaaaagtaccatgccagctctccaacagtgatccctaactaaaatggaaatgcaaaaatgacagatgaagaattcaaagcatggattgcaaggaagcccaacaagatgcaagacaaagttgacacaaagaaacttctaaagcaatccaggaaatgaaggaagaaataaacaccttaaaaagaaatcaatcggagcttctggaattgaaaaactcacktaaggaatttcaaaatacaattaaaacagtatcaatacactggaccaagcagaagaaagaatttcagatcctgaagaccagtctttcaaactaacctagtcaagcaaaaataaagaaaagggaactttaaaaaatgaacaaagtctttgagaaatatgggattatgtaaatcaacca

SEQ ID NO: 939560 - DNA, 628 bp, Homo sapiens
cctcaaattaccagctttttacatgggcctggctggtgacagaggctcaaccagttggcatcagccagcctctgtctgcaaactatatgtgggatcaacagcaaaggctcttcttaccagtgctaatcaaactgctgttaatttcaaatatttaattttctagcaactgagatcagtgatgagttcccagaatggaaccatccattgaggagaccaatcagtacccttaaattctatgaaattgtttgagttgtgtatgctgtcatttcagcaaagaactcatcctaaggactgataaactggactccagcaaatattgttctggatataaacgtggtaatcctyaggattgtcaatagccagagcaacatgtagaaagttggtaattcatgtttactgacaatgttctctttttctcttttagattatttagccaagctatctgtcactgcccatgagtttgtatgtacactaaccattggccacttctcttcccactctgcctgaaactttgcccatatcagtaatctttccaatttgctgtctttcaaagctatccctgtttggggatgatttggaacagccgtaattttttggtttatctacatagtaagccaactcatccttt

SEQ ID NO: 939561 - DNA, 544 bp, Homo sapiens
gccttgtgctggttttcaaagggaatgcttccagtttttgcccattcagtatgatattggttatgggtttctcataaatagttcttattattttgagatacattccatcaataactagtttattgagagtttttagcatgaagggttgttgaattttgtcaaagaccatttctgcatctattgagataatcgtgtggtttttgtcattggttctgtttatgtgatggattatgtttattgacttgcatatgttgaaccagtcttgcatcccagggatgaagccrgcttgtttgtggtggataagctttttgatgtgctgctggattcagtttgccagtattttattgaaggtttttgcattgatgttcatcaagaatattggcctgaaattttatttttttattgtatctctgccaggttttggtagcaggatgatgctggcctcacaaaatgagtcagggaggagtccgtctttttctattttttggaatagtttcagaaggaatggtaccagctcctctttgaacctctggtagaattcagc

SEQ ID NO: 939562 - DNA, 605 bp, Homo sapiens
gctcacacatttatggagcctgagaagttccacaatatgctgtctgcaagctggaaacctaggaaagccagtgatgcaatttcagttttaatcagaaggcctaagaagcaaagaaactaatgatgtaagcatcacttcaaggataagtgaagatgkatgtcccatctcaagcaggcaggcaggaagaaaaaggaacaaattcctccttcctctgccttttctgttctattcaggctctcaggagattggatgatggccactcccattggagagaccatctactcctctgagtccactgattcaaatgccaatctcatctggaagctccctcacagatacacccagaaacaatgtttaatctggacaccctgtggcacactgaagttgacacataaaattaaccaacacagtcagcaaatttcttctgaaaagggtgaggcggtagttattttaggctttataggccatatggtttctgtcacaactactcaactctgccataatagcctgaaagtagacatagacattatgcaaaagtattggcacgggtgtattctaataaaattcactcacaaaaaatggcggtggggtgcattcagcccatg

SEQ ID NO: 939563 - DNA, 562 bp, Homo sapiens
accagaggtacaaagaggagcttataccattccttctgaaactattcccaacaatagaaaaagagggactcctccctaactcattttatgaggccaacatcaccctgataccaaaacctggcagaggcaaaaccaaaaaagaaaatttcaggccaatatycctgatgaacattgatgcaaaaatcctcaataaaatactggcaaactgaatccagcagcatatcaaaaagcttattcaccataatcaggtctgcttcatccctgggatacaaggctggttcaacatatacaaatcaataaatgtaatccatcacataaacagaactaatgacaaaaaccacatgattatctcaatagatgcagaaaacgccgttgataaaattcaacagcccttcatgctaaaaactctcaataaactaggtattgatggaatgtatctcagaataataaagagctatttatgacaaacccacagccaatatcatactgaatgggcaaaagttggaagcatttcctttgaaaaccagcacaagacaaagatgccctctctccccactcctat

SEQ ID NO: 939564 - DNA, 742 bp, Homo sapiens
cctcagctgcaggtctgttggagtttgctggaggtctactccagaccctctttgcctgggtatcaccagcggaggctgcagaacagcaaatattgcagaatggcaaatgttgctgcctgatccttcctctggaagctttgtctcagaggggcaccaggccgtatgaggtgtcagatggcccctactgggaggtgtctcccagttaggctactcggggttcaragacccacctgaggaggcagtctgtgtgttctcagatctcaaactccctggggggagaaccactactcttttcaaagctgtcagacagggatgtttaagtctgcagaagtttctgctgccttttgttcagctatgccctactcccagaggtggagtctacacaggcaagcaggcctccttgagctgtggtgggctccacccagctcgagcttccgggctgctttgtttacctactcaagcctcagcaatggcggatgcccctcctccagtcttgctgccaccttgcagttttatcttagactgctgtggtagcagtgagcaaggctctgtgagcatgggaccctcagagccaggcacaggatataatctcctcgtgtgccgcttgctaaggccattggaaaagtgcagtattagggtgggggtgtcccaattttccaggtaccgtctgtcacggcctcccttggctaggaaagggaatcccctgaccccttgcacttcccagttgaggtgatgcaccacc

SEQ ID NO: 939565 - DNA, 566 bp, Homo sapiens
acatggcgaaaacctgtctctactaaaaatacaaaattagccaggcatggtggcacatgcctgtaatcccagctccttcggaggctgaggcaggagaatcacttgaacccgggaggcggaggttgcagtgagctgagatcgtgccattgcactccaccctgggcaacaaagagcaaaactccatctcaaaaaaaaaaawaaataaataaataaaataaaaaaagaaagaaagaaagaaagaaatactatgtcatggcaacaatctatatcattgctaagacatcaccggaaatctaatgatttaatgatggagaatgtattagcttcccattgctgctgtaacaaattattacaaatttagtgcttaagcaacacaaatatattatcttatggttttggaggtcagaagttcaatgtgggtctcactaggtgtcttagtctactagagatgtcataataaaataccacagaccatgcagtttaaacaggaatttatttttcttacaattctagaggctggaaagtccaaaagcaaagttgtggtcagttcagtttcaggtgagggc

SEQ ID NO: 939566 - DNA, 566 bp, Homo sapiens
acatggcgaaaacctgtctctactaaaaatacaaaattagccaggcatggtggcacatgcctgtaatcccagctccttcggaggctgaggcaggagaatcacttgaacccgggaggcggaggttgcagtgagctgagatcgtgccattgcactccaccctgggcaacaaagagcaaaactccatctcaaaaaaaaaaaaaaataaataaataaaataaaaaaagaaagaaagaaagaaagaaatactatgtcatggcaacaatctatatcattgctaagacatyaccggaaatctaatgatttaatgatggagaatgtattagcttcccattgctgctgtaacaaattattacaaatttagtgcttaagcaacacaaatatattatcttatggttttggaggtcagaagttcaatgtgggtctcactaggtgtcttagtctactagagatgtcataataaaataccacagaccatgcagtttaaacaggaatttatttttcttacaattctagaggctggaaagtccaaaagcaaagttgtggtcagttcagtttcaggtgagggc

SEQ ID NO: 939567 - DNA, 611 bp, Homo sapiens
gcactccacgaccagccggaactcccactcaggtgcccttctctctctcgcagaagagagagctgttttcttttctctttcttttgcctattaaacctctgctcctaaacccacttcctgtgtgtctgcatactcgatatccttggcatgagatggcgaacctcaggtgtttaccccagagaatgatgtttcttyggaattgctgaaacatatggtaattctatgtttaatttgttgaggcaccaccatattgttttccatagtggctgcaccattttacattcctgcccattcccaatgcatccggcttccagtttctcaatatccaacacttgttattttctatttttttttttcattagtagccttcctaatgagtgtgaagtggtatctcattgtgattttgatttgcattttcctaatgattgattagtgatgctgagcatcttttcatatgcttattgaccatttgtatacatattatctttggacaaatgtctattcaagtcctttgcccattttttatttggactgactttgttgttgttgagttgcaggagttcttatttttaaatatttaattttttttttttagagacggggtctcactg

SEQ ID NO: 939568 - DNA, 611 bp, Homo sapiens
gcactccacgaccagccggaactcccactcaggtgcccttctctctctcgcagaagagagagctgttttcttttctctttcttttgcctattaaacctctgctcctaaacccacttcctgtgtgtctgcatactcgatatccttggcatgagatggcgaacctcaggtgtttaccccagagaatgatgtttctttggaattgctgaaacatatggtaattctatgtttaatttgttgaggcaccaccatattgttttccatagtggctgcaccattttacattcctgcccattcccaatgcatccggcttccagtttctcaatatccaacacttgttattttctatttttttttttcattagtagccttcctaatgagtgtgaagtggtatctcattgtgattttgatttgcattttcctaatgattgattagtgatgctgagcatcttttcatatgcttattgacyatttgtatacatattatctttggacaaatgtctattcaagtcctttgcccattttttatttggactgactttgttgttgttgagttgcaggagttcttatttttaaatatttaattttttttttttagagacggggtctcactg

SEQ ID NO: 939569 - DNA, 622 bp, Homo sapiens
gtgttctgagggagaagagtaagtaaaaagtttggaaaaattatttgagggaataattgaggaaaactttcctgagcttgctagaaatttagatatccaaatacaagaagctcaaagaactcctgggagattcatcacaaaaaggactttaccaacgcctatagtcatcagactgtctaaagtcaatgtgaaggaaataattytgagacaaatgagacaaaagcatcaggtaacctattaaaaagcaaaacaaaacaaaaaaacctatcagactaacagcagacttttcagcagaaaccttacaaaccagaagggattggggtcctatctttagccgccttaaagggaataactctcaacctagaattttttatccagaaaaactaagatttataaacaaagaggaaataaagtcattttcagacaaacaaatgctgagggaatttgtcactaccagaccagccctacaagaaatgctaaaaggagttctaagtcctgaaacaaaaggtcaatatacaccagaatagaacctcttgaaaggacctataaaacaataacacaatgaaaaaaaacaaagtatctaggtagcaattaacatgatgattagaacagtacctcacat

SEQ ID NO: 939570 - DNA, 623 bp, Homo sapiens
ctttgtagaatatatgagaatataaaggaaaaaaattccagacaagtgatagaattagaatattaccattttgcagcccacaatgaattaaggctttaagcatcaatggctgctaacatcacgaaaaacaagtagagattatgtacctactgaggaggaacacagtgccacctataaagttgtcttgttaaaataaaaaaattaaacctgaatctgatcaaacctctagttacaactagtaattttcaggaactacagaaaacagaagaacatgttaaactgtaccacagaggtacaatcagcaaaacccagaatggsaaacactacaggcaaacaacctgttttgtttttttttccaacaaataaattacaaaaggaagaaaacaagttggagaagaaacatatacattaaaattacgatgtggggaacttactggatcctgattcaaatgaactatttaaaaaattatgacattctgagaccactataaatttttagatgtcctgcatccttgatgatattaaagaatcattgctaatgttagacataaaatggtattatgagtatatatttttacataccccttatcttttagtgtacgtattgaaatatttacctgtgt

SEQ ID NO: 939571 - DNA, 613 bp, Homo sapiens
caaagtagcagatatgtagaataaacaggtctagaaatgtaatgtataacatgagggagataaacaataaacttgcactgtatttgcaattcataccaaatgagtagattttaactgctcctgccacatgcaaaaaaagtaactgtgagatgatggatatgttaatttgcttccatatagtaaccttattactatctatatgtattccataacatgatcatgttataagccttaaatatacataataaaatttatttttaaaaaattaatgaaataaaagcagatcagtcttcatcattaccaaaggagtttggcaatggattcttggatgtgacatcaaaagcattagcagcaaaagaaaaggcagatagattagacttcttcaaaatttaaaacctttgtgtttcaagggacattaaaaagaaagtgaaaagaaaacytacagaataagagaaaatatttgcgaatgatatatctgacgaaagcctagtatccagaatatataacaaactcccacatctcaacaacaaaaagacaaacaacccaatttaaaagtggggcaaaggacttaaatagacacctcaccagtgaagatatacaaatggccaacaag

SEQ ID NO: 939572 - DNA, 596 bp, Homo sapiens
tctcctctcaacgttcagatgcttctttcttttgtgtgtgtgcgctgagtttgggatctggggttcttatgagcacaagatagggggcatggtaggccaaaaggcaacatttggttgggaaaacagggaagtgaagttctcacttagggccacaaattcaggcttgagggtggagcccttgccagggactccgccctcttttacycaatatttccctgcttcctgttcatatcaatatcaagttaaaaagcttctgcatagcaaaggaaccaatcaagaaattgaagagacgatccacagaataggagaaaatatttgcaaactacccttctgaaaagggattaataaccagaatatataaggagctcaaacagcactataggaaaaaattgaataatccagtcaaaaatgggttaaagatctgagtagacatttcttaaaataagacacaaaatggcaaacaggcatatgaaaaaggtactcaacatcgctgatcatcagaggaatacaaatcaaaactacaatgagatatcctgtcaccccagttaaaatggtttttatccaaaagacaggcaataacaaatgctgatgaggat

SEQ ID NO: 939573 - DNA, 476 bp, Homo sapiens
tggtatgtattttttttagacacgtactgttgcacacttaacagactacagtataatgtaaacataatgtatatgcactggaagaccaaaaaaatagtgtgacttgctttattttgatatttgttttattatgtggtctcaaattgaacctgcactttttccaaggtatgcctgtattctgtttcttagaggawctccacatatttgtataagattggctccaccttattctcactgtgtgtgactatgctggtcataaatgtgttcatacccactatgtgtctataagacaaaacctattctgacttgtcttttcccatgctttttcatctttctactctaggctaagagtagaggtagatcttggagaagagggacctgacaaaattttaatgtagttgtctttttctttgacaaaggaaggaaagcccatctcaagaggtcctttctttttctgtgttttgctttctccatca

SEQ ID NO: 939574 - DNA, 575 bp, Homo sapiens
tgtattataattttctatctgccaatcctgactttggtctcctttaggtctaggatatgtttattgtctatgtatctccaatacttgacacataacaggtactcagtaagtatttactgtatagtaaataatgtgattcttacctttctcttctggttttttccaatttgtyttttaaaatcataatttctttgttgagagcaagttgctgaccttctgaatcatgcagttctttcttaagattttttatttcatttgcatgtattccttctcttttagataattcttcttcataaaagatacttttcttttccaaatcagtctttagtttggttatctcttgctgatgttctatgctgcatactcctggtgagtaactaatttgtttttgctatagaaataataacaaaagattagtgcatctacaagaataataaaatatttaaataacttctttctgtaatataaatgagtattcatataactgcattttttgtacatcctaacaaaaataaaattctatgttaaatctactaactttttgcctgccatatattgcaaatattttcctcagt

SEQ ID NO: 939575 - DNA, 489 bp, Homo sapiens
atcttctcagtgttggaatctatttttttaaattcagtttgagatcttcccggcacttggaatgagtagtgatttttttaatggaaacctagatattttcatattacatgatgacactttagatcttatttaagctttctgttttaggtagctttctctgacactggtatggcatgggaaacaggaacatcactttgttacttccaggtagaggtagaagtccaagttccccactcagagtctgttaacacctgaggggtggggacggggcttcttatttcttctaggtaggagtgggtgttttgtctcctatgtggtatttacagagactgytgtgagagtggccctattaacaacaggagatgggaaaatatttaggtctcttctaggccccctgtgataccacctgagtggggaggtagccatgtgccttgttactaacagatgagggttaaagtccaggcactgaaggtggtctccactgtcacc

SEQ ID NO: 939576 - DNA, 617 bp, Homo sapiens
aactttttaaaccgaagagcttctgtaccacaaagtaaactacagggtaaagacacagcttgatgaacggcagaaaatatttgctaactattcatctgacaaaggactattattcagaatatataagaaactcaacaataaaaacaatcacattgaaaagtggacaaaggacatgaatagatctttctcaaaagaagacttccaaatggccaagagttatatgaaaaatgctcaaatcastaatcattatggaaatccagatcaaaaactcaatgagatatcaccttaccccacttagaatggctatgattaaaaagccaaaaaatagcagatgctgatgagaatgtggagaaaagagatctcttacacattgttggtggtaatataaattagtacaaccactatggaaaacagtatgtatgctcctccaaaaaataaaaatagaactaccatatgatccaggaatctactattgggtatttatctaaaggaaaagaagtcactgtattaaagggatacctgcaccccatgtttattgcagcagtattcacaatagaaaagatacagaatcaacctgtgtccctcagtggaggaacagataaagaaaatgtggtata

SEQ ID NO: 939577 - DNA, 807 bp, Homo sapiens
ctagctcaaatacctgagggaactaaatggttcagagtcatggatctaaaggatgccttcttctgcataccattacaccccaactctcagtatttatttgcatttgaggatccctctaaccaaatcacccagttaacctggacagtgttacctcagggattctgagatggcccccacttgtttggacagacactgtcaagggacctctctgagttcctttatcctcaggttaaacttttataatatgtagatgacattctcctctgtgctctgaggaaatctctcaggagggcagtaaggctctttttaatttttggctaacagaggatataaggtttaaaaaaatctaaagctcagttctgccagcttcagtgaagtacctaggcctggtcttgtcagagggaaccaaagcattcagtgaaaaaaggattaaggccatctcttcctttcccctcrccacaaccttcaagcaactaaggggattcttaggcattacagcattttgcagactatggatacctgggtatggtgaaatagctcagcccttataccacctaataaaggagactcagacagctaaaactcactgtctaatttgggaaccagaggctagaaaggcctttgaccaactaaaacaagccttgcttaagggagcccttggtctccccatagggaagatgttcaatctttagtgttagaaagaaaaggaatggcactgggagttctaacacgggcccacagtccagcccagcagcctgtaggctacctaagtaaggagcttgatttggtagctaaaagatggccagc

SEQ ID NO: 939578 - DNA, 666 bp, Homo sapiens
gaggaacaggtggggaaattaggcaggtggtgatcccaggggacagagttccaggaagaggggaaagcagtgccgaggcctctaggcaggaacacccatgggtgtgttcaagggggagcgaggagccagggtggcacagccttcatgatggaaggaactccccatggagaggaaggagaggaataggacagccatgggagagccactgcactcactcaggtgggcagtgatggcggctccaccagggcgtcaccaaggagggaaggaggtgtgtctggacatgcactaggagggtaattggacggactggatgtgatgtgtaagataagggagaattcaggggctcttcaaggttttcggcctaagcaacagaaaggacggcattgccctcacctgaggtggggtggctgcaggtgaggacggattggaaagggagatcaagagctcagtttggacattttgaattatccatgtctactgagaggagaggttcggtggacagaccctatrtgagttttggggtcggggagtggtctgaacctgaggtatgaatttcggagtcagaggtgtgaggatggtgtttaaagccatgtggacagagaagaggagtaaatccgggaatgagtctgtggttccttcgatattcagaagctgggaacagaggga

SEQ ID NO: 939579 - DNA, 715 bp, Homo sapiens
tgcccgccaccatgcccagctaatttttatacttttagtaggcacaatgtttcaccatatattggccaggctggtctcaaactcctgaactcaggccatccacctgcctcccaaagtgctgggattacaggcgggagccaccgcacccagcccaagtgcattatatttgttgtgcactttatttctattattattacactgtaatatataatgaaataatgatacagctcaccatcatgtagaatcagtgggagccctgagcttgttttcctgcaatgagatggtctcatctgaaggtgatgagagacagtgacagatcatcaggcattagattctcatgaggagcacgtaacctaaatccctcgcatgcacagttcacaagaggatgtgagctcctgtgagaatctgatgttgccgctgatctgacaggaggtggagctcaaggggtaacttgaaccatggggagcggctgtcaatacagatgaagctttgctcacctgctgctcaccccctgctctggggcccagttcctcacaagctatggamcggtactagtcatgctcccaggactgggaacccctggtttaaatcataagggaaatctcagtttaaatctttattttaaaaaaataacaaaaatgaattttctgcttatgatggccttatattaacagaaatgagtagtgctcacattttggaagtaagccttctaagt

SEQ ID NO: 939580 - DNA, 623 bp, Homo sapiens
actggagcacccagatatatacagcaaatattattataactaaagacagagatagaccccaataatagttggagacttcaacaccccactttagcattggacacatctcccagatagaaaatcaacaaagaaacatcagacttaatctgcactataggaaaaattgacttatatacttacagagcttttcctacattggcttcagaatacacattcttctcctcagcacatggatcattctcaagggtagatcatatattaggtgacaaaasaagtcttaaaacatttttaacaactgaaataatatcaaactccttttctgaccacaatggaataaaactagaaaataataagaggaggaattttggaaactatacaaatacatggaaattaagtaatatgctcgaatgaccagtgggtcaatgaagaaatttagaaggaaattgaaaaatttcttgagacaaataataatgaaaacacaacataccaaaacctgtgggatatagtgaaaacagcactaaaagggaaatttatagctgtaagtgcctacatcattaaagaagaaaagcttcaaataaataacctaatgatgcatcttaaagaactacaaaagcggccgggcg

SEQ ID NO: 939581 - DNA, 738 bp, Homo sapiens
tattttttgtagagaaggggtttcaccatgttggccaggctggtctcgaactcctgacctcaggtgatccacccaccttggtctcccaaagtgctgggattacaagcgtgagccaccacacccagcctctgccataatttgaatgggtctcctccaagattcaggtgttgccaatgtggcagtatcaggaagtggggccattaagaggtgacgaggccacgagggctcctcccttgtgaagggaggtgcccttctgtaaaggggcttgacagaggaggatcacgcccttttgccctcctgccttctaccgtgtgaggatgcagcaagaaggccctcaccaagccaggcgtggtagctcacacctatagttccagcactttgggaggccgaggcaggaggatcacttgagcccaggaggtggaggccrcagtgagctgtgactgcaccgtggcactccagcctgggtaacagagagagaccttatctcaaaaaaagaaaaaaaatcttaaaaattagctgagcataaaggcagccaactaaatgcttgtagtcccagctactcagcaggctgaggcaggaagaacgcttgcgcccaggagtttgagatcagccggtccacattctacacaggtctctcgtgtagagactctatctctacacaaaacaaatattaaaaaaaaaaaaaaaagaaggccttcaccagatgccagcaccagaacttggacttctcagcctcca

SEQ ID NO: 939582 - DNA, 603 bp, Homo sapiens
ccaggctggtctcaaactcctgacctcaggtgatccacccgcttcagcctcccaaagtgctgggattacaggcatgagtcaccgtgcccggcctctgccaagttttttgaagaacaaatgaatcataaaatgctggtcatgtcacttctggcttaagacttctcccagcttgcaggagcagtttccaatgcatttgctgcaaacccttcaaatgaaatcttacactgaaaatctaaatgaacaaccaatgaaagtgcagcttccmtgagacctggggtggggctgggtgcagaacctgcatcatctcgtccgttccctccctctggttcaccttcctccaggtgccagtggggctctgaggattccagggagctcagtttgaaccactggcctaaagctcaggtccaaatgcttggttagagcgtataaggcacaccatggtgccgccagctggccagccctctcccctacctctctgccctgctctgtgtgtacctgcaccttccactcagaatggccagtggttctcccaccacaactgattcacagctttggcttgatcacaggctgttgcctcctcttcggtgctttccacttactttc

SEQ ID NO: 939583 - DNA, 603 bp, Homo sapiens
ccaggctggtctcaaactcctgacctcaggtgatccacccgcttcagcctcccaaagtgctgggattacaggcatgagtcaccgtgcccggcctctgccaagttttttgaagaacaaatgaatcataaaatgctggtcatgtcacttctggcttaagacttctcccagcttgcaggagcagtttccaatgcatttgctgcaaacccttcaaatgaaatcttacactgaaaatctaaatgaacaaccaatgaaagtgcagcttccctgagacctggggtggggctgggtgcagaacctgcatcatctcgtccgttccctccctctggttcaccttcctccaggtgccagtggggctctgaggattccagggagctcagtttgaaccactggcctaaagctcaggtccaaatgcttggttagagcrtataaggcacaccatggtgccgccagctggccagccctctcccctacctctctgccctgctctgtgtgtacctgcaccttccactcagaatggccagtggttctcccaccacaactgattcacagctttggcttgatcacaggctgttgcctcctcttcggtgctttccacttactttc

SEQ ID NO: 939584 - DNA, 738 bp, Homo sapiens
tattttttgtagagaaggggtttcaccatgttggccaggctggtctcgaactcctgacctcaggtgatccacccaccttggtctcccaaagtgctgggattacaagcgtgagccaccacacccagcctctgccatartttgaatgggtctcctccaagattcaggtgttgccaatgtggcagtatcaggaagtggggccattaagaggtgacgaggccacgagggctcctcccttgtgaagggaggtgcccttctgtaaaggggcttgacagaggaggatcacgcccttttgccctcctgccttctaccgtgtgaggatgcagcaagaaggccctcaccaagccaggcgtggtagctcacacctatagttccagcactttgggaggccgaggcaggaggatcacttgagcccaggaggtggaggccgcagtgagctgtgactgcaccgtggcactccagcctgggtaacagagagagaccttatctcaaaaaaagaaaaaaaatcttaaaaattagctgagcataaaggcagccaactaaatgcttgtagtcccagctactcagcaggctgaggcaggaagaacgcttgcgcccaggagtttgagatcagccggtccacattctacacaggtctctcgtgtagagactctatctctacacaaaacaaatattaaaaaaaaaaaaaaaagaaggccttcaccagatgccagcaccagaacttggacttctcagcctcca

SEQ ID NO: 939585 - DNA, 738 bp, Homo sapiens
tattttttgtagagaaggggtttcaccatgttggccaggctggtctcgaactcctgacctcaggtgatccacccaccttggtctcccaaagtgctgggattacaagcgtgagccaccacacccagcctctgccataatttgaatgggtctcctccaagattcaggtgttgccaatgtggcagtatcaggaagtggggccattaagaggtgacgaggccacgagggctcctcccttgtgaagggaggtgcccttctgtaaaggggcttgacagaggaggatcacgcccttttgccctcctgccttctaccgtgtgaggatgcagcaagaaggccctcaccaagccaggcgyggtagctcacacctatagttccagcactttgggaggccgaggcaggaggatcacttgagcccaggaggtggaggccgcagtgagctgtgactgcaccgtggcactccagcctgggtaacagagagagaccttatctcaaaaaaagaaaaaaaatcttaaaaattagctgagcataaaggcagccaactaaatgcttgtagtcccagctactcagcaggctgaggcaggaagaacgcttgcgcccaggagtttgagatcagccggtccacattctacacaggtctctcgtgtagagactctatctctacacaaaacaaatattaaaaaaaaaaaaaaaagaaggccttcaccagatgccagcaccagaacttggacttctcagcctcca

SEQ ID NO: 939586 - DNA, 582 bp, Homo sapiens
aagtaggctgacagttcctcaaataagattgaattatataatccagcaattttactcctaggaatctacctgagacaaataaaaatatatgtccacacgactcatcatgaatgttcatagcagcagttttcatagtagccaaaagatgttgacaacccaaatgtccatcaactgatgaacagataagaaacagatagcatttccacacaatgaattayttaacaaaaagaaatgaagcattaatagatgctgtaacatttatgcactttgaaagcctatgctaaatgaaaaagtcaaaaaggaccaaaaattatatgatttctttcatgtgaaatttccagaaaagtcaaatctatagagacagtagatagataattgattgcctaaagttaggggatgaggagattggggcagcgggggggaagcggggtgaagatgaacaagaacagagcttctttatgggttagtaaaaatgttctaaaattgcttatggtgataaatgtacagttctgacaatagtaaaagccattgaattgtatagccattgaattgtacacttttaatgagtgaactgtatgctat

SEQ ID NO: 939587 - DNA, 582 bp, Homo sapiens
aagtaggctgacagttcctcaaataagattgaattatataatccagcaattttactcctaggaatctacctgagacaaataaaaatatatgtccacacgactcatcatgaatgttcatagcagcagttttcatagtagccaaaagatgttgacaacccaaatgtccatcaactgatgaacagataagaaacagatagcatttccacacaatgaattatttaacaaaaagaaatgaagcattaatagatgytgtaacatttatgcactttgaaagcctatgctaaatgaaaaagtcaaaaaggaccaaaaattatatgatttctttcatgtgaaatttccagaaaagtcaaatctatagagacagtagatagataattgattgcctaaagttaggggatgaggagattggggcagcgggggggaagcggggtgaagatgaacaagaacagagcttctttatgggttagtaaaaatgttctaaaattgcttatggtgataaatgtacagttctgacaatagtaaaagccattgaattgtatagccattgaattgtacacttttaatgagtgaactgtatgctat

SEQ ID NO: 939588 - DNA, 645 bp, Homo sapiens
cttggtaggggctaatgcaactgatgacttgaagtagaagccagtgctcatttaccatttcataaaccctagggtctttaagaattatactaaatctattctccctgtgctctagaaatggaacaacaaagcctggatgacaaaatgtacatttacagcatcatttactgattattttgactccactgttgagacctacttctcaaaaaaaaaaaaawttttttttcaaatgattgctgctcattgacagtgcacctggtcacccaagagctctgatggagaagcacaaggagattaatgttgttttcacgcctgctaacacaacgttcattctgtagctcatggatcagggagtcattttgattttcaagtcttattatttaagaaatacatttcacaaggcgatagctgccataaatagtgattcctatgatggatctggacaaagcaaattgaaaactttctgggaaggattcaccattctagatccccttaagaacatttgtgcttcaatgggcaaaataaaagatcaacattaacaggagtttggaagaactggctttgaggtgtcaagatgtcattgaaggaaatagctacagttggggtggaaatagcaagaaacctagaagtggaacctgaagatgt

SEQ ID NO: 939589 - DNA, 658 bp, Homo sapiens
aggaggactatgatataatactttgtaagaggagtatcctgttttcttagagggggtgcacctaattttaaacaataccataggaagggcctgtatccattttaatcctgtctcttgacatactttccctaaactatttttgacagtccgattcattcgctccacttttccagaactctgaggtcggtaggcagcatgtaactttcatgtgattcccaatacctttgctgtcttctgtactaagtcaaccacaaatgctggcccaatatctgagccaatccatagcggcagtccaaacctagggacragatctcaaagaagcacacgggttacttcacgagctttttcagttcgtgtcggataagcctctacccacccagagtaagtacacactagaaccagtaaatacttcttacctccgcatttgggcatctctgtgaagtccacttgaagatcttcaaaaggagctactccataggcttgtatgccgggagggacagaggggtcttgctttgcattgtgctgtcaataggtaacgcattgctgcgctactgttttagctagagctggcaagtgtgagatgtagaagtaccagcttaacagcttttcaagtgactcttgacctaaatgggtagtttcatatacagccagcactact

SEQ ID NO: 939590 - DNA, 658 bp, Homo sapiens
aggaggactatgatataatactttgtaagaggagtatcctgttttcttagagggggtgcacctaattttaaacaataccataggaagggcctgtatccattttaatcctgtctcttgacatactttccctaaactatttttgacagtccgattcattcgctccacttttccagaactctgaggtcggtaggcagcatgtaactttcatgtgattcccaatacctttgctgtcttctgtactaagtcaaccacaaatgctggcccaatatctgagccaatccatagcggcagtccaaacctagggacaagatctcaaagaagcacacgggttacttcacgagctttttcagttcgtgtcggataagcctctacccaccyagagtaagtacacactagaaccagtaaatacttcttacctccgcatttgggcatctctgtgaagtccacttgaagatcttcaaaaggagctactccataggcttgtatgccgggagggacagaggggtcttgctttgcattgtgctgtcaataggtaacgcattgctgcgctactgttttagctagagctggcaagtgtgagatgtagaagtaccagcttaacagcttttcaagtgactcttgacctaaatgggtagtttcatatacagccagcactact

SEQ ID NO: 939591 - DNA, 611 bp, Homo sapiens
aattcctttttctttatgcttagtttttctcctgtgacagtgttggtgcaagggtgggccttgctgattctgtgcttgccaaggctctgactgcaatggtggtttgtggagagagggtggtggtttgtatatttgctgtagcagtggaagggcagggtgcatgcatagaggtgcactgacaaaccaaggaaagcaaacatgcccacgtacacacttgtcatcaaagtgatgtgcggggttgctgttggcccacgggaagctgcattgtgaggaggtagcagaaagtctcttgtgtggccatgggggcagcactgttggagctctccattggtcagaaacgtttcaccagcacagaagccatgatgcaggyccctagggcactcaaggcttctttgaacaagtgtgactaggctggggccaactggagaggccaggaaattaaggggtgctcatgtcagaccagccccatgtggtggacaagaacaccctgcagagttaaggttcaatagttcctctagggctaacgtctcctatgggagcaagtcaagcctgggggaatggctgtctctgcctctgctccactacagatgctgctgcacgaaactctctgg

SEQ ID NO: 939592 - DNA, 623 bp, Homo sapiens
ctcactgcaagctccacctcccgggttcacaccactctcctgcctcagcctcccaagtagctgggactacaggcacctgccaccatgcccagctaattttttgtattttttagtagagacggggtttcactgtgttagccaggatggtctcgatctcctgacctcgtgatccgcctgcctcggcctcccaaagtgctgggattacagtcgtgagccactgcacccctggctggcacaatttagttttaataattcctaaaccaaatttcaatmatcagtggtgcaaaaatgattcctatgttcatatgtttaactccaaagggagaaacaaaaagttggggaaaatcttcaacaatagtaaccttctattcttcatgagagtaaaccacccacatgaaaacaggtgatttgattatttaaacatctgagttacatgtggtctaaatcagatgctttaaaaaaaattcttccccctcaaacccataaagcataatgacttcttaaaacacttgtcaagcttgttctttttaaaaaactcacaagtttgaaatatgtatctaaaatacaatttataaaatgcttaatctgccgattctggagcccacagtgcagggtgggatggg

SEQ ID NO: 939593 - DNA, 573 bp, Homo sapiens
cagcccatgcaggcatcaagctgcacatcaggaatcagagaaggagaattgggcaggcaaacggtctactaggtggacaggctgggcagcctggtcttccagggtacagggtagggagtggtgggactctctctgccagtcagacagcaggcctcccctgcagctctcagcacattgctccagagccaggcagcctgagcccagcaccatcgggtaattcttctagagctgctggggcaaagctaggcaggatgaactgaacttattttcaaaaggtatccaccctgacygagaagggtgtgtagaaagttgctacgagtcactgccaacttgtaatggcttgactagaccctgcctgcatttaacacccccagaggggtggccaaaagtcaaatatataataagcacctgatgactgccacagacatggatatgagtgatgctagtcaccagacgcagcccccttcccactgctcacccacccttccaagcctgccagagaccctcacccaaaatgaattagcaaaatgtgcaagcagatgttttcatctctggagactttaaaacaatgat

SEQ ID NO: 939594 - DNA, 787 bp, Homo sapiens
gtccttgtacatactagtcagttccactgtggtacatcatgtgcattcctagaagccaccacactatgcaggatcatgccttaaaaaccacagaggctatgggaagagtggggtgagaggcagagcactcaaatgcatgagcagtgacattaaaaaaatgaacctgacaatggagtacgggaaaaacagcagataggaggcaggactaacttgcagctcccacttggatggacggagcagcatgtggagacccacactgtgaacttttgctccaggaagtactgcaggaacataccaggaaagccaagagaatccacagaccctttgaaggaggtrgattgctgctccaggctctgggacagccaaggaaatgtgagtctgcttgctttctcagcaggaggcttgtagcctggggcaagttctcagccctgctcacactccaaccctggggcatggtggaagtgagactggccttttgggctgtgggctgcatgagagctgggtgagtcctgtggctgctggcttcctcccacttctttggcaacctgtgtgacgcagtagaggcagccataatccccctgggaacaaaactgcattggcctgggagccgtaccaccatcacccacagcatctgcagcaagccccacccaaggagagtctgagctcagacatgcctaaccctgcctccacctgatggtctttctctacccaccctggtagctgaagacaaaggacataatctcttgagagctccatggctccacccaccacctgatcctccctatac

SEQ ID NO: 939595 - DNA, 621 bp, Homo sapiens
tcgccatccttgagaacaccctggactgccaaaatggcacacctttgagatgcagttccatttgcctcttcacccttccaactcagaggtcacctttttttttttttttttttttttttgagacggagtctcgctctgtcgcccaggctggagtgcagtggcgggatctcggctcactgcaagctccgcctcccgggttcacgccattctcctgcctcagcctcccaagtagctgggactacaggcgcccgccactacacccggctaattttttgtatttttagtagagacggggtttcacygttttagccgggatggtctcgatctcctgacctcgtgatccgcccgcctcggcctcccaaagtgctgggattacaggcgtgagccaccgtgcccagccgaggtcaccttttatgctggttaagcctctagccctgccctatctctgcagaatttaggtttccctctgccatgcttctgtagtgctgagtctacatctccgtggccacacttgccatgctgtgtgcaagcttctgtgcgtctcactctttgcattcaccgtgcttatgccatcatctgccatggagtctaagcccaatattgctggattaatttattacc

SEQ ID NO: 939596 - DNA, 621 bp, Homo sapiens
tcgccatccttgagaacaccctggactgccaaaatggcacacctttgagatgcagttccatttgcctcttcacccttccaactcagaggtcacctttttttttttttttttttttttttgagacggagtctcgctctgtcgcccaggctggagtgcagtggcgggatctcggctcactgcaagctccgcctcccgggttcacgccattctcctgcctcagcctcccaagtagctgggactacaggcgcccgccactacacccggctaattttttgtatttttagtagagacggggtttcaccgttttagccgggatggtctcgatctcctgacctcrtgatccgcccgcctcggcctcccaaagtgctgggattacaggcgtgagccaccgtgcccagccgaggtcaccttttatgctggttaagcctctagccctgccctatctctgcagaatttaggtttccctctgccatgcttctgtagtgctgagtctacatctccgtggccacacttgccatgctgtgtgcaagcttctgtgcgtctcactctttgcattcaccgtgcttatgccatcatctgccatggagtctaagcccaatattgctggattaatttattacc

SEQ ID NO: 939597 - DNA, 621 bp, Homo sapiens
tcgccatccttgagaacaccctggactgccaaaatggcacacctttgagatgcagttccatttgcctcttcacccttccaactcagaggtcacctttttttttttttttttttttttttgagacggagtctcgctctgtcgcccaggctggagtgcagtggcgggatctcggctcactgcaagctccgcctcccgggttcacgccattctcctgcctcagcctcccaagtagctgggactacaggcgcccgccactacacccggctaattttttgtatttttagtagagacggggtttcaccgttttagccgggatggtctcgatctcctgacctcgtgatccgcccgcctcggcctcccaaagtgctgggattacaggcgtgagccaccgygcccagccgaggtcaccttttatgctggttaagcctctagccctgccctatctctgcagaatttaggtttccctctgccatgcttctgtagtgctgagtctacatctccgtggccacacttgccatgctgtgtgcaagcttctgtgcgtctcactctttgcattcaccgtgcttatgccatcatctgccatggagtctaagcccaatattgctggattaatttattacc

SEQ ID NO: 939598 - DNA, 617 bp, Homo sapiens
attctatttctctggaggattgaactgattatgttatagcattttgcttgatattacacttttgtttttctttcccttcagcatcccattttctcatattcccaccaatttttccagggaacacttcctgataaatcacttttgtacgaaacctcatcccaggatttgcttctggggaacccaagctgagataagcatacattaaaaatgtgaacacttgtaatcatcaggataatctacttagactttattgagtattttttttttgcaytctcaaggcacattttgacatggtttgtattccctatactaaaattttcctggagttgatatttggatatttttcattcacttgtttcaagtttaggtaacacatagaatcaaatatttaaaattgcatatgatttgtgccctgaagaactttccagattattgaaactagttctagtctttcagagatgcttcaagagaagctaaacaatttagccataattgtagaacttaatagcggtaaaagccagaattagaagctttttctcttttttctagccagtacccagtggtgtcttcctgttataaaatgaacacattttttcccctttatctgcctttggtgg

SEQ ID NO: 939599 - DNA, 576 bp, Homo sapiens
ttgagtagttataacaaagactgtatgtcctaaaatatttggtatctgactctttacagaaaaattttgccaacacttgttattattagggcttcgtaacatgtctatcacagattttgatccttactggaatctctctttccttaatcctgcatttttgtgtgttgacctgttctgacattagaacatatccttgctctactaattttagacaaataaagttgcctaaatcctttgctgtttttcattagtcacctaagtgatctcctggttcctaggcctcctctaccacacaactaaccccagtctgsctgggtgtctggtcttaagtcttagataaggtaatctgagagcgcttctcatggattgcccaaccacttcacttaagtgtgtaagtgaaaattgcactataaatcaaattattacagagcaaatcatagcctccctgaggaaactgctataatataaatgagctttgtttttctgaacaagaatctagcatggagggaagtaatgatccagtacaaaaacatagtaaatttgtgtgaacggttaaaagtatcaaaaacatatgtc

SEQ ID NO: 939600 - DNA, 546 bp, Homo sapiens
gcttatgcctgtgatcccagtgacccagggaggtgagcgctgtggggattgaggctcaaggatcacttgaggccaggagttcaaaactagcctgggcaacatagcaagaccctgtctccaacaaaattttaaaaattagttgggcatggtggtgtttgtctgtagacccagtttacttgggaggctgacacattagaatcactggagcccaggaattcaaggttgcagcgatctttgagctacaattgcaccactgcactccatcctgggtaacagagagagactctgtttcgaaaaaaaaaaacaaamaagagtatcagagcatattttaaaatcagagtatagtactttcgaagcagtgaaaagttgcaattttgataatgacaagtatcacctagtaattattggttctcaaaaaattttgaaatttatagctacagtgttttagtttcaaatgtttagtttcttcttgaaacagtgttgtctatttgcttttgtttttgttagattttattgttttttagaattttcaattcagtagggaat

SEQ ID NO: 939601 - DNA, 621 bp, Homo sapiens
gaccatcttctcatatatatagtgtgtatcctactggcaaacttggaggttcaaagactggaggctgtttcctaaggtttttttgtgtgtgttgttgttgtttttgtttgttcgtttgtttttccctatgagaatgtacatcacactaacaagggaaaagagtcctcagcagtaaatgatattaggtatcttcccttaaaaatggggggatgagacayagatttaatttaatttataaaaattaaacatcatcagccgggcgcggtggctcatacctgtaatcccagcactatgggaggctgaggtgagcagatcacctgaggtgttcaagagtttgagaccagcctgaccaacgtggcaaaaccccatctctactaaaaatacaaaaataaccaggagtggtggcacatgcctataatcctagctacttgggaggctgaggcaggagaatcgtttgaacctcggaggcgggggttgtggtgagctgagattgcgccattgcactccagcctgggcaacaaaagtgaaactctgtctcaaaaaaaaaaaaaaaattaaatatcgtgttatttgcatctcagatttgtgaatcaaatttatttttacacagattactccatg

SEQ ID NO: 939602 - DNA, 588 bp, Homo sapiens
atggaccatcttctcatatatatagtgtgtatcctactggcaaacttggaggttcaaagactggaggctgtttcctaaggtttttttgtgtgtgttgttgttgtttttgtttgttcgtttgtttttccctatgagaatgtacatcacactaacaagggaaaagagtcctcagcagtaaatgatattaggtatcttcccttaaaaatggggggatgagacacagatttaatttaatttataaaaattaaacatcatcagccgggcgcggtggctcatacctgtaatcccagcactatgggaggctgaggtgagcagatcacctgaggtgttcargagtttgagaccagcctgaccaacgtggcaaaaccccatctctactaaaaatacaaaaataaccaggagtggtggcacatgcctataatcctagctacttgggaggctgaggcaggagaatcgtttgaacctcggaggcgggggttgtggtgagctgagattgcgccattgcactccagcctgggcaacaaaagtgaaactctgtctcaaaaaaaaaaaaaaaattaaatatcgtgttatttgcatctcagattt

SEQ ID NO: 939603 - DNA, 602 bp, Homo sapiens
ccgcagctggcctagtttctaatataaaaatatatataaaagtaggccaggcacagtggctcatgcctgcaatcctagcactttgtgaggccgaggtgggtggatcacttgaggtcaggagttcaagatcagcctggccaacatggtgaaaccctatctgtatagaaacacaaaaattagccgggtggtaatggggcatccctgtagtcccagctactggggaggctgagaccagagaatcacttgagcctgggaggtggaggttgcagtgagcccagattgggccactgcactccagtcagggcgaaagagtgagacctgtctcaaaaaaaaaaaaaaaaaaaawatatatatatatatatatatatatatacacacatgtgtatatatatatgtctatacatatatatgtatctatatatgtctatacatatatatgtatctatatatgtctatacatatatatgtatctatatatgtctatacatatatatgtagtatatacatcagaattttattttctgttaatattctattaattttcttttgagaagtagtataacatagtggctaaaaatatagatcctggctacctagatctg

SEQ ID NO: 939604 - DNA, 602 bp, Homo sapiens
ccgcagctggcctagtttctaatataaaaatatatataaaagtaggccaggcacagtggctcatgcctgcaatcctagcactttgtgaggccgaggtgggtggatcacttgaggtcaggagttcaagatcagcctggccaacatggtgaaaccctatctgtatagaaacacaaaaattagccgggtggtaatggggcatccctgtagtcccagctactggggaggctgagaccagagaatcacttgagcctgggaggtggaggttgcagtgagcccagattgggccactgcactccagtcagggcgaaagagtgagacctgtctcaaaaaaaaaaaaaaaaaaaatatatatatatatatatatatatatatacacacatgtgtatmtatatatgtctatacatatatatgtatctatatatgtctatacatatatatgtatctatatatgtctatacatatatatgtatctatatatgtctatacatatatatgtagtatatacatcagaattttattttctgttaatattctattaattttcttttgagaagtagtataacatagtggctaaaaatatagatcctggctacctagatctg

SEQ ID NO: 939605 - DNA, 647 bp, Homo sapiens
tcaataatacaacattaggggaaagctggggaaatttgaataaggtctgcaatttagttacaagcattgtacgaatgttaatttcctggtttcatgtcctggttaatttcctgtcaatgttaatttcctgattatgtaagatgttaacaggggtagcagggtgaagggtataaaggaactcyatttaatttttgcaacttttctttaagtctaaaattatttcaaaataaaaggtccaaaaattcttttaaaaaggatgctcagctttcaggtggcccagtggcctagggcggcgggctacatcagtcagacacagagatgtggaaccctgcccttgtagctcctctccacgcaggatctgcaggcttcctcttctgcactgtgttcattgaatgtttgcctcccagactgacggggagctcaaagggacccaaattctcaaagagaagttttctggagctacagctatccaagtcactgacatttcaggaggctgtaggtgatgtataaaatccaaatcaaaccagaagaatttaaagaaacaagaactgtccctcagcaccagatgattaatcaggcactaaaaaaggaaaatcaaagggatgcacagatggtgggtatttacctctgtccccagacactgacct

SEQ ID NO: 939606 - DNA, 591 bp, Homo sapiens
gtgttgttttttaaagaggttaaaaaagagtacttactttaaatgctaactttctccatcccctctatggctaagctgtaacctctatactgtatatttctatatccatattgcagatcctgaaaatctactcaggccccaaatacatgttcataattatatttcttatgcctatccaaaaaactgrttttccttttaaaatttgcaagccatccaagaatcctccttctctgtaaccccgagtacatctgatggccaagtgcagttgatcagcttcctaaatatccctccactttgtctcttcctctccttcccatcactgcctttgtttaggcaccataatttctgcttgagttgcatcatcacctaggtgacaacaacacctaaattagtgtttaaataactgaggactgtagctttgccctactgatgcataaaactgaccatcacataggcctagcctctactccagtgcccccatctgctcaatctatgtttgtgaaatgaaatggctcatttctaaccccagtaccatcatgttccagacaagtcttggtgtctgaccatggggaagcaagtagttatcgtgca

SEQ ID NO: 939607 - DNA, 644 bp, Homo sapiens
atgttttaatataggcctgcaatgtgaaataatcacatcatggagaatggggtatccatcccctcaagcatttatcctttgagctataaacaatccaattacactctttatttatgtatttgtttatttattcatcttgttttttttttttttgagacaagatactgctccgtcacccaggctagagtgcagtagcgtgatcatggctcactgcagcttcaacccccctggctcaagcgatcctcctgcttctgtcccccaagtagctgggactatagttaagcactaatacatccggctaatttttttgaattttagtagagacaaggtctcattatgttgcccagactagtctcaaactcctgagctcaagtgatctcccacttcagcctcccaaagtgatgggattacaggcatgagctaccgtaccctgcccacttttaagttattttaaaatgtacaattaagttattattaactatagtcaccctattttgctatcaaayagtaggtcttattcattctttcaattcttttttggacctattaacaattcttacccacctcccgcaagttcccgccacccttcccagcctctggtaaccatccttctactctctatgtccatgagttcaattgttttg

SEQ ID NO: 939608 - DNA, 613 bp, Homo sapiens
catttatcaaatctaaaagcttttttggaggagccaaaaaaccccaaagggttttctagatagaagatcatatcatcagcaaacaggaataatttgacttcctcttttccaatttggatgccttttatttttttctcttgtctgattggcctggtgaagacttccagtactaagttgaataagagtactgaaagtgggcatccttgtatygttccagttagaggaaatgcttttaatttttctccactaagtgtgatgttggctgtgggtttgtcatatatgaccttattatgttaaggtatgtttcttctatgcctagtttattgaggatttttatcatgaagggatgctgaattttattgaatgctttgtctgtattgaaatgatcatataggtttttgtccttaattctgtttatgtgatgtatcacatttattgatttgcatacattgaaacatccttgcattcctgggataaatcctacctgatcatggtgtattatctttttgatatgctgttgaatttgatttgctaatattttgttaaggatttttgcatcaatgttcatcagggatactggtctatagttttcactttttgtcatgtccttgtc

SEQ ID NO: 939609 - DNA, 623 bp, Homo sapiens
tcccaggagaaccctaatcctcaggtcatgatgactgtgagccacagaggcagggtcgacgctctgccctcttgagaggactctgcattccagaactgagctcaggtctcccaagcccaagccctagctcaaaatggacagtagcgatttttatttttgggattagtgtagtattcctcccacttagctagccagaaaattcttccaaaataaacacacagtgtcctgatgatayatttttgacttgtttccactcataattgaaaccaacaacactgaaaatacgtcataaataaagagaccatgtaaaaagaactgaggccaggcgcggtggctcacacctgtaatcccagcactttgggaagccaaggtgggtggatcacgaggtcaggagatcaagaccatcctggctaacacggttaaaccccatctctactaaaaatacaaaaaattagccaggcgtggtggcacgcacttgtagtcccagctacttgggaggctgaggcagaagaatcgcttgaacctgggaggtggaggttgcagtcagccgagatcacaccactgcactccagcctgggcgacagagtaagactttgtctcaaaaaaagaagaagaagaagaag

SEQ ID NO: 939610 - DNA, 623 bp, Homo sapiens
tcccaggagaaccctaatcctcaggtcatgatgactgtgagccacagaggcagggtcgacgctctgccctcttgagaggactctgcattccagaactgagctcaggtctcccaagcccaagccctagctcaaaatggacagtagcgatttttatttttgggattagtgtagtattcctcccacttagctagccagaaaattcttccaaaataaacacacagtgtcctgatgatatatttttgacttgtttccactcataattgaaaccaacaacactgaaaatacgtcataaataaagagaccatgtaaaaagaactgaggccaggcgcggtggctcacacctgtaatcccagcactttgggaagccaaggtgggtggatcacgaggtcaggagatcaagaccatcctggctaacacggttaaaccccatctctactaaaaatacaaaaaattagccaggcrtggtggcacgcacttgtagtcccagctacttgggaggctgaggcagaagaatcgcttgaacctgggaggtggaggttgcagtcagccgagatcacaccactgcactccagcctgggcgacagagtaagactttgtctcaaaaaaagaagaagaagaagaag

SEQ ID NO: 939611 - DNA, 623 bp, Homo sapiens
tcccaggagaaccctaatcctcaggtcatgatgactgtgagccacagaggcagggtcgacgctctgccctcttgagaggactctgcattccagaactgagctcaggtctcccaagcccaagccctagctcaaaatggacagtagcgatttttatttttgggattagtgtagtattcctcccacttagctagccagaaaattcttccaaaataaacacacagtgtcctgatgatatatttttgacttgtttccactcataattgaaaccaacaacactgaaaatacgtcataaataaagagaccatgtaaaaagaactgaggccaggcgcggtggctcacacctgtaatcccagcactttgggaagccaaggtgggtggatcacgaggtcaggagatcaagaccatcctggctaacacggttaaaccccatctctactaaaaatacaaaaaattagccaggcgtggtggcacgcacytgtagtcccagctacttgggaggctgaggcagaagaatcgcttgaacctgggaggtggaggttgcagtcagccgagatcacaccactgcactccagcctgggcgacagagtaagactttgtctcaaaaaaagaagaagaagaagaag

SEQ ID NO: 939612 - DNA, 612 bp, Homo sapiens
cacttggatatgaggatcacaaagcacttggcagaggccccgccacttggaaagcactcagcaagcagaagctactcatggtccctcattgcactgagagtctggagctgaccttgtggacctgagccatggccaggctgtgtgacagaacacactyctctcccaaggctcgttctgtgagaagagggaaactgtaacgcaacatggtattggtggaagatgaagggaagtttcagctaaagagaaactgccccaggagctagaaggggctggttgagaaggcagaacaggctacagtgcagacacgtgacagcagaattgaaccctaggctcctgatcccggtagtttacatggaggaccgtggagccgactcctctgcctgcagaagcccctcactactgctaaggacaagagttacgtggatgtgtgagctgtgctcctcttgagggcacagggtgctgctccaatctgggcatctgcatcctgcaggctgtagcctgcccagagcatggacagacctccgaggaagtgggcagaccccagccctgggcggcactttggaaagctgtggccgtgctggggcaataggcatgccatgtgcacaaactcaa

SEQ ID NO: 939613 - DNA, 592 bp, Homo sapiens
aaaatatattaacacaggaaaagaaaagcaaatactgcatggtcttgcacaagtgggaggtaaacattgaatacacacagacataaatatgggaacaatagatacagcaggctactggataggagggagggaaggaatgtaggcttaacaaccacctatygggtattatgtttgttgcagaaagtcagggaccccgaatggagggactggctggagtcacagcagaggaatataaattgagaatatttcattttaatatggacatatatcagttcccaaataatactcttataatttcttatgcctgtctttatttcaatctctgaacacaaattgtgaagatttcactttaatatggacatttatcacttcccaaaattaatacttttataatttcttatgcctgtctttactttaatctcttaatcctgttatctttgtaagctgagaatgtatgtcacctcaggaccaatattgtgttaactgtacaaattgattgtaaaacatgtgtgtttgaacaatatgaaatcagtgcaccttgaaaaagaacaggataacagcgattttcaggaaacaagggaatacaaccata

SEQ ID NO: 939614 - DNA, 570 bp, Homo sapiens
aaattaatacttttataatttcttatgcctgtctttactttaatctcttaatcctgttatctttgtaagctgagaatgtatgtcacctcaggaccaatattgtgttaactgtacaaattgattgtaaaacatgtgtgtttgaacaatatgaaatcagtgcaccttgaaaaagaacaggataacagcgattttcaggaaacaagggaatacaaccataaggtctgactgcctgcggggtygggcagaatagagccatatttttcttcttgcagagagcctataaacggacgtgcaagtagggaagatatcgttaaattcttttcctagcaaggaatattaatattaagaccctgggaaaggaattgccttcctggggggaggtctataaacggccgctctgagagtgtctgtcttatgcggttgagataaaggctgaaatacgccctggtctcctgcagtaccctcaggcttactgggatttggaaaccctgccctggtaaatttgaggtcagaccagttctctgctctcaaagtctgttttctgttgtttaagatgttgatcaagacaat

SEQ ID NO: 939615 - DNA, 570 bp, Homo sapiens
aaattaatacttttataatttcttatgcctgtctttactttaatctcttaatcctgttatctttgtaagctgagaatgtatgtcacctcaggaccaatattgtgttaactgtacaaattgattgtaaaacatgtgtgtttgaacaatatgaaatcagtgcaccttgaaaaagaacaggataacagcgattttcaggaaacaagggaatacaaccataaggtctgactgcctgcggggttgggcagaatagagccatatttttcttcttgcagagagcctataaacggacgtgcaagtagggaagatatcgttaaattcttttcctagcaaggaatattaatattaagaccctgggaaaggrattgccttcctggggggaggtctataaacggccgctctgagagtgtctgtcttatgcggttgagataaaggctgaaatacgccctggtctcctgcagtaccctcaggcttactgggatttggaaaccctgccctggtaaatttgaggtcagaccagttctctgctctcaaagtctgttttctgttgtttaagatgttgatcaagacaat

SEQ ID NO: 939616 - DNA, 776 bp, Homo sapiens
acatttctttttttctttgtcccaagtgacacaataacttgacatgtggctagcaaaaccaattacatacataaaactatgaaatatggcatgctccgttactatattgtggtcatttttaaaagaaagaaggggaaacagggaggaagatacagaggggagaagaaagaaacaggaacagcttcagtcacatagtgacagaggttcagaaattttgaagaacatttaatttaggtcatcttgtcaccttttagatttgcaataagcagtcggttattgctttttaagcaatcttaacactggtaatatgtcaatatgacccaaagcaatccacaaattcaatacaattcttattaaaatcccaatgcctttttttgcagaaaacaaaaatccatcctaaaattcatagggaacctcaagggaccctgaacyagccaaaacaatcttgaaaaagaacagttggaggtctcacactttcagaattcttggaatctgctgccgcccactataatattgggggcctagcatgcctgcctctcaggattgttaggggaacagggagcagggtacactatggaaactgaccagcacctgacacagagtgtcaccaagaggtagtgtgaccttctggaggcctggcctgaataccatgacccacctctgccttgagcagggttggatctcagcctctggccgctgtctcccactgctgagtacacagctaaggacctggtaaagagtgaagattttaaaggacactgaccttccaggccgtg

SEQ ID NO: 939617 - DNA, 632 bp, Homo sapiens
tcctgtcttcctacttagatgccctttatttctttgtcttgcctgactgccctgactaggacctccagtactatgtcaaataggagtggtgagagaaggcatcctttttttgtgccagttttcaagtggaatgcttccagattttgcccatttaggattatgttggctgtgggtttgtcgtatatggctcttattattttgaggcatgttctttcaaaacctagtttattgagactttttagcatgaaaagatgttgaattttatcaaaagcctttcctgcagttattgagataatcgtgtggtttttgtcttcagttctgtttatgtgatgaatcatatgaaacatacgttgaactaaccttgcatcccaagaatacatgattatggtgggtaagtttttgatgtgctgctgaattctgtttgccagtgttttgttgaggatttttatatcaacgatcatcaaggrtattggcctgaagttttctttttttgtcatgtctctgccaggttctgctgtcaggatgatgctggccttatagaataaattagggaggagtccctccttttcaagtttttagattagtttcagtaggaatggcaccaactcttatttgtacatctggtaaaattc

SEQ ID NO: 939618 - DNA, 602 bp, Homo sapiens
atcaaatgttctgtaaatatctactaggtccatttggcctatggtgcagatgaaatttgatgtttgttaattttctgtctggatgatctgtccaatgctgaaagtggggtgttgaagtctccagttattattgtatgggggtctgtctatctctctctttggctctaataatatttgctttatatacctgagtrctccagtattgggtgaatatatatttagaattgttaaatgctcttgctaaatggacccctttatcactatataatgaccttctttctctcttttcatagtttttgtcttgcagtctattttgtctgatataaatgtagcttctgcttctttttgtttgtttccataggcatagaatatttttccatccctttaccttcagtctatatgtgtctttaaaggtgaagcatacttcttgtaggcaatgaatcattgggtctaagggttttttgttttgttttgttttgctttttttttttgaggcagagtcttattctgtcacctaggctggggtgcagtggctccatcaatcttagctcactgcaacctccacctcccaagttcaagcaattcttctgcctcagcctctc

SEQ ID NO: 939619 - DNA, 449 bp, Homo sapiens
atggtggcatgtgcctgattcgggaagctgaggtgggaggattgcctgagcccaggggaggtcgaggccacagtgagccatgatcatgccacttcactccagcctgggttacagggtgagactctgtctgggaaaaaaaaaaaaagtgcagagcccccatagagtcagaagtaccaggaagagtgtgctgtaaatatgcataaatttccactgaaacagaaaattcctccactattttatatatcccaatgtgcaaaacatgactgtagcaatggaatycatagaatgcttttgtacggaataatagatgacaaatctaacaatagaggtttgtagtttcctatagtactgggtacctgggactataggcttgcaccatcatgccctcctaagctttgtatttttatttatttatttatttatttatttatttatttgtgtagagacag

SEQ ID NO: 939620 - DNA, 623 bp, Homo sapiens
gaagcatcaaagcacctataaaggaaatcccattagactaacagttgacttctcagcagaaaccttaaaagccagaaaggactggggtcctattgtcagcctctttgaagaaaacaatgccagccaagaatttcatatcctgctaaactaagcttcatcaatgagggagaaatgaaatctttctcagataagcaaatgctaatggaatttattaccagtacactggctctccaagaaatgctcaaatgaattctaaacataaaaatgaagggaaaggatgtactcaggattataaaagcacacataagtacaaaggtcacaycctacaaagaaattacacaatcaagattacaaagcaactaggtaacaacattatgacaggaacaaaacctcacatatcaatattagccttgaacgtaaatggcctaaatgctccagttaataggtatagactggaaaattggatagaacaaaacacaacaagattcaaccatttgctgccgacaagagacccacctaacagataaatacacacacagactcaaaataaaggggtgaaaaagatataccagacaaacataagacaaaaacaagcaggagtagctatacttatatcacattga

SEQ ID NO: 939621 - DNA, 765 bp, Homo sapiens
accacctcacagtagatgggtgccctctaaatatctttaaacctctgtgccaggatgtgctcaatgcctggatgagggtgagtgagaaagttgtccctccctccctagacacttctcacttggagtgagaacggcagccaccatgtcccatcctgagctgccacaaggtgtctgtgctggatcacaagcatatccaaatttgagaccagggcccttccctggtgaagggtggcagcaatcactgggcagggcatgtgaaagaggatgggggaagacacaggggttggcacgtgggtaagggtgcttgagaacccattacacagaggcccttcccacagagacaggtctatgcttgggcaggtagttccaagatcctggcacatgctccattgttctactggatttcatttacaaaacacaaattcaaagatacagtaattaagaattccaaacccctgcattttgtgaccctgaggcaggtggatcacttgagcccaggagttagagagcagcatgggcaacagggtaaaacccagtctctccaaaaamaaacaaacaaacaaacaaaaaaacaattagctgggcacctgcctgtggtcccagctacatgaggggctgaggtcagaggatcacttgagcaagagagttcaaaggctgcagtgagccatgtttacacctctgcactctggcctgagtgatagattgagatcctgtgtcaaataaaataaaataagataaaataaaataaaataaatttaaaaattt

SEQ ID NO: 939622 - DNA, 622 bp, Homo sapiens
gtgaggcaatgcctcgccctgcttcatctggcgcacggtgcgcgcacccactgacctgcgcccactgtctggcactccctagtgagatgaacccgctacctcagatggaaatgcagaaatcaccgtcttctgcgtcgctcacgctgggagctgtagaccggagctgttcctattcggccatcttggctcctccrattagccctttttctaaacaatattcattaattcatgagcttgatgtcctagaagtatttttttttcttttactgaaatacatgaaaataaactaatcaacataagcattaaagtaaaagaatccatccatggaatcacctgacatcatcttgtactacagcctctcagagtttgtaggttctttaacggttttatgtgattgaaataattttctgatatgtgaatccctcagaccaagaaccttggcaaatggctgccagctttctctacttaggaggaggagagggagaggagagatttgattcaggtaagggacacatacttgctctctgagaaggctttttgattttgaagacctctttctataagttcttcttgacactcccttagccaaacaccaactcaaactatctaagtcccaattcca

SEQ ID NO: 939623 - DNA, 600 bp, Homo sapiens
ggagctcccgccccaactcgaaagaggtggggctcccggttgtccccagctcccactggctccatggagtgtgcaggcctggccacgcctccctactgcagccagcatgatggtggtggccactccagatggcccgctgctgccatcattatgggtagttgataaaggagacargagtagagatttgaagagaatggaaaatatttaaaatagccactgtagaaaagtgggaaaatatgctatatggggctgtgttgagggcctgttcttagtaacatttaatctaatagaatatatatattttgaaaaagcattcctggtgctcctgatagatcccctgcttctccatcatgacctgctgctcctctaatttcttctaaaacccaccaaacaaaataaacactgtttgatttaaaatttttaataaggtaactcattccattcttggttccagttagaccactgagtgacttttgtgacaaaaacggagattctcacaaaatacctgttccaaaaatgtttgctagagacttcccagaacaaatcccttacatcagtgaggagacaggagtgcacgggcagtgcgattgacgtgtcctt

SEQ ID NO: 939624 - DNA, 587 bp, Homo sapiens
taaggtaggtgctaatgtcactatcacaatttttaaataagcaatttaagacttaaataagcccatatacttttccagactcacaagatgaatacaagatattggtggaattcgaattgaaacaatctaatatcagagaccatacatttctcagtgaatagggcaaaatagacctaaggaaatagtcaatttgaactatccagaggtaaatgtcatatgacctctgattagttccacaaagaaaacaaccacccaaatcagactgtatgcaggacactcacaagcagtgagacttttgctgagatgagctrgaaagaggattgagtaatatcaaattatcacagatttgagctagatcaaaggactcttcacccaagtctgaaccagtgtcaacactttttctgggaccatatttgatattcagtggccctaaatgatttcctaaacatgggcggggttaatcttgccattgaagaaattctgtatagagatcctagtaaacactgtggaaatagacaaagacaatctgaattagaacaggtagaggttattcatccagagcttgcgaggaagtcaggtaccatcac

SEQ ID NO: 939625 - DNA, 587 bp, Homo sapiens
taaggtaggtgctaatgtcactatcacaatttttaaataagcaatttaagacttaaataagcccatatacttttccagactcacaagatgaatacaagatattggtggaattcgaattgaaacaatctaatatcagagaccatacatttctcagtgaatagggcaaaatagacctaaggaaatagtcaatttgaactatccagaggtaaatgtcatatgacctctgattagttccacaaagaaaacaaccacccaaatcagactgtatgcaggacactcacaagcagtgagacttttgctgagatgagctggaaagaggattgagtaatatcaaattatcayagatttgagctagatcaaaggactcttcacccaagtctgaaccagtgtcaacactttttctgggaccatatttgatattcagtggccctaaatgatttcctaaacatgggcggggttaatcttgccattgaagaaattctgtatagagatcctagtaaacactgtggaaatagacaaagacaatctgaattagaacaggtagaggttattcatccagagcttgcgaggaagtcaggtaccatcac

SEQ ID NO: 939626 - DNA, 700 bp, Homo sapiens
gcttggaggcccatgcctgcaatcctagcactttggcaggaggattgcttgagcccaggatttcaagaccagcctagggaacttggcaagaccccatctctacaaaacatttttaaaaattagccaggtgtggtggctgtagtcccagctactcaagaggctgaggtgggaggatcamttaagcccaggtgatttgagtctgccgtgagctgtatttacaccactgcactccagcctgggtgccagagcaagaccgtgtctcaaaagaggccgagcatggtggctcacgcctgtaatcccagcactttgggaggccgaggtgggcagatcacgaggtcaggagatcgagaccatcctggctaacatggtgaaatcccgtctctactaaaagtacaaaaaaaattagctgggcatggtggcaggctcctgtagtcccagctacttgggaggctgaggaaggaaaatggcgtgaacccgggaggcaaagcttgcagtaaaccgagatcacgccactgcactccagcctgggtgacagagcgacactctgtctcaaaaataaataaataaaaacaaaagaaagtttttttaaaaacaaaaataagaaatattaatttatttctgtccctcagtatttgcattttaacaatgggtttttcaaaaaagcaaaatcatccatgtaagaactactcgttactctgag

SEQ ID NO: 939627 - DNA, 534 bp, Homo sapiens
gacatgttcagaaaagtcctgagaagaccccaggctttcacctctggctgactttcaagttccatgcaagcaggaagtgaagaccaaagcagagttgtaaatggctttgctatgcgttgaaggcatgtcccaacacagagccaatctgaaaacactaggggaataatttttctttttctttcttcagcttctatttttggctctagttgtttaaggaaatcattgtcataacactagctgaccactaagctaatggaacaccgacttcagtgaccacacataacaaagaatacagactgtagaaaaatgttttagaaaagtcactaaacagacagataacaacaacccactacaagcarcaacaacaaaccatggggatgtggagaactgaatttcctgagttactgtattataatgtgcaaaatgtccacctttcaacacaaaattatgagacactcaaacaatgaagtatggactttaaaaagtgacagtaatcattcttgagaaagaccagatatatgacttattaggcaa

SEQ ID NO: 939628 - DNA, 807 bp, Homo sapiens
tttttcagttctagaatttctatttgggctttaaaaaaataatctcttttcttctgctgaaatttcccactttttattagctgtgagcatattttcctttttactactgagcatcattttaatatacagttttaaataattgttggccaacatctgggtcatcctagcttgttttctattaatctttctcctatgaattggtcatgttttcctgcttctttgaatgttgtataattttttttttgagatggagtctcgctgtgttgcccaggctggagtgcaataatgcaatctcagctcactgcaacctccgcctcccaggttcaaatgattctcccgcctcagcctcctgaatagctgggattacaggaacccaccatcatgcccagctaatttttgtatttttgtagagatgaggtttcactgtgttgggcaggttggtcttgaagtcctgacctcaggtgatctgcctgccttagccctctaaagtgctgggattacaggtgtgaggcactgcatccggcctgaatgttgcataattttggattgcatcctcaatattgtgaatgatgtgttgtaraaattccggaatctgaatgttcctctgaatagtactgattttaagcatatatttaacttttatagaatgaaactgtaacactgtatttccactgtgatgagtgtagctgaaattttacttcaattcctttaactttaactaatttgctttgagtctttccccaatagtcatgttcaaggatcactcagagatttgggaaaattttgtacctagaatatgagacccat

SEQ ID NO: 939629 - DNA, 753 bp, Homo sapiens
cataaaataaatgaaggagcttaaataggattagaactatctgttatttaagagttagagagagcactgttacgaaacatccggtcctggcaccttgttttaatggtagatcaaaattcacctgagaggagccaagatggccgaataggaacagctccggtctccagctcccagcgtgagcaacgcagaagacgggtgatttctgcatttccatctgaggtagcgggttcatctcactagggagtgccagacagtgggcgcaggtcagtgggtgcgcgcaccgtgcgccagcggaagcagggcgaggcattgcctcactcggaagcgcagaggatcagggagttccctttcctagtcagagaaaggggtgacagacggcacctggaagatcaggtcactcgcacccgaatactgacgggcttaaaaaacagcgcaccaggagattgtgtcccacacctggctcggagggtcctacgcccacggagyctcgctgattgctagcacagcagtctgagatcaaactgcaaggcggcaacgaggctgggggaggggcgcccgccattgcccaggcttgcttaggtaaacaaagcagccaggaagctcgaactgggtggagcccaccacagctcaaggaggcctgcctgcctctgtaggctccacctctgggggcagggcacagacaaacaaaaagacagcagtaacctctgcagacttaagtgtccctgtctgacagctttgaagagagcagtggtt

SEQ ID NO: 939630 - DNA, 662 bp, Homo sapiens
tggcccatatgtcaagtgacccgaaaggctgccagttttgagtggggtccagaacaggagaaggttccttaacaggtccaggctgctgtgcaagctgctctgccacttaggccatgtgacccagcagattcgatggtgcttgagttgtcagtggcagataaggatgttgcttggggactttggcaggcccgtataagtgagtcaccacggagggttctaggattttggagcatggccctgccttcttctgcaaataactactctccttttgagggacagcttttggcctgttactgggcttyagtggaaactgaacgtttgactatgagtcatcaagtcactgtgcaacctgaactgcctatcataaattgggtgctttatgacccatctagccataaagtgggtcatacatagcagcattccagcatcaaatggaagtgttatatacgagacccagtttgagcatgtcctgaaggcacaagtaagttacatgaggaagtggttcaaatgcccatggtctccattcctgccaccctgccttctctcccctagcctgtaccaatggcctcatgcggagtttcctatgatcagttgacaggcaaagagaagactagggcctggttcacagatggtcctgcacgatatgcaggcaccacctgaaa

SEQ ID NO: 939631 - DNA, 607 bp, Homo sapiens
aggggcttttccctctttgttcattcttttccttcctgctgccatatgaggaaggatgtgtttgcttcccccttcagtcataagtttcctgaggcctccccagccatgctgatgtgtgagtcaattaaacctcttttctttataaatcacccagtcttgggtatttcttcacagcagcatgagaacaaactaatacaactgtagcttaacatggaaaatgaaatgatatatgctgtactcacatttgtatgaacatattttataaatatgaatatacatacatgtatgaaaggagaaaactggaaggatataataaagatgttgacaatactaactttttgaggtggtgggattaatggtgattttcactttctttttataacattatgaattctgaattttttcaaaaayatacctgtattacttttataattagaaaaataatttctgaaatatttttcattgatacataatatttgtacgtatttatgtaacaatgtgatattttgttacatgcatagaatgtaatgatcaagttagagtatatagagtatccatcaccttgagtatatatcacttctatgtgttgggaacatttcaagtcttc

SEQ ID NO: 939632 - DNA, 735 bp, Homo sapiens
gccaaaagaacatcgatagttcccaggggaaataagtcgtgagggaaggaagggtcaacaggaaaccaggactcaggatcctgggcagagtcggctggtttcagcaccgtctgaggctcatcaggaagctcctctctcaccgaccgtggctctcagcactcagggagcgccactgagcatgcgtgagaacagccaccctcagctcgcgggggygtcagcttcctttgaaaaccccctcgggtctgtgtgcacaaggctctgaactaaccctagtgggtcaccacgcagggccccttctcagcgcctgctctccgctccacgtgagggaagcaagggcagcggagaacgcgtcccacgcagtcaagccagggatgggcctcgggcttcctttctctgtccacgatgcctctggaagcaggatacggccctcgaggcgggctcctgggattcctgggaacacgggagggtgagctatgagcaggccggggcagggcaatcatggagactggacttttgctcatatgggcagaagagtgatcaggaaattattctgaatgtgaaaagacatggccagcgtgtgaccggcagatgtgtatcctccagtgctctgggagaacgcagccccggctggtagcccgggcccgtttctgtgaggtcaacactcacaccacggccaatgtcaggcaaacaacccggtgtcaccgaagcagggttggtaagagaagcacagcctgc

SEQ ID NO: 939633 - DNA, 749 bp, Homo sapiens
aggaatcaggaaacttgtcttccttcctccttccccctttcttcccatggggtcagcaccctggaaggggtaggaaatccagaaggaagcacgtgtgtggcgggaatcgttcttgagagagctgcgggtgccacggggccagccacgctccttcccccgagacygcctgcccaggcccctgctcggccagaccggcacacaaaggagcagcggccggagacgtggtgccctggtggacaggggctgtaccgtggcctcaaggaacgtgcatgggcagagaacagtctcctgtggtgaaagacagacgccgccgtgggtttcccctggtgactacaaagcctccatcctacccacgttgcaaatgtcccactctgctccctcctgtgcctgactcactatccctgtctggagagcatctgtccgactcccaacgcgacacgccctccctcagtccctgactccctccctttccttagtcattctgtttgcaaaaataagacaaaacaaaaatctacagaggcgttcgaccagaccgctttggaaggtaaagtctcacaccgggaacgcaaagcaagttatttatctcccatgacgcctccgtctgcctgtcctgatgcgtgtgggcaataggaagcctccttccttagggaatagttctttcctgcccattgctggcagtgcaggctttgcttcatctccagccatggcctgaaagggcaccaatgacagggtgggcctttgaaaatatg

SEQ ID NO: 939634 - DNA, 749 bp, Homo sapiens
aggaatcaggaaacttgtcttccttcctccttccccctttcttcccatggggtcagcaccctggaaggggtaggaaatccagaaggaagcacgtgtgtggcgggaatcgttcttgagagagctgcgggtgccacggggccagccacgctccttcccccgagactgcctgcccaggcccctgctcggccagaccggcacacaaaggagcagcggccggagacgtggtgccctggtggacaggggctgtaccgtggcctcaaggaacgtgcatgggcagagaacagtctcctgtggtgaaagacagacgccgccgtgggtttcccctggtgactacaaagcctccatcctacccacgttgcaaatgtcccactctgctccctcctgtgcctgactcactatccctgtctggagagcatctgtccgactcccaacgcgacaygccctccctcagtccctgactccctccctttccttagtcattctgtttgcaaaaataagacaaaacaaaaatctacagaggcgttcgaccagaccgctttggaaggtaaagtctcacaccgggaacgcaaagcaagttatttatctcccatgacgcctccgtctgcctgtcctgatgcgtgtgggcaataggaagcctccttccttagggaatagttctttcctgcccattgctggcagtgcaggctttgcttcatctccagccatggcctgaaagggcaccaatgacagggtgggcctttgaaaatatg

SEQ ID NO: 939635 - DNA, 749 bp, Homo sapiens
aggaatcaggaaacttgtcttccttcctccttccccctttcttcccatggggtcagcaccctggaaggggtaggaaatccagaaggaagcacgtgtgtggcgggaatcgttcttgagagagctgcgggtgccacggggccagccacgctccttcccccgagactgcctgcccaggcccctgctcggccagaccggcacacaaaggagcagcggccggagacgtggtgccctggtggacaggggctgtaccgtggcctcaaggaacgtgcatgggcagagaacagtctcctgtggtgaaagacagacgccgccgtgggtttcccctggtgactacaaagcctccatcctacccacgttgcaaatgtcccactctgctccctcctgtgcctgactcactatccctgtctggagagcatctgtccgactcccaacgcgacacgccctccctcagtccctgactccctcccttyccttagtcattctgtttgcaaaaataagacaaaacaaaaatctacagaggcgttcgaccagaccgctttggaaggtaaagtctcacaccgggaacgcaaagcaagttatttatctcccatgacgcctccgtctgcctgtcctgatgcgtgtgggcaataggaagcctccttccttagggaatagttctttcctgcccattgctggcagtgcaggctttgcttcatctccagccatggcctgaaagggcaccaatgacagggtgggcctttgaaaatatg

SEQ ID NO: 939636 - DNA, 758 bp, Homo sapiens
acaacatacacacctatcatggcaaattcagtaaatttatatttccaaaccaggacgcttgtgtcacttagctgcttaaacctactttgtggtgatctgctccactatgggctgaatgctgtgtcctccccaaattcgtatgttgaaacctaatccccaaagcaatggtgttgggagatgaggcctttgggctgtggcgtggtcatgagggtggggccccgtgaatgggatcagcacatttactaaagggrccccagagagctgtctcgcccgttccaccatgtgaggctgcaatgagaagatgccgtctgtgaaccaggcagcagccctcaccagacagtgaagctgccggcaccttcgttatggacttccagccccaacaccgttgttgacaagccagccagtctatggcactttgctgtggcagcctgaacaggataaggcacactccataaagaaccggtattcaacatgcatttttgtacctgctcttatcatttttttatttacacttgaatatcttgctctgggcagaatgatctcggtctcattaaagcacaaaatttagattctcccaactttgctcaagtgatctccctggctgaaagtttcctttcccacccatacgctgtctgactccctgagtccctatgcttgaagtccaatctccattatgaaccccacagtcggtgccctctgcttctgaatgcttttgactcttgctatggtaaacattcaacttgacattttcatattga

SEQ ID NO: 939637 - DNA, 703 bp, Homo sapiens
tgagaatttttgctcatggctttataggacttacctaatttactccattttacactcatgtgaaatatggccatttaacagatgagtaagagaagattcagagaacttaagtgatatgcccaaggacagaagtccaggtctgcccaattctagaacttcccttgttcagtgtgttccttaagtgcagcaagtctctggatctaaactatatagtttctgatttcaactctgaaatgcactgcttgtgtgaacttgcatccgttcttcatctgtaaagagtggtagcacctatttcataggcttgttgtgaagctcttagaatagtgcctggcacataatggattcgatgaaagtatctgttttctttctttcttttttttttatttttttgagacggagtttcgctcttgttacccaggctggagtgcaatggcacgatctcggctcaccgcaacctctgcctcctgggttcaagcgattctcctgcctcrgcctcctgagtagctgggattataggcatgcaccaccatgcccggctaatttttttgtatttttagcagagacggggtttctccatgttggtcaggctggtctcaaactctcaatctcaggtaatctgcctgcctcagcctcccaaagtgctgagattacacgcatgagccaccatgcccggccaaaagtatctgttttcatttgctgttca

SEQ ID NO: 939638 - DNA, 547 bp, Homo sapiens
atccagcatctgtaaggaacacatttataagaaaaaaacaactccattaaaaagtgggcaaaggacatgaacaaacacttctcaaaagaagacatacatgcagacaacaatcaagtgaaaaaagctcaacattactgttcattagagaaatgcaaattaaaaccacaatgaaatatcatctcacgccagtcayaatggctgttaataaaacgtccaaaaataatagatgctggcgaggttgtagagagaaaggaacacttttacactgttggtgggagtgtaaattagttcagccattgtggaagacagtgtggtgattccccaaagacctaaaggcagaaataccattcaacccaacaatcccattaccgggtatgtacccagaggagtataaatcattctattataaagacacatgcacgtatatgttcattgcagcactattcacaatagaaaagacatggaatcaacctaaatgcccctatgatagattagataaagaaaatgttgtacacatacactatggaatactacgcagcaataaaaa

SEQ ID NO: 939639 - DNA, 775 bp, Homo sapiens
gctgcagacctaggcatccctgcagtttgggggcccaggaccccatggcccccactccccaaccccctgcaccccactcctttcccctcacccctgcaagctcagaagtgcctgctcctactgcctggcctctccctgctcctggcacccactccagaacaaagttgtggccaagcctaggtgctgctgtgacctggttaggtgtggatgtgctcagggtggcaccaacatgccagccccctgctgcctgggcctcctccagactttgggggccaatgagcatgggagggaggctgaagaggatggtgctgagggttgcttagcatgggcctgtgggttcccctcagcacaaacagcccaggggccgtggatgacacgcagatggcagcaggaagcagataggcccctgggcagaaaggggcagtcccagtgaagcaccaccttgaagccagggagggcctgaagcctgggggccaacctrtcagttccaggtggtgtccacagcccagagtgagaacttatggtgctttttctgggcccacccatggccgcccatggaccaatcagcatacacttcctcccttatgagcccataaaaacccaggactcagccagactgggacagatgtcaggatgacctgcctacggataggagctacccactctgggtgtcctctctgctgagggctgcacacttgtcaggacaacctgcctgtgaatagaagctacccactccaggtttcctccctgctgagggctgcacacttgggattac

SEQ ID NO: 939640 - DNA, 742 bp, Homo sapiens
ctgaagaaacggaaaacacctctgttgggtggttactgattcaacacgataatgaatgttaagtattaggattatatctgtcatatagcaagggttcaataaatagtaactattagtatttttttaaataggcttatcgaagtatgacagatgaagattaaactgcacatatttaaattgtacattttgatgagttttcacatrtgtatatacctgtgaaaccatcactacagtgaagataacaaatatatttattccctccaagtttccccatgcctctctgtcatccagcctcctctcctccccaaagaaaaatgtcccctctccaggaaaccactaattttctgtgactgtagactaatttacaatttctatatttttatgaaaatgaaatgagacatgtactgtttttgtttgtcctctttctctcagaataattattttaagagtcattcatgttgctgtgtgcatcagaagatcattattcttttattgcagagtaatattccattgtatagatacaccacaatttgtttatccatttacctgttgatgggcatttgtgttgtttccagtttatggctattacaaataaaactgctatgatcatttgtggacaaacactttcatttctcttgagtaaatacttaagagtagaatagctgggccatatggtagatatacttataatcttttatctaaagtgattgtaccagtttacattcccatcagcgatgaaaga

SEQ ID NO: 939641 - DNA, 778 bp, Homo sapiens
tcccaattcttgctgcagtatcatctgattttaattatcatagccttacacctggccaactccatttttagaaacaacatgcctttttattattttgctttcttactctttggctccttatggggtaaatcaactttctaacccaagagctgacattttcagcaaagaagaaatcatcttttgttatgttaacgtagagccttagatattaatagaggcagcttcctcaaaccattccacaaaatgacgtgatagctttacctttccaaaaaataaactaggatgtgcataacattttggtgttatgtctaaagtttcattaaaatgtaccatgcaaaacaatctaagtatttctttttctttttcttttttttttttttttgagactgagtttcgctcttgttacccaggctggagtgcaatggtgcgatctcagctcattgcaacctctgcctcccggattcaagcaattctcctgcctcagcctccggagtagctgggattacaggcatgtaccacyatgcccaactaattttgtatttttagtagaaacagagtttctccatgttgaacaggctggtctccaactcccaacctcaagtgatctgcccaccatagcctcccaaagtgctgggattacaggtgtgagccactgcgcaaggcccaatctaagtgtttcttgacatatctggctggctgaggatagcacagagccagtttaaacagctaagaaaaagtcggtttatccttgtggctatatttgtggttgaaattgtga

SEQ ID NO: 939642 - DNA, 628 bp, Homo sapiens
ttcacagtgttacgcaaaagtcaccaccatccatttctagaaccttttcatcatcctaaacaaaaactatgtacccattaaacatgctctccccattccttctccctccccgtccctgaataagctctggtctactttctgtccctatgaatttgactattctaggtacttcatagaaatggaatcatacagtatttgtcattttgtgactgatgttctgtcacttacgataatgtgttcaargttcatgtacactatagtgtcagaacttcattccttttcacataatattatgaaataatattcattccttttcatataatattatgaaataaaatgtgttctatccctacaatagaatattattcagccataaaaaggaatgaagttcttctatcttctacaatattctattgcagggatagaacacattttgtttatcattcatcagtgacaaaagcttgggctgtctctgccttttggtgattgtgaataacgctgctacaaacattagcatacaagcatctgtttgtgtcctggctttcagttcttttgggtatatacctagaagtgcaattcctggctcactgggtaattataagtttaactttttgaggaaccaccagcg

SEQ ID NO: 939643 - DNA, 628 bp, Homo sapiens
ttcacagtgttacgcaaaagtcaccaccatccatttctagaaccttttcatcatcctaaacaaaaactatgtacccattaaacatgctctccccattccttctccctccccgtccctgaataagctctggtctactttctgtccctatgaatttgactattctaggtacttcatagaaatggaatcatacagtatttgtcattttgtgactgatgttctgtcacttacgataatgtgttcaaagttcatgtacactatagtgtcagaacttcattccttttcacataatattatgaaataatattcattcsttttcatataatattatgaaataaaatgtgttctatccctacaatagaatattattcagccataaaaaggaatgaagttcttctatcttctacaatattctattgcagggatagaacacattttgtttatcattcatcagtgacaaaagcttgggctgtctctgccttttggtgattgtgaataacgctgctacaaacattagcatacaagcatctgtttgtgtcctggctttcagttcttttgggtatatacctagaagtgcaattcctggctcactgggtaattataagtttaactttttgaggaaccaccagcg

SEQ ID NO: 939644 - DNA, 537 bp, Homo sapiens
aagcacagaacaccgagaaggaaccaacctttgccggcagagttggatgggtgtttgagactgtgctgtgggaagtgcatgctcagttcctacagggtgccacacagacctgtgggaattaaacagtgccaccagcatccaggggaacctctgcccgcctggatgcttcatctgtgggacaagggggcaaatagtatattccattccgcctgagatggaaaarcttgcctctgttatgacacccctccctccatcagcgactgctaataagtaggtggttggcacaagggcaaggtgaccacacgctgattgagtgaatataggcagccatatggactgtgtaggatgccagtgaaataccaaaagatgtcagtagatggcagttgtacacagacttggtgcaagtcgttcaggagaaggataatgccgcgcaacccagtcctgcccaggcattctagctcaaagactaagtgctgtagctgggtgggggtgtagagccttttccgtttgattagggaactagccaaggtgcccagc

SEQ ID NO: 939645 - DNA, 537 bp, Homo sapiens
aagcacagaacaccgagaaggaaccaacctttgccggcagagttggatgggtgtttgagactgtgctgtgggaagtgcatgctcagttcctacagggtgccacacagacctgtgggaattaaacagtgccaccagcatccaggggaacctctgcccgcctggatgcttcatctgtgggacaagggggcaaatagtatattccattccgcctgagatggaaaaacttgcctctgttatgacacccctccctccatcagcgactgctaataagtaggtggttggcacaagggcaaggtgaccacacgctgattgagtgaatataggcagccatatggactgtgtaggatgccagtgaaataccaaaaratgtcagtagatggcagttgtacacagacttggtgcaagtcgttcaggagaaggataatgccgcgcaacccagtcctgcccaggcattctagctcaaagactaagtgctgtagctgggtgggggtgtagagccttttccgtttgattagggaactagccaaggtgcccagc

SEQ ID NO: 939646 - DNA, 537 bp, Homo sapiens
aagcacagaacaccgagaaggaaccaacctttgccggcagagttggatgggtgtttgagactgtgctgtgggaagtgcatgctcagttcctacagggtgccacacagacctgtgggaattaaacagtgccaccagcatccaggggaacctctgcccgcctggatgcttcatctgtgggacaagggggcaaatagtatattccattccgcctgagatggaaaaacttgcctctgttatgacacccctccctccatcagcgactgctaataagtaggtggttggcacaagggcaaggtgaccacacgctgattgagtgaatataggcagccatatggactgtgtaggatgccagtgaaataccaaaagmtgtcagtagatggcagttgtacacagacttggtgcaagtcgttcaggagaaggataatgccgcgcaacccagtcctgcccaggcattctagctcaaagactaagtgctgtagctgggtgggggtgtagagccttttccgtttgattagggaactagccaaggtgcccagc

SEQ ID NO: 939647 - DNA, 652 bp, Homo sapiens
aggtggttggcacaagggcaaggtgaccacacgctgattgagtgaatataggcagccatatggactgtgtaggatgccagtgaaataccaaaagatgtcagtagatggcagttgtacacagacttggtgcaagtcgttcaggagaaggataatgccgcgcaacycagtcctgcccaggcattctagctcaaagactaagtgctgtagctgggtgggggtgtagagccttttccgtttgattagggaactagccaaggtgcccagcttgggggcacaccagacgaccagcagtcacatgtgaaattagcaatcctctgatcctccaccaacgtatagcaagtgttagtgctggtagatcccagcacaaatacattctgggggtggatattctacatggcttggccttacaaaccatttgatggactgcttgatgatggaattgggacagtaccactatgtggtagacttggcgaatgcattcttttccagagagccaggaacagtttgccttcatgagagggtgacaatggactttcagtgttgctgcagggctatgtgcagagccccaccatatgtcgtgatcttgatattatgctaacctctgattcttttgcagatttagaagtggcaacactcctctttcctgggattg

SEQ ID NO: 939648 - DNA, 577 bp, Homo sapiens
tataggcagccatatggactgtgtaggatgccagtgaaataccaaaagatgtcagtagatggcagttgtacacagacttggtgcaagtcgttcaggagaaggataatgccgcgcaacccagtcctgcccaggcattctagctcaaagactaagtgctgtagctgggtgggggtgtagagccttttccgtttgattagggaactagccaaggtgcccagcttgggggcacaccagacgaccagcagtcacatgtgaaattagcaatcctctgatcytccaccaacgtatagcaagtgttagtgctggtagatcccagcacaaatacattctgggggtggatattctacatggcttggccttacaaaccatttgatggactgcttgatgatggaattgggacagtaccactatgtggtagacttggcgaatgcattcttttccagagagccaggaacagtttgccttcatgagagggtgacaatggactttcagtgttgctgcagggctatgtgcagagccccaccatatgtcgtgatcttgatattatgctaacctctgattcttttgcagatttaga

SEQ ID NO: 939649 - DNA, 577 bp, Homo sapiens
tataggcagccatatggactgtgtaggatgccagtgaaataccaaaagatgtcagtagatggcagttgtacacagacttggtgcaagtcgttcaggagaaggataatgccgcgcaacccagtcctgcccaggcattctagctcaaagactaagtgctgtagctgggtgggggtgtagagccttttccgtttgattagggaactagccaaggtgcccagcttgggggcacaccagacgaccagcagtcacatgtgaaattagcaatcctctgatcctccaccaacgtatagcaagtgttagtgctggtagatcccagcacaaayacattctgggggtggatattctacatggcttggccttacaaaccatttgatggactgcttgatgatggaattgggacagtaccactatgtggtagacttggcgaatgcattcttttccagagagccaggaacagtttgccttcatgagagggtgacaatggactttcagtgttgctgcagggctatgtgcagagccccaccatatgtcgtgatcttgatattatgctaacctctgattcttttgcagatttaga

SEQ ID NO: 939650 - DNA, 577 bp, Homo sapiens
tataggcagccatatggactgtgtaggatgccagtgaaataccaaaagatgtcagtagatggcagttgtacacagacttggtgcaagtcgttcaggagaaggataatgccgcgcaacccagtcctgcccaggcattctagctcaaagactaagtgctgtagctgggtgggggtgtagagccttttccgtttgattagggaactagccaaggtgcccagcttgggggcacaccagacgaccagcagtcacatgtgaaattagcaatcctctgatcctccaccaacgtatagcaagtgttagtgctggtagatcccagcacaaatacattctgggggtggatattctacatggcttggccttacaaaccatttgatggactgcttgatgatggaattgggacagtaccrctatgtggtagacttggcgaatgcattcttttccagagagccaggaacagtttgccttcatgagagggtgacaatggactttcagtgttgctgcagggctatgtgcagagccccaccatatgtcgtgatcttgatattatgctaacctctgattcttttgcagatttaga

SEQ ID NO: 939651 - DNA, 777 bp, Homo sapiens
actttcctggcagccaagcaggcacaagccctataggtaattatccagaggcacccatttaaactcgatgtgaatgtgaccacagatagttttggctggagcttatagcagcacatggagcacttaagaatgccagttggcttttggtcccgactacggaaaggagctgagctccagtattcattgatagagaagcagttaataactgcatatgctacccttcaggytcaggagtgtgtgaccagacaggctacaatcattatgtgcctgatttacccaatagcaggatgggtgcattcatgggtaaagaccccccaagactggaacggtgcagacatacactttggcaaagtggggcgcctacttggagcagtggagtatgctgagtacaagtcccttatcagcagagttgcaagaggtcttgggacctgcagccctaatgcaagataaggccatggggcctgaggcacccctagaccctgagccttcaccatttaaggaagggcatcccctcattcctgatggggcatggtacacagatgagtctaaccaaggtgctgctatttggaccactgttaccgtccagcctagtactgataccatgcggtatgaaactggatgtaggtgaagtagccaatgggctgaatttagagcaatcctgatggtgatcaccaaggaggtgacacctgtggtaatctatactgatagctgggtgatctgtcgaggcttaaccttgtggttaaccactagaagttacagaagtggccagttggtcac

SEQ ID NO: 939652 - DNA, 615 bp, Homo sapiens
ctgctgcccaagaggcgtctgtgcccttttaggaaaacaatgttgtacctttatccctgacagttggcagaacataacagcagccctgcaaggggtctcgcaggagattaaggtggttaagagcattactgacaaccccctgtagagatggtgggcatctctgggctctggactatgctgggccctcatagtcataagtagcatagctgagatcctagtagtgagctgttattctttgtattgtgggttatagattcagggctctgccctatgggtaggtgtccctgccccagaggatgcccttagcctagggagtagagtgtaagggaaatggctgtgctttagaaataggcagaggtgacctctggtacagtatgactcagcaggtttggagtgcaggsacacagctccacacatgacgcaaccatgccacatgaggtgtattaagtaaccactcaggtgtgcttgtgcttggcttggagccactattgtctgtaaaaggtataactaccctgctgatgctgtacatataccttgcttgaacccacagcccacttgtgcccagagagagaataaagccacgtcaaaactccctgcaattcttcaagtgttctt

SEQ ID NO: 939653 - DNA, 575 bp, Homo sapiens
aaacacatttgtctctttagcacatggattattctcaaggacagactacaagttaggtcacaaaacaagtctcataacattcagaaaattaaaataatatcaagcatcttctctgaacatatgtaataaaactagaaatcaataacaagaggaatttttaaaactatacaaacacatgtatattaaacaatatgctttcaaatgaccagtgggtcaataaagaaattaagaagaaattttaaaaatttattgaagaaaataaaaatggaaacacaacatatcagaacctataggatacagtgaaaacagtactaagagagaagtrtatagcaataagcacctacatccaaaaagtggaaaaggtttaaataaacaacataacaatgcatcttaactagaacagcaagagcaaaccaaacccaaaactagtaaaataaataaataataaacatgagagcagaaataaataaaatttaaacaaaaaatacaagaaatcaataaaatgaaaagttgtattttaaaaagataaacaaaattgacaaatttttagccagactaactaagaaaaaagaaag

SEQ ID NO: 939654 - DNA, 575 bp, Homo sapiens
aaacacatttgtctctttagcacatggattattctcaaggacagactacaagttaggtcacaaaacaagtctcataacattcagaaaattaaaataatatcaagcatcttctctgaacatatgtaataaaactagaaatcaataacaagaggaatttttaaaactatacaaacacatgtatattaaacaatatgctttcaaatgaccagtgggtcaataaagaaattaagaagaaattttaaaaatttattgaagaaaataaaaatggaaacacaacatatcagaacctataggatacagtgaaaacagtactaagagagaagtatatagcaataagcacctacatccaaaaagtggaaaaggtttaaataaacaacataacaatgcatcttaactagaacagcaagagcaaaccaaacccmaaactagtaaaataaataaataataaacatgagagcagaaataaataaaatttaaacaaaaaatacaagaaatcaataaaatgaaaagttgtattttaaaaagataaacaaaattgacaaatttttagccagactaactaagaaaaaagaaag

SEQ ID NO: 939655 - DNA, 657 bp, Homo sapiens
aacattaaaacagagattctgagactgatgaaacagacttttttttttttttttttttttttgagatggagtctcactctgtcgcccagcctagagtgcagtggcttgatctcggctcactgcaagttccgcctcctgggttcacaccattctcctgcctcagccttccaagtaggtgggactacaggcacccgccacsatgcctggctcattttttgtatttttagtacagacagggtttcaccatgttagccaggatggtctccatctcctgacctcgtgatccgcccacctcggcctcccaaagtgctgggattacagaaacagactttttatagcaatcggataccaaattccaacctgactctactatagcatcacataacacacagcaggccctgaaagaaattgaagtattttaccccaaaatacatttttagacatattttgagatggccttgcaaagctatttcttgtggggattatctacattctgtagagaacccttttctttccaggttgttcctctgatccaggagagaattaactaagagtctcccacttttttaggtctaataagagttctgaagtctgctatttgaaggcttcatctgcatgataaaaccttggcctccacaaccccttatcttaatctgg

SEQ ID NO: 939656 - DNA, 615 bp, Homo sapiens
ttgtgctttttttctggtcctttaagaaaatacttctttcatacaaccatccacatcataagaaacattatcttatgttattccaaaatcttcctattatttttgctttggtttctgaatgttgtctatgttaatctttttcttttctttttttcccccacggcgaaaaagagcccaggtttcttggtttgtttcatgaggtatgaaaattagctcrtcttgcttctctgccttctcttctaggggtctgaagactatgagactgctctatcaggaaaggaagccctttcggctgcgctgcgctcacaaaacctcaccaagagtacagagaaccacagactgcgtagaagcattaagaagatcacccaggagctgagtgacttgcagcaggagagggagagactggagaaggacctggaggaagcccatcgagagaagagcaaaggagactgcaccatccgtgtgagtaccgccctgcccttctgacacagtggacagtgcttttggggctatgtggctgtgtctggttgtagggtgatattcagtacagaagacttaagaaaatatttcacttattatctcagtacctagaaatgaccagcttcatttgatcta

SEQ ID NO: 939657 - DNA, 617 bp, Homo sapiens
agcaataagaaactgggaaaatggtcagtatcgactttttcagaaggctggaaattaaccaaaggcttacagcaatccaggagcatttattctagaaaaatggctgaatttcaatagaacaatgagttttatggcattttaatttaccaacttccacacacttcaccttatctctgtggtagccttgaaaatcagcagcctgcaatcacagtgaaaatcaacagcctggcagctattggaatggttgcagaatggagataaagcttcttcaaagtcccattccccccaaagtcccattcccccaaaactgtcactatttgacctgtctggtggttctctggaagacttcactcacaagsctttttatttaatctgatttagagttgccaagtgtgaacagtcttttccttgggggtgtttgttgaaaagaatcacaggcaattagtcaatactgcagccgcctaaggcagtggattagagttaggggcaaacaataggcttaccaaaaagcttaaaagaaaaagcttgggaatgagatgcccataggagactttgaaaagctcccacatattcctgggaatctagaaggtgaagcctatatagggctatgtgcatgc

SEQ ID NO: 939658 - DNA, 606 bp, Homo sapiens
ctgttatttacttggtctaatgccaaaacaggccagagacccctttcacctacttctctttaatcccaaacccatgtctctgtttgatctaagaaagagccaaatgcccaggaggcgccatggtagagaaaagcagccagccagagagtgrcctccgtgccaggggagtgtgtctaagctttgctttatttttcttatttgtctgtagttgtatgattggtagaagagagtagatatgaagtctactgacacaggattggtcttcaggaatgtcttaccaagcatttgggggaacagaggggtttcacaaataagagagcaatgatcagactttttctaaaaggagcagccataagctaccttaactctccaacttgcccattaatcttcacctagagttaggaagatttcaccattagctgtggcccataaacgatccttaagcttgaccaaccacagaggtccatctccttgaggaggaagtgaaaggggtatggatgtgaactttctgtcctccgcaggaccccagctgtgtcttctacttcttgtacaagatagtctccaaatgatgttttctggctgacaatgccacagaactgatcctta

SEQ ID NO: 939659 - DNA, 785 bp, Homo sapiens
tcacataggattcctgaacactgctacgagtgcctgcatgtttgtccctcacatcagattccaatacattcctgctgtgttctgagtatttctccctcacatatgattctagagcaatcctgctgtgatctgaatgtttgtccctcacatagggatccagaacactgttgctgggttcttaatgtttctccctaaagtagaactccagaacactgcctcgagggtgtgaatgcttgtccgtaacacaggattccagaacactctaactgctgtttgaatgtttgtccctcaaataggattccagaacagtgctgctggggtctacatgcatgtcygtcagagaggataccagaacactgatgctcggttctgagtgtttctccctcacatcgaattctagcacactgtgaccagtttctgaatgtttttctgtaacatgggattctagaacactcccgctgttatttgaatgtttgtccctcacataggattccagaacactgctatgagtgtctgaatgtttgtccctcacttaagattccagaacactgctatgagggtctgaatgtttttccctcacataggaatccagaacaccgttacgagggtcggattgttcgttcctctcaggggattcctgaacactcctgctgtggtctgaatgattgtctgtcaaacaggattccaggacactgctacgagggtctgaatgtttgtccctcacacagaattccagaacactgctacgtgggtctgaatgattgtccctcacgtaggattccaga

SEQ ID NO: 939660 - DNA, 508 bp, Homo sapiens
tgttggacttcgttaaatgctttttccttgtcaattcagaggatcagatggtttttactatttcattctgttaatgtagtatattatattgattgatttgcatatgttaaatcagtgttatatgccagaaataaatctcacttggtcatgatgtacagtctttttggtgtgttgttgaattcggtttgataatatttaattgagaattttttgcattaattctcatcagagaaattgacctatagttttcttttcttgtgatgtctttgtctggattaggtatcaagatgatgcttgcctcataaagtatgtttgggagtatttcctgtagccctattttttggaaragtttaggaagtattggtattagttcctctttgaatgtttggtagaattcagctgcgaaggcatctggtcttgggctcttaatttgggggagggttttgattatttcttcaatctctttgttattattctgttcaagctttctatttctttctgatttaac

SEQ ID NO: 939661 - DNA, 486 bp, Homo sapiens
acaggctttcttcattctttttcactttcatttttttcctctgattgattcatttcaaacagcctatcttcaagttcacagaatctttcttctgcttgatctagtctgctgttgaagctcttgattgtatttttcatttcattgatcaaattctttaattctaagatttatgtgtggttttaaaaaaaatgatatctatctctttattgaatttctcattcagatcataaaytgttttcctgatttcattgaattatctatctgtattcttttgtatcttcctggatttcctttaaatcattattttgaattcttttttaggcagttggtaaattttcattttcttggagtcagttactgaagaattgttgtgttcctttgatggtatcatatttccttcgttttttgtgtttcttgtatcctgcattgacgtttgtgcatctggtggagcagtcacctctctcaaactttacacagtggcttttg

SEQ ID NO: 939662 - DNA, 552 bp, Homo sapiens
aaaatggactaatacagtacattggtactggaagtggggcactgctgaaaagatacccgaaaatgtggaagcgactttagaactgggtaacaggcagaagttagaacagtttggagggctcagaagaagacaggaaaatgtgggaaagtttrgaactccctagagacttgttgaatggctttgacaaatgtattgttaatgatatggacaatgaaatccaggctgaggtggtctcagatggagatgagtaactttttgggaactggagcaaagttgactcttgttatgttttagcaaagagactggcagcattttgcctctgccctagagatccgtggagctttgaatttgagagagatgatttagggtacctggcagaagaaatttgtaagcagcaaagcactcaagaggtgactggggtgcttctaaaggcattcagttttaaaaaggaagcagagcataaaagtttggaaaaatttgcagccggacaatgtcataggatagaaaatcttattttctgaggagaaattcaagctggctgcagatacttgc

SEQ ID NO: 939663 - DNA, 548 bp, Homo sapiens
ccaagcatggagaacctgaggattgggaggaccaactatatatgaaacataaataaatttgtattttgacttgggtcccatccccaagatatttcatttgtatgtagatattccaaaatccaaaaatatcggaagtctgaaacacttctggttccaaatattttggataaaggatactcaagctttacacacatttgctgtgtggccttgagagagttactcaaccacacttagctttagtccccttagctgtaaaacagggatgattaacacaatagtttctaccttataggtggaygtgaggaataaatacaatgaatacatgcaatccatttagaacatgtatgttaagttgaatcacaggcaattgctgttttggtggatctaaaatgaatattgtcagggccaggtgcggtggctcatgcctgtaatctcagcactttgagaggccgaggcgggcagatcacttgaggtcaggagttcgagatcagcctggccaacatggtgaaaccccatctccactaaatataaaaattagcctggcatgg

SEQ ID NO: 939664 - DNA, 551 bp, Homo sapiens
aataggagtgctgagagagggcatccttgttctgtgcctgttttcgaaaggaatgcttccagcttttgcccattcagtaagatattagctgtgggtttgtcataaatagctcttattattttgacatatgttccatcaatacttagtttatggagagtttttagcatgaaggagtgttgaattttattgaaggccttttctgcatctattgagataatgatgtggtttttgccattggttctgtttatgtgatggattatgtttattgatttgcatatgttgaaccagccttgcatcccagggatgaagctgacttgatcrtggtggataagtttttggtgtgctgctggatttggtttgccagtattttattgaggatttttgcatcaatgttcatcaggaatattggcctgaaattttctttttttgttgtgtctctaccaggttgtggtatcaggatgatgctggtctcataaaatgagttagcgaggagtccctctttttctattgtttggaatagtttcagaaggaatggtgccagctcctctttg

SEQ ID NO: 939665 - DNA, 566 bp, Homo sapiens
ataggagtagtgagagagggcaaccttgtcttgtgccagtttccaagggaatgcttccagcttttgcccattaagtatgatattagctgtgggcttatcatatatggtgcttattcttttgaggtatgtktcttcaatacctagtttattgagagtttttaacatgaatgaatggtgaattttattgaaagccttttctgtatcttttgagataatcatatggttttggcctttagttctgtttatgtgatgaataacatttattggtttgtgtaggttgaaccaaccttgtatcccggggatgaagtctacttgaccgtggtggatacgccttttgatctgctgctcaattcggtttgccagtattttgttgaggatttttgcatcaacattcatcaagaatattggcctgaagttttttgttgttgttgttgttgtatatctgccaggttttggtatctggatgatgctggcctcatagaaggagtttgggaggaatccctcctcctcaatttttttgaatagttttggtatgagtaataccagctcttctttgtacatctggt

SEQ ID NO: 939666 - DNA, 602 bp, Homo sapiens; identical to SEQ ID NO: 922179

SEQ ID NO: 939667 - DNA, 587 bp, Homo sapiens; identical to SEQ ID NO: 922180

SEQ ID NO: 939668 - DNA, 617 bp, Homo sapiens
atagcccccctcttggttgctttcatggactggcattgtctgtagccttcctgtgtgcatgatcaagcttttggtggctgtacctttctggggtccggaggacagtggccttcttctcacagctccagtaggcagtacctcagtggggactctgtgtgggggcttcaaccccatatttcccttctgcactgtcctagcagaggttttccattagggcaccacccttgcagcaaaattctttctggacatctaggagtttccatacatcctctgaaatctaggcagagattcccaaacctcaattcttgacttctgtgcacccacaggcgcaacaccatgtgaaactgccaaggtttggggcttgcaccacctgaatccacagtccaagctgtaccttggacccttttagccatggctagagtagctgggatgcagggyatcaagtcactaggtggcaaacagcagggggcccctgaatccagcccaggaaaccattttttccttttaggcctcttggcctgtaatgggagggactgctgcaaaggtctctgacatgtcctggagatattttccccattgtcttggtgatgaacatttgggtccttgttgcttatgca

SEQ ID NO: 939669 - DNA, 763 bp, Homo sapiens
tttggaagacagtgtgatgattcctcaaagacctaaagacagaaatgtcattcagcccagcaatcccattactgggcatatacccaaaagaacataaatcattttattataaagccacatacacacatatgttcactgcagcactattcataacagcaaggacatggaatcaccctaaatgcccaacaatgatagactggataaagaaaatgtagtacatatacaccatggaaaactatgcagctataaaaaagaataagatcatgtcctttgcrcaaacattaatggagctggaggccattatccttagcaaactaatacaggaacagaaaaccaaatacagcatgttctcacttatagtgggagctaaacgatgagagcatacggacacacagagggaaacattagggtggaggataggaggagagagaagaacgggaaaaataacaaatgggcattaggcttaatacctggatgatgaaacaatctgtacaacaaacctccatgacacaagtttacctgtgtaccaaactgatatggaagtgctgggaagggaagagcgtggtccctttaaatgatagggaaggggagaagggaagtgttgggtagaggaggacgtggtccctggctagggctccacccccacggacctaggtaaggacaggcacttctgctttcatgccgaaatgtagcattttccaagaccaccctggcctgccgtgcccccatcatgggcctataaaaaccagagaccttagcaagg

SEQ ID NO: 939670 - DNA, 529 bp, Homo sapiens
cagctataaaaaagaataagatcatgtcctttgcgcaaacattaatggagctggaggccattatccttagcaaactaatacaggaacagaaaaccaaatacrgcatgttctcacttatagtgggagctaaacgatgagagcatacggacacacagagggaaacattagggtggaggataggaggagagagaagaacgggaaaaataacaaatgggcattaggcttaatacctggatgatgaaacaatctgtacaacaaacctccatgacacaagtttacctgtgtaccaaactgatatggaagtgctgggaagggaagagcgtggtccctttaaatgatagggaaggggagaagggaagtgttgggtagaggaggacgtggtccctggctagggctccacccccacggacctaggtaaggacaggcacttctgctttcatgccgaaatgtagcattttccaagaccaccctggcctgccgtgcccccatcatgggcctataaaaaccagagaccttagcaaggcaggga

SEQ ID NO: 939671 - DNA, 529 bp, Homo sapiens
cagctataaaaaagaataagatcatgtcctttgcgcaaacattaatggagctggaggccattatccttagcaaactaatacaggaacagaaaaccaaatacagcatgttctcacttatagtgggagctaaacgatgagagcatacggacacacagagggaaacattagggtggaggataggaggagagagaagaacgggaaaaataacaaatgggcattaggcttaatacctggatgatgaaacaatctgtacaacaaacctccatgacacaagtttacctgtgtaccaaactgatatggaagtgctgggaagggaagagcgtggtccctttaaatgatagggaaggggagaagggaagtgttgggtagaggaggrcgtggtccctggctagggctccacccccacggacctaggtaaggacaggcacttctgctttcatgccgaaatgtagcattttccaagaccaccctggcctgccgtgcccccatcatgggcctataaaaaccagagaccttagcaaggcaggga

SEQ ID NO: 939672 - DNA, 529 bp, Homo sapiens
cagctataaaaaagaataagatcatgtcctttgcgcaaacattaatggagctggaggccattatccttagcaaactaatacaggaacagaaaaccaaatacagcatgttctcacttatagtgggagctaaacgatgagagcatacggacacacagagggaaacattagggtggaggataggaggagagagaagaacgggaaaaataacaaatgggcattaggcttaatacctggatgatgaaacaatctgtacaacaaacctccatgacacaagtttacctgtgtaccaaactgatatggaagtgctgggaagggaagagcgtggtccctttaaatgatagggaaggggagaagggaagtgttgggtagaggaggacrtggtccctggctagggctccacccccacggacctaggtaaggacaggcacttctgctttcatgccgaaatgtagcattttccaagaccaccctggcctgccgtgcccccatcatgggcctataaaaaccagagaccttagcaaggcaggga

SEQ ID NO: 939673 - DNA, 763 bp, Homo sapiens
tttggaagacagtgtgatgattcctcaaagacctaaagacagaaatgtcattcagcccagcaatcccattactgggcatatacccaaaagaacataaatcattttattataaagccacatacacacatatgttcactgcagcactattcataacagcaaggacatggaatcaccctaaatgcccaacaatgatagactggataaagaaaatgtagtacatatacaccatggaaaactatgcagctataaaaaagaataagatcatgtcctttgcgcaaacattaatggagctggaggccattatccttagcaaactaatacaggaacagaaaaccaaatacagcatgttctcacttatagtgggagctaaacgatgagagcatacggacacacagagggaaacattagggtggaggataggaggagagagaagaacgggaaaaataacaaatgggcattaggcttaatacctggatgatgaaacaatctgtacaacaaacctccatgacacaagtttacctgtgtaccaaactgatatggaagtgctgggaagggaagagcgtggtccctttaaatgatagggaaggggagaagggaagtgttgggtagaggaggacgtggtccctsgctagggctccacccccacggacctaggtaaggacaggcacttctgctttcatgccgaaatgtagcattttccaagaccaccctggcctgccgtgcccccatcatgggcctataaaaaccagagaccttagcaagg

SEQ ID NO: 939674 - DNA, 646 bp, Homo sapiens
gctgtgatgaaaaggatgaagaagccccagaggaagtgatgccggcaaagacagcaacaaacttcatattaaaggaactcttgtagatattgcatgacgttgacaatgttagatgctgttccgaaaacagcacgacagttcaccaaggcatagaaacactgctggctccttatcataagctatacgacaagagggaggcaagcactgttcaaactgggcttgatayacgtctataaataaataaagcactttaattggctgttgtttaatgttttaaattacagtgtaaaaatgaagtactcccaaccaggcacggtggctcactcctgtaatcccagcactttgggaggctgaggcggataatgaggtcaggagatcaagatcatcctggctaacacagtgaaaccctgtctgtactaaaaatagaaaaaatcagcctggtgtggtggcatgccacaactacttgggaggctgaggcagaagaatcgcttgaacccaagaagtggagcttgcagtgagccgagatcgtgccactgcactccattctgggcgacagagcgagactccatctcaaaaaaaaaaaagtactaatttcactatgtttcatttccttatacatttataaccaacagtaagagatttttaa

SEQ ID NO: 939675 - DNA, 692 bp, Homo sapiens
agtataagaaaagtgccattttcttcttatctttcatcatatgcttcaaggatgcatattatcaatatgtattagtgtttatgtcaacctttgtcacctgagagacagaattcctcattgtaacattaccctttccctcyatttcctctttttttgtactatgcttgttggaagaaagtcacgatgcatagctcatatttaaggagtaaggagttatgcttcacctccttaaaggcaaaaatttttactttatgaagttatatttaagttatggatttcttctgcatggaagattagtacactctcttgcatgtattttttattcaataattcatatcagtatggactcatgcatatgtattttatacccaatacattttacttcctttgttgctaagattttttccagttttggccatgggagctcttccattgccttttgtagctctttgatataccacaatcattgtgggtatattgatgtattcatttattggctgaacttttctgagcacttctttattgtttagcacaagacactccaggatcatcttctatatttcctgttccagtcctaaaatcagccagttctccaagtagctttggtttcttcttattagagaaagttattagaaaccaaaatttaggcattaggtagactcattccactggagtgtgattgcttctagggc

SEQ ID NO: 939676 - DNA, 584 bp, Homo sapiens
atctataaggaacttaagcaaatcaacaaacaaaaaacaaacaaccccattaaaaatgggcaaaggacatgaacagacacgtctcaaaataagacctgcaagcaaccaacaagcttatgaaaaaatattccacatcagtcatcatcaggaaaatgaaaattaaaaccacaatgagatatcatctcacactgatcagaatggrtattattaaaaagtgagaaaatagcagatgttgatgaggttgtagagaaaagggaatacttatacactgctggtaagaatgtaagttagttcagccactgtaaaaagcagtttggagatttctcaaagaacttagaactaccattcgacctaacagtcccattactaggtatatatccagaggaatataaatcattctacctaaaagacatatgcacttgtatgtttattgcagcactatttacaatagcaaagacatagaatcaatctagatgcctataaatagtggactggataaagaaaatgtggtacatatacacatggaacagtacacaaccataaaaagtatgaaatcctgtcctttgtagcaatatggatgcagc

SEQ ID NO: 939677 - DNA, 655 bp, Homo sapiens
aatataaataacaaatttagcatttttgggtgtacaattcaatggcattaagtacattcacatcattgggcaattatcaccaccatccatctctagaccttttccatctttccatactgaaactctactcattcaacaactccttccaggtgctggtccctgtatccctccagcctttggtaacctctattctatgttctacgttctgtttctatgaatttaactactccaggtacctcatgtaaatgaaatcacacaatattgttctctttgtgcctgacttatttcatttcatattgtgtcttcaaggttcatccatgttgtagcatgtaccattcttttttaaggctgcatagtattctctcgtatgtatataccatattttgtttatccattcagccatctatgaacacttgggttgctttcacctttcggttattgtgcataatgctgctatgaacatgggtctataaatatttcctccagactctgccttcarttgttttgggcatataccaagaagtagaatttccagatcacacggtaattctatttctcattttttgaggaggcttcatactgttttccatagcagttgcaccattttacatttccactaactgtgcagaagggttccagtgtctctacatcctca

SEQ ID NO: 939678 - DNA, 637 bp, Homo sapiens
ccggctaatttttgtatttttagtagagatggggtttcaccatcttggccaggctggtcttgaactcctgacctcatgatccacccacttcagcctcccaaagtgctgggattacaggcttgagccaccacatctggtcagtcccctgactttcacagccacatttgtaactgaaaattagcacagtcattgttatcttttgcttgtatcccaggggtttttcaggtaagtacagacctgaacctagagaaacttccctaggccagcatgaggctaaatggtggcttttaatggaaatacttttctttcttcttctttttttyttttttgagagggagtcttgcactgtcgcccaggctggagtgcagtggcatgatcttggctcactgcaagctctgcctcccaggttcacgccattctcctgcctcagcctcccgagtagctgggactacaggtgcccgccaccatgcccgactaattttttgtatttttagtagagacggggtttcaccgtgttagccaggatggtcttgatctcctgaccttgtgatccgcccacctcgccctcccaaagtgctgagattacaggcgtgagccaccgcatctggccgcctttcttcatttttgtggggagact

SEQ ID NO: 939679 - DNA, 606 bp, Homo sapiens
ccggctaatttttgtatttttagtagagatggggtttcaccatcttggccaggctggtcttgaactcctgacctcatgatccacccacttcagcctcccaaagtgctgggattacaggcttgagccaccacatctggtcagtcccctgactttcacagccacatttgtaactgaaaattagcacagtcattgttatcttttgcttgtatcccaggggtttttcaggtaagtacagacctgaacctagagaaacttccctaggccagcatgaggctaaatggtggcttttaatggaaatacttttctttcttcttcttttttttttttttgagagggagtcttgcactgtcgcccaggctggagtgcagtggcatgatcttggctcactgcaagctctgcctcccaggttcacgccattctcctgcctcagcctcccgagtagctgggactacaggtgcccgccaccaygcccgactaattttttgtatttttagtagagacggggtttcaccgtgttagccaggatggtcttgatctcctgaccttgtgatccgcccacctcgccctcccaaagtgctgagattacaggcgtgagccaccgcatct

SEQ ID NO: 939680 - DNA, 843 bp, Homo sapiens
ttccttaataaccagggttattaagtcaccatcgctccactttggtcctcccttccacatctggccttatgatggagggttgggactgccaatctcatttctctttgctggaggtttcctgaagtctccgccagtaggcggagctagagagaacttgggagactggcagagtgacaaggaccaggcttccttagattcccttagaattctccaagtcaccccaatattacttctcaccccagcaggagcaatttatccctttagcaacagtggttccagtgtgcagtttttcccgctcacaaaaccaaccttgttgggttctcatggagacagaccctagggccagcaccagcttgtgcccctcctcagaagcctgagtccagacacacagggcccctcctctgagctcagggaccccggcacccatgagaagggcccctttcctagaggcctgagtttcaattcgtgggccactgctccaagtttctaagttttgatagtttcaagacactccctttacctgccattggtagcatggtggcaatgacagttaccgcctccatgaactctttttgtcctctattggtcttgtcagttctctgatgccaagtaagcaawtttttatgtaaacttctgtctattaaagtacatctcataattctctttcctgacttgaccctggctgaggcactgaggggcgagggtcagctctggtgaggaccaggagttgaaggagttaagcaagccatgctgcttcaaggcccagataaccgggtgatggagctgagataagacatgcttatccctctgttcacatttacaagcaagagtaatgcagtctag

SEQ ID NO: 939681 - DNA, 589 bp, Homo sapiens
acaaaaacaagcaatgaagaaaggactccctattcagtaaatggtgctgtgaaaactggctagctatatgcaaaagattgaaactggacctctatattttaccatataaaaaatcaattctagatggattaaagacttaaatgtaaacctaaaactataaaaactctataagaaaacctaggcaatactattctggacataggccctggcaaagactccawgatgaagactccaaaagcaactgcaacaaaaacaaaaatagacattgggacataattaaactaaggagcttctccacagcaaaagaaacaatcaatagaataaacagataatccacagaatgagaaaaaatatttgcaaactatccctctgacaaaggtcttagtatccagaatctataagaaacttaaagaaatcaatgagtgaaaaacaaatagtcccatttaaaaaaaatagtcaaaggacatgaacagacatgaacagatacttctcaaaagacaacacacacatggccaacaagcatatgaaaaaattttcagtatcactaatcattagggaaatacaaatcaaaaccacaatgagatacgat

SEQ ID NO: 939682 - DNA, 631 bp, Homo sapiens
gccagtgttagttacccacaaccagagaaagtcaagccaccccaccttgcccaaatgggtagttttttgtcctctttctgaaatactgcatcttggaatacaaataaaacaggcacatgacattcaaaggtaagacaatcaaagactcattagagcatgccagattatgatgtcacacagagacagaaaaacagtattttgcataaaatgtgattgcttcatttccagtaaacttgagttgaaacaggaaaaatctttcccttaaccctatcccttaaccctgattccagaaaataaacatgatgacatttatctgacccttgggtgggcctcaaatattttggacaaatgcctttatatgctgctgcacttggatgccttgaggaaagtgtggtcagggaaggagttgggtatcaagggtcaaatgttctgatccataaagtgcagcatcaaggtaaatttgtgctcmctgtagaagagactttgtaggaggagtgcatttgcctgtaaataaactatcagacaaaactatcagacaggctgcataatggccatcttttgcagtattcagcatagaactcctggaaccaatggctacctttggggaaagtctttggcagaggaggacata

SEQ ID NO: 939683 - DNA, 624 bp, Homo sapiens
agtctgataggcttccctttgtgggtaacctgacctttctctctggttgcccttaatattttttccttcattttaaccttggagaatctgatgattatgtgtcttggggttgctcttcttaaggagtatctttgtggtgttctgtgtatttcctgartatgaatgttggcctgtcttgctaggttggggaagttctcctggataatatcgtgaagagtgttttccagcttggttccattctgcctatcactttcagatacaccaatgtaacataggtttggtcttttcacatagtcccatatttcttggaggctttgttcatttcttttcattcttttttctctaaccttgtcttcatgctttatttcattaagttgatcttcagtctctgatatcctttcttctgcttgattgattcagctattgatacttctgtatgcttcacaaagttctcatgctgtgtttttcagctccatcaggtcatttatgttcttctataaactggttattctagttagcaattcctctaaccttttttcaaggttcttagcttccttgcattgggttagaacacattcctttagctcggaggagtttgttattacccaccttctgaagcttact

SEQ ID NO: 939684 - DNA, 756 bp, Homo sapiens
cctaattcacttttttaaaagtactttttcctaattttgtttctggaaagtgttcttacaaaagaggtctatttcgcatgagaagacctgaggcctgcttccccatgagctgagctctgaatatgcagcttctatcttacataacgccccccaccccatcacacctgactgcctggagttgaatttattaaactgatcctttgcgtgagcagaggcatcgctttcaaaaccgagcagtaagcaaatgactaactgctttcccatctgcacacattctgcatcggctttcaggggggtttacctactacgtctaaagtagttatgaataatcaaaatatagttttcagaagaactgctcattacacattacatcacatgacacttccatctcagttcaagaaaaaaaacaaaaaccaaaaaaacaaaaccttaagaaatgcatctgcagacaaattttcctgattgagtgtcattttgttcacccttggcagccaggacagataaaatgttggcataataaattgcaatttttatctaaagttttcgattctctttgaaattcttrgttgaagatcaaaatggaccaaagttttctcagttttcccactgggaactgcttttgtgaagaaagcttaattgatttgataaacatttttttcattactacaagctaaattctgtggctggtttaaatacatatatataattcagaatgcttccaatttattaagggagacaaaaatgtgaaagtatcac

SEQ ID NO: 939685 - DNA, 753 bp, Homo sapiens
cattgcgcccggcccaagttactaaacttctctgagcctctgatgttttatcttgaaggaggaataataacagctgctacctacgctatgaaaattaaacgagatcatgcatgtaaaagcccatagtaagctctctacaaatgtccgagatgactacgtgttaaaatacttaaattttgcatcccctctggcccagccaatgctagattctaagaaactaatcatggagatgcgcatctattttgtttccgggctgaatgcggcacccttgtttagaagagaaaaaaaaaaccaacaactagaaacaacctgcatgttcgacaacagaaaattaatccaggccgggtgcggtggctcacgcctgtaatcctagcactttgggaggccgagatgggcrgatcacaaggtcaggagattgagaccatgctggctaacacggtgaaacccgtctctactaaaactacaaaaaattagccgggcgtggtggcgggcgcctgtagtcccagctactcgggaggctgaggcaggagaatgacatgaacccaggaggcggagcttgcagtgagccgagatctcgccactgaactccagcctgggcgacagagcgagactccatctcaaaaaaaaaaaaaaaaaaaaaaaaaaaaaaatctaaataaattatggcctagtggaattttgggaagccacttaaaaatatgaagtagagactctggcagagccagaaagctcttcaagatatacagtaaaagg

SEQ ID NO: 939686 - DNA, 753 bp, Homo sapiens
cattgcgcccggcccaagttactaaacttctctgagcctctgatgttttatcttgaaggaggaataataacagctgctacctacgctatgaaaattaaacgagatcatgcatgtaaaagcccatagtaagctctctacaaatgtccgagatgactacgtgttaaaatacttaaattttgcatcccctctggcccagccaatgctagattctaagaaactaatcatggagatgcgcatctattttgtttccgggctgaatgcggcacccttgtttagaagagaaaaaaaaaaccaacaactagaaacaacctgcatgttcgacaacagaaaattaatccaggccgggtgcggtggctcacgcctgtaatcctagcactttgggaggccgagatgggcagatcacaaggtcaggagattgagaccatgctggctaacacggtgaaacccgtctctactaaaactacaaaaaattagcygggcgtggtggcgggcgcctgtagtcccagctactcgggaggctgaggcaggagaatgacatgaacccaggaggcggagcttgcagtgagccgagatctcgccactgaactccagcctgggcgacagagcgagactccatctcaaaaaaaaaaaaaaaaaaaaaaaaaaaaaaatctaaataaattatggcctagtggaattttgggaagccacttaaaaatatgaagtagagactctggcagagccagaaagctcttcaagatatacagtaaaagg

SEQ ID NO: 939687 - DNA, 753 bp, Homo sapiens
cattgcgcccggcccaagttactaaacttctctgagcctctgatgttttatcttgaaggaggaataataacagctgctacctacgctatgaaaattaaacgagatcatgcatgtaaaagcccatagtaagctctctacaaatgtccgagatgactacgtgttaaaatacttaaattttgcatcccctctggcccagccaatgctagattctaagaaactaatcatggagatgcgcatctattttgtttccgggctgaatgcggcacccttgtttagaagagaaaaaaaaaaccaacaactagaaacaacctgcatgttcgacaacagaaaattaatccaggccgggtgcggtggctcacgcctgtaatcctagcactttgggaggccgagatgggcagatcacaaggtcaggagattgagaccatgctggctaacacggtgaaacccgtctctactaaaactacaaaaaattagccgggcrtggtggcgggcgcctgtagtcccagctactcgggaggctgaggcaggagaatgacatgaacccaggaggcggagcttgcagtgagccgagatctcgccactgaactccagcctgggcgacagagcgagactccatctcaaaaaaaaaaaaaaaaaaaaaaaaaaaaaaatctaaataaattatggcctagtggaattttgggaagccacttaaaaatatgaagtagagactctggcagagccagaaagctcttcaagatatacagtaaaagg

SEQ ID NO: 939688 - DNA, 646 bp, Homo sapiens
tagtacggatattcctcaaaaaattaaaaaatagaagtgcctcatgatctagcctttctacttttggttatttatccaaaagaattaaagtcagaaactcaaagatatatcagcactgcagtgttcattgcagcactattcacaatagccaagttgtggaagcaatctaaatttccatcaatggatgactatataaagaaaatatgatacatgcattaaaaagactattattcagccttacgaaagaaggagacctaaatttccagcaatggatgactatataaagaaaatgtgatatgtgcattaaaaagaatattattcagccttacraaagaaggagacctaaatttccatcaatggatgactgtataaagaaaatgtgatatatacatgaaatagaacattattcaacctcacaaaaggaagagattctgcaatatgcaataatattgagaacactatcctaaatgaagtaagccagttaccaaagaacaaatactgcataattcaatgtatataaggtgtctaaaagagtaaaattcatagaatcagaaagcagaatgatgctgttcaggggttgcagcaaggggaaaattgggagttgctaatcaatgggcatagagtatcagttttgcaagatgaatgt

SEQ ID NO: 939689 - DNA, 598 bp, Homo sapiens
tgcccaaagcaatccacagatttgatactattcctatcaaactacaaaggtcatttgtcaacaaaattagaataaactattctaaaattcatatgaaactaccaaaaacctctaataggcaaggaaatcttaatcaaaaagaataaagccagaggcatgacattaccagacttcaaactatactttaagactacattaacccaaacagaatggtactggtacaaaaacacacatatagaccaatgaaacartagagagcccagaaataaagccacacacctacagccatctaatctttgacaaagttaacaaaaataagcaacaagaaaaagactcactattcaataaatggtgctatttattaataataaatagccatatttagaaaaataaaactggacccccacatttcatcatacacaaaaattaactcaagatggtttaaagatttaagagaactcttacaagattctacacaagacaataattcccaagacacataatcagatttgccaatgtcaaaatgaaagaaagaatagttaaaggcagctagacagaaagggccggttacctacaaagagagccctattaggctaac

SEQ ID NO: 939690 - DNA, 615 bp, Homo sapiens
ctcgtgatccacctgcctgggcctcccagagtgctgggattacaggtgtgagccaccacgccaggccgacagtaccttacaaaactaaacatactcttaccacatgtttcagcaattgcagtccttggtacttacccaaagagattgaaaacaaagatatgttcaacaaaaacttgcacacagatggttatagcagctttgtccataattgccaagacttggaagatgacttttaatagctaaatggataaataacctgtggtacattcagacaaccaaatattatgcagtgataaatagaaatgagctagcagagacatgtaaagacattgaggaaacttagatatawgttgttaagtgaaagaagtcaatccaaaaaggctacatactttaggacctctgggggaagggagggatgaataggtggagcagagaggatttttttgggtggtgaaagtattctgtatgatactgtaatgatggatatgtgtcattgtgtgtttctcataacctatagaatgtaaaatacaaagagtgttccctaatgtaaactacggtcttaataatagtgtattagtattggctcatcaattgtaacaaatgtaccaggagatg

SEQ ID NO: 939691 - DNA, 589 bp, Homo sapiens
ccaactcactctagctttttcttactaatcaatcctcattttatctttgtcctaatttcctttgtttaaacttagagtgcatccaaagtgacataaattgtctaacatttaaaatgatatggaatataaatatatggaaaagsctttttttcccctttccttttttttctttttcctttgagatggagtctcactctgtcacccaggctggagtgcaatggcgtgatctcggctaattgcaacttctgcctcctgggttcaagcgattctccagcctcagcctcctgagtagctgggattacaggcatgcgccaccactcccggctaattttgtatttttagtagagaaggagtttctccgtgttgaccaggctggtgtcgaactcccagcctcgggtaatccacccgccacggcctcccaaagtgctaggattacaggtgtgagccaccgcgcccagccagcatttgtacttcataaagttaaaaaaaaaaaaaagttatctgtttatctttgtgcttgtaatataaatgaaccagtggcactttggaatgccacatgcagaatgaatagaaaaagtttaaaatattg

SEQ ID NO: 939692 - DNA, 589 bp, Homo sapiens
ccaactcactctagctttttcttactaatcaatcctcattttatctttgtcctaatttcctttgtttaaacttagagtgcatccaaagtgacataaattgtctaacatttaaaatgatatggaatataaatatatggaaaagcctttttttcccctttccttttttttctttttcctttgagatggagtctcactctgtcacccaggctggagtgcaatggcgtgatctcggctaattgcaacttctgcctcctgggttcaagcgattctccagcctcagcctcctgagtagctgggatyacaggcatgcgccaccactcccggctaattttgtatttttagtagagaaggagtttctccgtgttgaccaggctggtgtcgaactcccagcctcgggtaatccacccgccacggcctcccaaagtgctaggattacaggtgtgagccaccgcgcccagccagcatttgtacttcataaagttaaaaaaaaaaaaaagttatctgtttatctttgtgcttgtaatataaatgaaccagtggcactttggaatgccacatgcagaatgaatagaaaaagtttaaaatattg

SEQ ID NO: 939693 - DNA, 617 bp, Homo sapiens
attgacaaaatttaacttcctttcatgataaaaactctcaccaaattaggtatagaaagaatgtacctcaacacaataagtgccatatatgagaagcctatcgctaacattatactcaaaatcgaatgcctttcccctaagatctggaacaagaccaggatgcccactcttgtcacttctattcaaaatagtactggaagtcattgccagagcaattaggcaagagaacgaattaaaaggcatccaaatagtacaggaagaaatgaaattgtcactgtttggtgatgacataatcttattctatagaatttcctgcagacttcagcaaaattgttagaactaataaatgaatacagtacatttgtagaatacaaaatcaacacacaataatcaatagcatttctatacactaggaaaagwctatccaaaaaaagaagacagcaatctcatttacaacagctaccaaaaaaatatatacttaggaataaatttaaccaaggaggtgaaagatctatatgctgaaatataagacctgatgaaataaactgaaaaaaacaaaaataaatgaaaagatatctcatgttcatatattgaaaacactaacattattaaaatgt

SEQ ID NO: 939694 - DNA, 634 bp, Homo sapiens
ctgtggttctgtaggcagaagagacaacaatgtcttcatttcagatgacatgcctgtatatccagaccatcaaagtaagcctactattagaattaaataagaaaattttattaaataggcagataaaagtgaatttacaaaattaatatctttgagctagtagtaaaaagttggaagctaaaaagttttatatttcattcatacattaaaaattataacatattggccrggtgcggtggctcatgcctgtaatcccagcactttgggaggccgaggcaggcagatcatgaggtcaggagatcgagaccatcctggctaacacggtgaaacctcgtctctacgaaaaatgcaaaaaattagccaggtgtggtggcgggtgcctgtagtccaagctactcgggaggctgaggcaggagaatggcgtgaacccggcaggcggagcttgcagtgagcagagatcacgccattgcacttcagcttgggcgacagagtgagactctgtctcaaaaaaacaaaaaaattataacgtatttagaaataaatatgttatttagcttgtcttttgtttatatatttttctataactgtcaattattattaacataaagcatgaataaatggagagatagctcat

SEQ ID NO: 939695 - DNA, 603 bp, Homo sapiens
agaggagaactaccaccaatgtgcggagcctggtagtggccccgaatgcctggacgcactgctatttattgtatacaaggcaagggggcagggtaaggagtgtgagtcatctcaaatgattgataaggtcaagcaagtcacatgtccacgtgacagggggcctttccctttgtggtagcggaagcagagagggaggacagcatacgtcagcatttcttctatgcacttatcagagagataaaagactttaatactttcactaattctgttactgctatcttttaagaacttaaaaggaggagccaggtgtacaggtgggatatgaaagtggacaaggagcgtgaccactgaagcacagcatcacagggagacgttcaagcctctggatgacwgtgggaaggcctggctaatgtcaggcctcccacaagagctggtggagcagagtgttctctgactccccccagggaaagggagactccttttcccagtctgctaaataacgggggccttcccaggcactggcactaccgctagaccaaggagccctcaagcggcccttatccgggcatacagaaggctcacactcttgtcttctggtcactt

SEQ ID NO: 939696 - DNA, 603 bp, Homo sapiens
agaggagaactaccaccaatgtgcggagcctggtagtggccccgaatgcctggacgcactgctatttattgtatacaaggcaagggggcagggtaaggagtgtgagtcatctcaaatgattgataaggtcaagcaagtcacatgtccacgtgacagggggcctttccctttgtggtagcggaagcagagagggaggacagcatacgtcagcatttcttctatgcacttatcagagagataaaagactttaatactttcactaattctgttactgctatcttttaagaacttaaaaggaggagccaggtgtacaggtgggatatgaaagtggacaaggagcgtgaccactgaagcacagcatcacagggagacgttcaagcctctggatgacagtgggmaggcctggctaatgtcaggcctcccacaagagctggtggagcagagtgttctctgactccccccagggaaagggagactccttttcccagtctgctaaataacgggggccttcccaggcactggcactaccgctagaccaaggagccctcaagcggcccttatccgggcatacagaaggctcacactcttgtcttctggtcactt

SEQ ID NO: 939697 - DNA, 589 bp, Homo sapiens
aagtcaggagttcaagaccagcctggccaacatgctgaaacctcatctctactcaaaatacaaaaattagccaggtgtggtggtgggcacctgtaatcccaagtaaggaggctgaggcaggagaatcgcttgaacctgggaggcggaggatacagtaagccaagatcgagccactgcactcccttgagcctgggaggtcaaggctgcagtaagctgagatcataccattgcactccagcctggatgaaagagtgagaccctgtcttaaaaaaaagaaaaaaggccgggtacggtggctcactcctgtaatcccagaactttgggagaccgaggtgggcgggtcacctgaggtcgggagtttgagaccagcctgaccaacatagtgaaaccccrtctctgttaaaaatacaaaattagccgagtgtggtggcgcatgcctgtaatcccagctactccggaggccgaggcaggagaattgcttgaacctgggaggcgaaggttatagtgagccgagaccatgccattgctctccagcctaggaaacaagagggaaactgtcaaaaaaaaaaaaaaagtgaggcaagtatgg

SEQ ID NO: 939698 - DNA, 706 bp, Homo sapiens
ctcctgtgtcttgtaagttatttaacatctaagttacagtggaaatagaaatggcattcaggtaatttgactaaagtgtgctcaacttttaaaattatgcttgtattttcagacatttaactgaaccctagttgattgtaaggagtagtctctacattttgagcatggtattttcaaaggaaaacacaggttgagcatccctaatatgaaaatctagtatttgaaactttttgaagaggaggagccaagatggctgaataggaacagctccggtctacagctcccagtgtgagcgaygcagaagatgggtgatttctgcatttccatctgaggtaccgggttcatctcactagggagtgccagacagtgggtgcaggtcagtgggtgtatgcaccatgcgcgagccgaagcagggcgaggcattgcctcactcaggaagcgcaaggggtcagggagttccctttcctagtcaaagaaaggggtgacagacggcacctggaaaatcgggtcactcccaccctaagactgcgcttttccaacgggcttaaaaaacggcgcaccaggagattatatcctgcacctggctcggagggtcctacacccacggagtcttgctgattgctagcacagcagtctgagatcaaactgcaagtcggcagcaaggctgggggaggggcacccaccattgcccaggcttgcttaggta

SEQ ID NO: 939699 - DNA, 634 bp, Homo sapiens
aatggcattcaggtaatttgactaaagtgtgctcaacttttaaaattatgcttgtattttcagacatttaactgaaccctagttgattgtaaggagtagtctctacattttgagcatggtattttcaaaggaaaacacaggttgagcatccctaatatgaaaatctagtatttgaaactttttgaagaggaggagccaagatggctgaataggaacagctccggtctacagctcccagtgtgagcgatgcagaagatgggtgatttctgcatttccatctgaggtaccgggttcatctcactagggagtgccagacagtgggtgcaggtcagtgggtgyatgcaccatgcgcgagccgaagcagggcgaggcattgcctcactcaggaagcgcaaggggtcagggagttccctttcctagtcaaagaaaggggtgacagacggcacctggaaaatcgggtcactcccaccctaagactgcgcttttccaacgggcttaaaaaacggcgcaccaggagattatatcctgcacctggctcggagggtcctacacccacggagtcttgctgattgctagcacagcagtctgagatcaaactgcaagtcggcagcaaggctgggggaggggcacccac

SEQ ID NO: 939700 - DNA, 537 bp, Homo sapiens
tgagtatcctatgattcaattcaattctgacactaggtacctggagacagcgtcagtcccacaagttaagggctcagtcccacaatactgtctcccaccactttagaggctgtttgcaatcccaggttatgacctgaacttctgaccaaccagctcttaattgggagttcccattaacccctaactcaggtttgattaatttgctagggtggctcacacaagtcagggaaacaatttacttatatttagtcataaaggaagttacgaagatacaggtgaacaaccagatgaagagatagatatacagattgaggtgtaagtgaaggggagggcagagtttccatgccctgtctgggygtgctacccaccagacaggtccacgtgttcagcaagccaagagctcttcaaaccccatagttcaggggtttttattaaggcttcatcatgtaggcatgagcaattattacctcattctccctgagggtcggaactgaacattccaagcttttagctgtggtttggtccttctggcaatca

SEQ ID NO: 939701 - DNA, 772 bp, Homo sapiens
tatcctatgattcaattcaattctgacactaggtacctggagacagcgtcagtcccacaagttaagggctcagtcccacaatactgtctcccaccactttagaggctgtttgcaatcccaggttatgacctgaacttctgaccaaccagctcttaattgggagttcccattaacccctaactcaggtttgattaatttgctagggtggctcacacaagtcagggaaacaatttacttatatttagtcataaaggaagttacgaagatacaggtgaacaaccagatgaagagatagatatacagattgaggtgtaagtgaaggggagggcagagtttccatgccctgtctgggcgtgctacccaccagacaggtccacgtgttcagcaagccaagagctcttcaaaccccatagttcaggggtttttattaaggcttcatcatgtaggcatgagcaattattacctcattctccctgagggtcggaactgaacattccaagcttttagctgtggtttggtccttctggcaatcatctcccattcaagaacccaccaagagttgcctcattagaacaaaagacactcttgtyacccaaggaattccaagggattaggagctctgtgtcaggaacccagatcagagaccaaatattaaaacaagagatgtacctaacacctagcacccctgttgctcaggaaattccaagggttttaggagctctgtgccagaaactgcaagcagagaacaaatatgtatttctgattatatcac

SEQ ID NO: 939702 - DNA, 629 bp, Homo sapiens
gtttatagggcaaagtgactcttttttttttttttttttttttttttttggagacagggtcttattctgtcacccaggctgagtgcagtggcacaatcatgactcactgaagccccgatctccttggctcaagcaatcttcccagttcagcctcccaagtggctgggaccacaggcatggatcaccatgcccagctagtttttgatttttttcccgcagacagggtctccccttattcctcaggcaagtcttgaactccaggctcaagtaatcctcctgcctyggcctcccaaagtgttgggattacaagcatgagccactgcacctggacagggcaaagtgattcttattgagtgaggcaaatgaaaggagaatcaagtttcatgtctttgtaaaatggtgctgtctttggtttacttattattgcaagtagtactgattatccagaaatagaaaatataggcaatgcttaatcatttttatctagtttacattaaattttgaactttccttaaaacccccaaaataagtcattttctaatgttgtgcccatcaaaggtgatgtctaaaagtaccttggtcacataaacattctcctcaacactatgaattgagcggttgtttttatc

SEQ ID NO: 939703 - DNA, 634 bp, Homo sapiens
gcccaggctggagtgcagtggcatgatctcggttcactgcaacctccgcctcccagattcaagcgattctcctgtctctgcctcccaagtagctgggattacaggcatgcaccaccatgcctggctaatttttgtattttttgtagagatggggtttcaccgtgttggccaggctggtcttgaactcctgacctcaggtgattcacctgccttggcttcccaaagtgctgaggttacagccgtgagccaccacacccggcatatatatatacatatatgttttttttttttagactctcgctctgtcgcccaggttggagtgcggtggcatgatctctgttcactgcaagctccacctcccgggttcaggccattctcctgcctcagcctccagagtagctggractacaggcacccaccaccatgcccagctaattttttgtatttttagtagagacggggtttcaccgtgttagccaggatggtctcgatttcctgacctcgtgatccgcccgtctcggcttcccaaagtgctgggattacaggcatgagccaccgcgcccgtccagtctttaaatattttgtaaagacagggtctcactatgttgcctagactggtcttggacccctgggt

SEQ ID NO: 939704 - DNA, 594 bp, Homo sapiens
ctactaccctcatcttttcactcaagtttctaattcagcaacagacatagatggagagcaactgagccctcttaccaaaaaccagcactaacttgacaactgtgtgtgtgtatgagccaccttggaagtctattctccaaccccaggcaagacttcaaatgactcttcccccaggtgacatattgctgactaccttaggagagacctcaaggcagaactgtttggttaagctacttcctgatcttcagagactgkgagataataaatgatggttgatttaagcctctaaatattagagtaatttgccgtatagcaataagtaactatacacctaggtatcaattatttagagtaatcaagtactccaaaaacaagtagtaaaagcttcagaggccgagcgcagtggctcacgtctgtaatcccagcactttgggaggctgaggcaggtggatcacaaggttaggagtttgagaccagcctggctaagatggtgaaaccccatctctactacaaatacaaaaatttgctgggcatggtggcacgtgcctgtaatcccagctacttgggaggctgaggcaggagaatctcttgaac

SEQ ID NO: 939705 - DNA, 631 bp, Homo sapiens
ccatttggatccccccagacacctataactcagcatgctaaaaattcattagtcattactttctctgattgattccttttcattgattcttaatctcattgaaaaacatcaccatgcacccagttgcccaagtctgaaatcaggacattgtccttgcttcttttcaccctttcaaatcctctatctaatcagtaattttatataataaaaggattcttgattccttctacactttttctttcccacttccatgacagtagtccaggccaccattatctttcatggggattgatgcaagagcttctcacctagtctcccttcccctagtgttgtgtccttctgacctaacctctgccacccagcagaagtatctttcaaagttcatatttgatgatgctactctccagcttcaaaccctttacctgttttccttggactataagataaagttcaacttccttaatttagcttagagagtcttttatgatrtgacctcctcttacttctctggccttgtctctcataattgtgtcattccattgctgaccactccagcaactacctgccattccttggatgtaccaagctctgtctgtgtcccgttctttggatctactgtcccttctccaag

SEQ ID NO: 939706 - DNA, 603 bp, Homo sapiens
tggttttttgaaaagattaacaaaatagatagaccactagctggactaacgaataaaagagagaagaatcaaatagacacaataaaaaatgataaaggggagttcaccactgatcccacagaaatacaaactaccatcagagtatactataaacacctctatgcaaataaactagaaaatctagaagaaatggataaatttctggacacatacaccctcccaagactaaaccaggaagaagttgaatccctgaatagaccaataacaagttctgaaattgaggcagtaattaatagcctaccaaccaaaagaaagtccaggaccrgaccgattcacagccaaattctaccagaggtacaaagaggagctggtaccattccttctgaaactatttcaatcaatagaaaaagagggactcctctttaactcattttatgaggccagcatcatccagataccaaaacccagcagagacgaaaaaaaaaaaaaaaagaaagaaaatttcaggccaatatcgctgatgaacattgatgcaaaaatcctctataaaatactggcaaactgaatccagcagcacatcaaaaagcttatccaccacgatca

SEQ ID NO: 939707 - DNA, 647 bp, Homo sapiens
tgggcagagatttggttgccttctctgtgctgtgcaagcaggagtggttgctcaggtttggggaggatctgctactctctgtgcctagattcactcccatggcagtgtgagcacaagggcaggatgctggtggggatggggctgcctggctgtatcccagccaaggctccgtctgcaatggtggtgtgcaggggaggggaacagatgaactgcactcctgcacgctggaagggcaaggaaagcaaaacctgtccatgtgaccatgtgctagcaaaatgatgtggggagatgccatgggcctgggggaagctgcagtgcagggaagaattacgcaggctggtgtgtagccacaggggccaccttgctggagctctgtgctggtcaggcatagtcaaccaattcagttgctatgatgtggcacccggggttgtcctgcaaacacawgtggcctggctggaaccccaggagaggccaccagaccaagtagtgctcaggtcagaccaaccccatctgatggacaagactgccctgcagagggtccaacagttcacctagggctaaagtcacttatgggagcaagtcaagcctaaggggacagccttccctggctgtgctccactacagatggtcccacaccaaaccctctg

SEQ ID NO: 939708 - DNA, 647 bp, Homo sapiens
tgggcagagatttggttgccttctctgtgctgtgcaagcaggagtggttgctcaggtttggggaggatctgctactctctgtgcctagattcactcccatggcagtgtgagcacaagggcaggatgctggtggggatggggctgcctggctgtatcccagccaaggctccgtctgcaatggtggtgtgcaggggaggggaacagatgaactgcactcctgcacgctggaagggcaaggaaagcaaaacctgtccatgtgaccatgtgctagcaaaatgatgtggggagatgccatgggcctgggggaagctgcagtgcagggaagaattacgcaggctggtgtgtagccacaggggccaccttgctggagctctgtgctggtcaggcatagtcaaccaattcagttgctatgatgtggcacccggggttgtcctgcaaacacatgtrgcctggctggaaccccaggagaggccaccagaccaagtagtgctcaggtcagaccaaccccatctgatggacaagactgccctgcagagggtccaacagttcacctagggctaaagtcacttatgggagcaagtcaagcctaaggggacagccttccctggctgtgctccactacagatggtcccacaccaaaccctctg

SEQ ID NO: 939709 - DNA, 611 bp, Homo sapiens
cccaactttgcctcttattggaaacttactaagctctgttccctaaatttctcatttataaaataaagttcatgataggaccttgtaagtgtattataattaaatattaacatcaatttaatgctcataatttagccaacttaagtttggatcacagctccaccttgggctcataacttagrctgtctgagtatcagtttatcttcagcagaatggagataacagtatctattttttagtaatgttgttttgatgacataagatagcagtgtaaaatgccttgatcatagctaactctgaaggaatgttaacttctttgcccatccctgttaattacaggtttttccaaaataatgcagtagggcgtatgcctttcggaaactatattgccttttagagggcaatttcaatggacaacaacttttagacccaaggaatttactgtaatggttgaatagcaggcaatgaagactaaattttgggatagagagctatgctcctataatcacaatctacaagtagatatttctctaatgctaaaatgttgccttactttccacatatttccagaagccctgatctctacatttctgaatctaaaaagatccatg

SEQ ID NO: 939710 - DNA, 596 bp, Homo sapiens
ctgggaagaacattcactttttaagtaaatataaggatgagaatttacagagtaaggaaatggggtcgaaggagggcagatgagtgtataaatgttagttccagaatatgaaggaacgggttggagataatgcattctttggaaatagcaaatgctgttgaagcttttcaaaaaaggaaataaatcataaaagaatttggaatgctttttatgggttgaagtagaagaaaattgaacatcaatatgattctggaaagaaattttgtgtcactgcattatttaaatgttaggggaaaatgatcaaagcagccaacattcaaaaaggaataatctctttggaaaacttaatacacacatatctgcaaatatttaggggacaaggaaagactatggaggaaattttgtgtctatatagttagacattttctgatctagacctacccggaggcayatgctgaaaaccttcaatgtttaagctcagttcttccctgaaccatttcaaaccaaatctgagcattcttttagaagtcccattctctctagtaggtggagtcttgaattttttttcacattctaatattggtatctgatatgcc

SEQ ID NO: 939711 - DNA, 631 bp, Homo sapiens
cagcgacctagccatgactctggatctggttatccctctgctctcaggggcgcaggaagcccctgcccctgaaggcttggaagtgcctgctttcactgtctcacctctccccactcttggcacctactctggtgtggagcaaagttgtggtcgagcctgggcactcttgtgacccaactgggtgtgtgagtgcttgagatggcactgacatgccaactccctgccacctcagcttcctctggactttgggtgcccgggagcaaaggagggaggcctgcaggttcccctcagcacaaatgacctgggcatcattgatagcatgttgatggtgygaggcagacaggttcctgcatggaaagaggcaggtctccagtaaaaccccaccttcaagccagggatggcctgaagcctggaggccaggctgccaatttcaagtagagttgctgaccaggagtgagaacttatggtcttctcccaggcctgcccatggctgcccattgaccaatcagcacacacctcctctcttttgagcccataaatacccttgactcagccagactcacacagacatcaggactaccagctacaggaaggagctatccattttatatctcctcaactcatcaagatg

SEQ ID NO: 939712 - DNA, 649 bp, Homo sapiens
acaacatgtttgtgttttgtgttactgtaagagtcaaacgtttaaaaaaattaaaagtttataaagtaaaaaaaatacagttactaaggttaatttatttctgaagaaagaaaagtactttttcagtttagtgtagcctaagtgtatggtgttyatagagtttacagaagtgtacagtcatgccctaggccttcatattcactcacctctcactgacttacccagagcaacttctagtcttgcaagctccattcatgttaagtgcactgtacaagggtactactttttaaatctgttatgacatatttttagcgtaggttttctatgtttagagtcacaaaatcgtaccattgtgttacaattgcttacactattcagtacagtaatttgcaatatagtctataaaatatagtccctacaataaagctaggggtatagtatattccatttaggtttgtgtaagtacactccatgatgtttgctcaaaaacagaattgcatggtgatgtatttctcagaatgcattcctgtcattaagcaattcatgactatacatggagattatattcaaggatattaaaaagaacaagataaataattttgataattaaaagctacaaaaagaacatgaaaatgtaaaatatagttta

SEQ ID NO: 939713 - DNA, 604 bp, Homo sapiens
aaaatggtttattcctttccctccataaaccatccctcttagttattagacattttcatactgatgtttagttaatttctaattttcttaattaggatgcatttcatctcttgcaaaaatattataacgtttatagttaacatttttaaaaatttagaggggcctaagatttaagttttaatagttgacgcttgaatttcaaaaacatttgtttctcaaaatgtagataattcttccaatggaattattccaaagaatcgttcaccatcttttttttgtattcttacagyaacactaaccccactctggaaaaattataaaatcactcatggggtagtttaatactcttgttcttctttcttgaattatttctgcaacactttcctctgtccaacttatgtattttgttctgtggtgatttgaagtagctcagctatcttctgggttaaaagactttctacgcgtaggacccaccactttaataagggctgtaattttggacttagagagtcatatctgattactgccatggcaactgccttgtgaaagggttgaagagaattcaggcttcatgagagagtaatagaaaggaagtttgctgagg

SEQ ID NO: 939714 - DNA, 435 bp, Homo sapiens
gaccttgacaaaaacagatttggtgatgtggtgggcaaacacctgatagtaggagagggttgagacagcaagtatagacagctctttagggagtaattttgctgcaaagagaacagaaaaatgggatagtggctactaggggaaaagaaatcaatatatgggttaattaattaattaattaattwatttattttttagacagagtcttgctccgtcacccaggctggagtgcagtggtgagatcttggctcactgcaacctctgcctcctgggttcaaccaattctcctgccttagcctcccaggtagctaggattacaggtgtgtgctaccacgcctggctaatttttgtattttagtagagacggggttttaccttgttggccaatctggtctcaaacttcagacctcaggtcatcaggccgccttggcctcc

SEQ ID NO: 939715 - DNA, 586 bp, Homo sapiens
cagagagccaaatcttgagtgaactcccattcacgattgcttcaaagagaataaaatacctaggaatccaacttacaagggacgtgaaggacctcttcaaggagaactacaaaccactgctcaatgatataaaagaggatacaaaccaatggaagaacattccatgctcatgggtaggaagaatcaatatcgtgaaaatggccatactgcccaaggtaatttatagattcaatgccatccccatcaagctatcgatgactttcttcacagaattggaaaaaactactttaaagttcatatggaaccaaaaaagaacccgcatcaccaagtcaatcctaagccaaaagaacaaagctggaagcatcacgctacctgacytcaaactatactacaaggctacagtaaccaaaacagcatggtactggtaccaaaacagagatatagatcaatggaacagaacagagccctcagaaataatgccgcttatctacaactatctgatctttgacaaacctgagaaaaacaagcaatggggaaaggattccctatttaataaatggtgctgggaaaactggctagccatatg

SEQ ID NO: 939716 - DNA, 586 bp, Homo sapiens
ttttggttacatggatacgttctttagcggtgatttctgagattttggtgcacccattacctgagcagtgtgcactgtacctactgtgcagacctttgtccctcagcccctccacccttccccttgagtccctaaagtccattatttcattcttatgcctttgcatcctcatrgcttagctcctacttataaatgagaacatatgatgtttggttttccattcctgagttacttcacttataataattgtctctagctccatccaagttgctgcaaaagacattatttcattcctttttatggctgagtagtgtgctatggtgtatatagaccacattttctttatgcactcattggttgatgggcacttaggttggtttcatatctttgcagttgtgaattgtgctgttataagcatacatgtgcaaatgtctttttcatagaaggactttttttccctttgggtacacacccagtagtgggattgctggattgaatggtagttctacttttggttcttcaaggaatctccacactgttttccgcagtggttgtactagtttacattcccaccagcagcgtaaaa

SEQ ID NO: 939717 - DNA, 573 bp, Homo sapiens
taaatctttttacctctttctttaatctcttcaagtgtgtgggtcaggggctccgtagagttaagagagagcattgagctgccaggtgtaggggtagtcaattagagcaaggaggagccatgatgaaagttagcagtgaagtctttaatcacttatggtgataatgtgagcaacaagctaaaaccggagcaggtgctactcctctctgttctattttcccccatggacttgtgcgcaggtcaggtggatcrgtgcagacctagggattgttccactgctgagggagcccccaaaaaaggttgcagcaaatttatggatcctgtggtaagggaaggaagagagctagaagtggaaaagtactgggctaagtcagagtagggcaacatgtcttcaaggttttctcttcttgccacctccccccatgcagccccaccagagcagaggtctcagcagagacacctcaaaagggcatcagccagcgtcttcagataaagagacttaggatgaaggctctggggctaggaatataaatatgcaaaaaacacgaccagccaggggttcctgagtccttga

SEQ ID NO: 939718 - DNA, 576 bp, Homo sapiens
atttttatcgatgagtaatgatgctgtatctcattgtggttttaacttgcatttctctaatgaccagtgatgttgatgttgagcatatttttatggactaatttgacacctgaaagttttctttgctgaaatatctgttcaaatagattgctaatttcttttaaaaagtgttgtttgctttcytattgttgagttttgaggtttgaggtattctatacggtttttgtcagatttttttttgcaaataaattatcctgtcagtaactcaaaataaaaacatgaacaaaaacaaaaataaatgactgagattttgatttaagttgcaatgaatgactagctttgcggaattcgcatcttcacaatttaaagtcttcctatccataaacacagcaccttttcacttatttaagtcttctttgatttcttatatcagtgttttacagggtacagcatattgattctgcaatatattttgagagatttaaaactactttatacttttatgttattttgaatcatatttaaaattttatgtcccaattgttcattcttagcatatataatatatacagtaat

SEQ ID NO: 939719 - DNA, 576 bp, Homo sapiens
atttttatcgatgagtaatgatgctgtatctcattgtggttttaacttgcatttctctaatgaccagtgatgttgatgttgagcatatttttatggactaatttgacacctgaaagttttctttgctgaaatatctgttcaaatagattgctaatttcttttaaaaagtgttgtttgctttcttattgttgagttttgaggtttgaggtattctatacggtttttgtcagatttttttttgcaaataaattatcctgtcagtaactcaaaataaaaacatgaacaaaaacaaaaataaatgactgagattttgatttaagttgcaatgaatgactagctttgcggaattcgyatcttcacaatttaaagtcttcctatccataaacacagcaccttttcacttatttaagtcttctttgatttcttatatcagtgttttacagggtacagcatattgattctgcaatatattttgagagatttaaaactactttatacttttatgttattttgaatcatatttaaaattttatgtcccaattgttcattcttagcatatataatatatacagtaat

SEQ ID NO: 939720 - DNA, 753 bp, Homo sapiens
tgtgcagggacctgctgggtgatgcatgtccatctgatccaataagacagaccaccagcctccttctcacagaagatccccaaatgctcaatctcaactccagcccctttcactgcagtaagggacccatcctacctgggcagaggcctacaggcaaggatccctctcttgggccaaaaggatagtcttctgcactcagttccttggccagcattcccacatagccctattactctccttggatcttccccagatccatctgggacagatggccacatcaacttctgagcatttgtgagacttgtgggcaagatagggcttggaacatcctctagtgctgagacatcttcacctgtgaatgactcagggaacaccatagtcagtcagcttagaatccctggaaggccctctgaagaaggacaagcacaaagaaaaccaccctttgaagaataaaataattacctaattcctcaatgcacagacattrttgctctttcacaagcaccaagaacattcaggaaaatatggctgcaccaaacagacaagacgccagagatcaaccctaaagggatggagaggtgtgacctctcagacaaataactcaaaatagctgttttaaggatgatcagtgaaattcaagagacagagagttcattcaaaaatttatcagagaaattaaatagagaaattaaaataatttttaaaaatcaaccttggagctgaaacatataatgaataaagtgaaaaatgtaa

SEQ ID NO: 939721 - DNA, 626 bp, Homo sapiens
tgctctgttgctcaggctggagtgtagtggcaccatcccggctcactgccagctccgcctcccgggttcacaccattcttctgcctcagcctcccgagtagctgggactacagacgcctgccaccatgcccggctaattttttgtatttttagtagagacggggtttcagartgttagccaggatggtcgatctcctgacctcgtgatctgcccgcctcggcctcccaaagtgctgggataacaggcgtgagccaccgtgcctggccaagtcttaccattttcttaattgcccataatgtaggataaatggatggatttggccttcagattattttaaaaatagccctatttctgtgctacttaatttaacaagtggattaaacatctcggatgcagggggaaaataagaatattgaagaaacagggccaagaaaaagcgatggatgctaaactctacatcagtttttggagtttagatgggaatatggaaatgtttctcagaaagtctgagaggggtggaaagaaggaagagagaaaccctacagaatgtctcataccctgggattttgacctgtagagcatttacgtattttctaattagaataaacagtgataccattcccta

SEQ ID NO: 939722 - DNA, 626 bp, Homo sapiens
tgctctgttgctcaggctggagtgtagtggcaccatcccggctcactgccagctccgcctcccgggttcacaccattcttctgcctcagcctcccgagtagctgggactacagacgcctgccaccatgcccggctaattttttgtatttttagtagagacggggtttcagaatgttagccaggatggtcgatctcctgacctcgtgatctgcccgcctcggcctcccaaagtgctgggawaacaggcgtgagccaccgtgcctggccaagtcttaccattttcttaattgcccataatgtaggataaatggatggatttggccttcagattattttaaaaatagccctatttctgtgctacttaatttaacaagtggattaaacatctcggatgcagggggaaaataagaatattgaagaaacagggccaagaaaaagcgatggatgctaaactctacatcagtttttggagtttagatgggaatatggaaatgtttctcagaaagtctgagaggggtggaaagaaggaagagagaaaccctacagaatgtctcataccctgggattttgacctgtagagcatttacgtattttctaattagaataaacagtgataccattcccta

SEQ ID NO: 939723 - DNA, 599 bp, Homo sapiens
gaggtacaggcattgggtaaatacacgcattctaaacgggagaaattagcccaaacaaaggggttacagaccccgtgcaagtcagaaacccagcagggcggtcattaaatcttaaagctccaaaatgatctcctttgactccatgtgtcacatccrggccacactgatgcaaggggtgggctccaaaggccttgggcatctccacccctatgaagttgagtgcctgcagcttttctaggttcatggtgcaagctgtcagtggatctaccattctggggtctgcaggatggtggccttcttctcacagctccactaggcagtgccccagttgagactctgtgtggggcctccaatcccacatttcccatccatactgttctagtagaggttctccatgaggtctctgttcctgcaacagacttctgccttgatttccaagcatttccgtacatcctctgaaatctaggcagagcctcccaagcttcaactcctgccctctgtgcacccagaggcttaacactatgtggaagcctccaaggctcatggcttgcaccttctggagcagatgcctgagacatatctggagcccttttagccat

SEQ ID NO: 939724 - DNA, 602 bp, Homo sapiens
agctctgctttagggctataagtacttggcatggtttggatgtttgacttctcaaaatctcatgttgaaatgtaattcctggctgggtgctgtggcttatgcttgtaatctcagcattttgggaggctgaggtggaatgatcacttgatgccaggattttgagaacagcctgggcaacatagcaagacctcatatctgcaaaaaawttttaaaaattagccgggtatggtggcatgtgcctgtagttccagctactcaggaggctgccgcaggaggactgcttgaacccgggaggttgaggcttcagtgagctgtgatcatgccactgcactccaactcggcaacagagcaagactgatatggtttggctgtgtccccacccaaatcttatcttgaattgtaactcccacagttcccacgtgtcgtgggaagaacctggtgggaggtaattgaatcatgggggcaggtctttcccatgctgctctcatgatagggaataagtctcaagagatccaatggttttcaaaataggagtctccttgtacatgctgtctcttctctttgcctgcagccattcatgtaagatatgaattgctgctcct

SEQ ID NO: 939725 - DNA, 570 bp, Homo sapiens
ggaagcaaagtggtctagctcagcagatgccagccccaaggagcccactgacttgtgggctaagttccactgacttgaaattcttgctgccagcacagcagtctgaagtcaacctgggacactggggcttggtcaggggaagggcatccaccatcactgaggcttgagtaggtggttttcctctcacaatgtaaacaaagctgctgggaagttcgaatcgggaggaccccactgcaacttggcaaagttgttgtagccagactgcctccctagagtcctcctctccaggcagggcatttatggaagaaaggcagcagccccagtcaggaacttacagataaaacttccatctccytaggacagagcacccagaggaaggggcgtctgtgagcacagcttcagcagactttaacattcctgcctgccacctctgaagagagcagcagatctcccagcagaccacttgagctctgctaagggacagactgcctcctcaagttggtccctgacctccatgcctcctgttggggagacacctgccagcaggggtcaacagacacctcatacagg

SEQ ID NO: 939726 - DNA, 856 bp, Homo sapiens
catctttggcacctccagtctccattaccctgatttgctttctttccatagcgcttatcactttcaaacatactttgaaacaaacgttgccgatttactacacttactgcatatcatctctctaaaaactagatttcttaagggcaacaaactgtgttctctttgttcattgatataccccaagtacctagaactctgcctggtacatagtaggtgtttaatcgatatttttgaatgaatgaatcaactatttcagtaaggaaaatcattgccctctccatgatggaaaggatccaatgcaaataatccacaaccacagagtacacaggcccctgaggagctgactctccatcagaggctcaggtttggcctctgtgtatgtcaattgggcacttagcagtggtcagactggcctgggtgagtacatccttatgttactgaatccttccataaactctgcaccttccaccaaggccgcttcattaatgagccctttgagcaattgctggagtaactggagaaagaggctgcctgacattcagccagagcagatgatcacagcctcctgattcctgagatcttcctcagtaaggccttgggtgagtattctcataagacacaaatattctcatactctggatycattcaaagaggtccaacaatatgattcttgcctaatcttgcagttttattctctccaaattcctgaccatacagctccaaacactagccactgctcatgaatcagagtaaagcctcacctctggacatctcatcttccaggcaaagtggaccactgggaatacccatctttgtcacaatcctccagggattcctgaatgtggttgaggtgctg

SEQ ID NO: 939727 - DNA, 583 bp, Homo sapiens
tccatgatggaaaggatccaatgcaaataatccacaaccacagagtacacaggcccctgaggagctgactctccatcagaggctcaggtttggcctctgtgtatgtcaattgggcacttagcagtggtcagactggcctgggtgagtacatccttatgttactgaatccttccataaactctgcaccttccaccaaggccgcttcattaatgagccctttgagcaattgctggagtaactggagaaagaggctgcctgacattcagccagagcagatgatcacagcctcctgattcctgagatcttcctcagtaaggccttgggtgagtattctcataagacacaaatattctcatactctggattcattcaaagaggtccaayaatatgattcttgcctaatcttgcagttttattctctccaaattcctgaccatacagctccaaacactagccactgctcatgaatcagagtaaagcctcacctctggacatctcatcttccaggcaaagtggaccactgggaatacccatctttgtcacaatcctccagggattcctgaatgtggttgaggtgctgcaa

SEQ ID NO: 939728 - DNA, 856 bp, Homo sapiens
catctttggcacctccagtctccattaccctgatttgctttctttccatagcgcttatcactttcaaacatactttgaaacaaacgttgccgatttactacacttactgcatatcatctctctaaaaactagatttcttaagggcaacaaactgtgttctctttgttcattgatataccccaagtacctagaactctgcctggtacatagtaggtgtttaatcgatatttttgaatgaatgaatcaactatttcagtaaggaaaatcattgccctctccatgatggaaaggatccaatgcaaataatccacaaccacagagtacacaggcccctgaggagctgactctccatcagaggctcaggtttggcctctgtgtatgtcaattgggcacttagcagtggtcagactggcctgggtgagtacatccttatgttactgaatccttccataaactctgcaccttccaccaaggccgcttcattaatgagccctttgagcaattgctggagtaactggagaaagaggctgcctgacattcagccagagcagatgatcacagcctcctgattcctgagatcttcctcagtaaggccttgggtgagtattctcataagacacaaatattctcatactctggattcattcaaagaggtccaacaatatgattcttgcctaatcttgcagttttattctytccaaattcctgaccatacagctccaaacactagccactgctcatgaatcagagtaaagcctcacctctggacatctcatcttccaggcaaagtggaccactgggaatacccatctttgtcacaatcctccagggattcctgaatgtggttgaggtgctg

SEQ ID NO: 939729 - DNA, 632 bp, Homo sapiens
tcctgctcaaatattgtgcttttcccacagtcttcacaactggcagaccaggagattcccccatgcctggcttggtgggtcccacatccacggacccttgtttgctgctagtgcagtagtctgagattgacctgggatgctggagcttggtggggggaagagtgtctgccattgctgaggcttgagcaggtggttttatgctcactgtgtaaacaaagccacagggaagctmaaactgggtggagcccaccgcagctcaacaaggcctactgcctctctagattccacctctgtgtgcagggcatatctgaacaaaaggcagcagaaagcttcttcagacttaaacatccctgcctgacagctctgaagagagcagtggttctcccagcatgacattcaagctccaataacagacaggctgcctcctcaagtgggtccctgacccccgtgtagcctgactgggaggcacctcccagtaggggctgacagacacctcatgtaggcaggtgcccctctgggaagaattttaaagaagaaggatcaggcagcaatatttgctgttttgcagcctctgctggtaatacccaggcaaacagggtctggagaggacctccagcaaactccaacagacc

SEQ ID NO: 939730 - DNA, 695 bp, Homo sapiens
attttagggatattttaacttcctttttgtttctttcctttagttttagggaaggatcttctgccaaactacctgtgccactgtctttcctggaagtctcataagtactagaaagaacttttagaataagagtgtaggacattatttacactgaaataacattctttttgttttttttttttttttttttttttttttttggagtcagattgtcattctgtcacccaggctggagtgcaggagcgccatcttggctcactgcaacttctgcctcttgagttcagccaatcctcccgcctcagccacctgagcagctaggactacaggtgcatgccaacatgcccagctaatgattttttgtatttttagtagagatggggtttcaccattttgttgaggctggtgtcaaactcctgacctcaagtgatctgcccmccttggcctcccaaagtgctgggattgcaggcatgaggcgctgcatcagttctgcaaaaaaaaaaaaaaaaagcgtatgcattaaaaatactaagggggccaggcgcggtagctcacgcctgtgatgccagcactttgggaagccgaagcggatggatcacttgaggtcaggagttctagaccagtctggccaacatagtgaaaccccatctccgctaaaaaaaaatacaacaattacctgcgcatggtggcacacgcct

SEQ ID NO: 939731 - DNA, 575 bp, Homo sapiens
agctggaaggatgacttgggctggggaggttgggaggttgaggctacagtgagctatgatgacatcattacattccagcctgggtgacagagtgagagcctgtctcaaacaaaaaccaaccaacaaacaaaaatacccaactaaaagggttgttttggagattaaataaacaaygtatggaaactgcttagaagaaagtctggcacacaagataccccttacaaatattagtttctttccttccaaaagattttatttgggatattaggagatattgataatatttgatcaggaagacatagcatgccctgttacattttttagagtgtttaacaaaacgaagagaagtctgagactgagtgttaacctcctggttttctgctgctgggtatactttatgccaagcacagaatgagagcctgtgtgaattaagcttctttcccaagatgatgaagtgtagaacactttggtggagaacagaagagcctgcacagcctcacccctgtgtttatagtgttttgaggggtagaaataagcatttcagtagtctttctgtggcatctgctccaggacaa

SEQ ID NO: 939732 - DNA, 619 bp, Homo sapiens
agagtattcacgatctggccctagcctacctcacgaaccttacctctttccacatcatccattttctatgccccacagtccaatcgggccaaattattttcatgatctctggacacatcccacttcttccttcttcatatctttgttcaggctgctctttctgtctggaatgttcttggtgactgtgtctacctgaccaacaaagcttgtctttgaagactyagctcaagagttttctatgaagtctttccaagctgctactgtaagtaagaagaatcttttattttattttttttaagagacggcatctaattttgttgcccaagctggagtgcagtggtgtgagcatagttcactgcagcctcaaactcttaggctcaactgatcctcccacctcagcctcccaagtagctacaggcacgtgccaccaagcctggctagttttatttatttatttatttttatagatacagggtctcaatatgttgcccaggttggtctcaaactcctagtttcaggtgattctcccaccttggcctcccaatgtgctgggattacaggcatgagccaccgcacccaaccagaagaatcatttctcatttagtgctgccctcacatc

SEQ ID NO: 939733 - DNA, 619 bp, Homo sapiens
agagtattcacgatctggccctagcctacctcacgaaccttacctctttccacatcatccattttctatgccccacagtccaatcgggccaaattattttcatgatctctggacacatcccacttcttccttcttcatatctttgttcaggctgctctttctgtctggaatgttcttggtgactgtgtctacctgaccaacaaagcttgtctttgaagactcagctcaagagttttctatgaagtctttccaagctgctactgtaagtaagaagaatcttttattttattttttttaagagacggcatctaattttgttgcccaagctggagtgcagtggtgtgagcatagttcactgcagcctcaaactcttrggctcaactgatcctcccacctcagcctcccaagtagctacaggcacgtgccaccaagcctggctagttttatttatttatttatttttatagatacagggtctcaatatgttgcccaggttggtctcaaactcctagtttcaggtgattctcccaccttggcctcccaatgtgctgggattacaggcatgagccaccgcacccaaccagaagaatcatttctcatttagtgctgccctcacatc

SEQ ID NO: 939734 - DNA, 636 bp, Homo sapiens
actgtaagtaagaagaatcttttattttattttttttaagagacggcatctaattttgttgcccaagctggagtgcagtggtgtgagcatagttcactgcagcctcaaactcttaggctcaactgatcctcccacctcagcctcccaagtagctacaggcacgtgccaccaagcctggctagttttatttatttatttatttttatagatacagggtctcaatatgttgcccaggttggtctcaaactcctagtttcaggtgattctcccaccttggcctcccaatgtgctgggattacaggcatgagccacygcacccaaccagaagaatcatttctcatttagtgctgccctcacatctgtacaatcttctggtatgatatatacgtattgtgctttctggtttacatgtctgtcattccttttatgctgaagatgagagaagatgccacattcattcttgtgttgtatttatatttgtattgccagttggttccatgttaggctctgccaaaggaagtgctagaatgaggctgcaagactggaggagaaagaagagacatgcttctttttggcttctggtctacctcccgttcctgtgagcatcactctagcaatgcttctttgccttcctgc

SEQ ID NO: 939735 - DNA, 836 bp, Homo sapiens
cccagggggtacccatctaccaccgctcaggtctccactggagcccatcctcacatcatagctgtcacagtgtaccacaacccatgttgtggccacatggctgacgtggaagctgcggggacaaaaagctcactcactctgggatcctgttcatgacactgattgtcatggcaagwgtcagctttcagcccaagctgaggtctgaggagagtgggtggaccagtggcaggtagctggaaaaacagtcaaggaatcatagagttttgacatggtttttactctctctctgggcatgatcgagccgtgggcccaaacaagctgtggacacaagccgtatgtacaatgtcagcagggtagttagaccttttacgtcaatagtggctctgagccaagctcaagctcacgtgggtgatcacctaatgtgcctcaagtggagtggttacataatgagcctcacatgacgtggttacataacgtgtggagttgtgcacctgcactccaaactttctgagtcatgctggaccagatgtctgccttggcctattcttgactgcagcacatccattttccttacgggagtgtattgtatgttagggacatggtattataagctaggtttttttcttcctttgtgattctcctgatgttttgtgtgttttaagttaatttgccactggaagaatatagtggttcatggcacagtcaatatgtaaggcaattccttctggaacccacttgctcaagagatttaattccccacagatggggctggggcattggcattttaaaaatgctcctcaggtgattgcaatgtgcagccaaggttgaatacatca

SEQ ID NO: 939736 - DNA, 626 bp, Homo sapiens
tgaaggaataatcccagaaagaagagagctagagaacgggagccaattctgtggataaagtccatgcaaacaccttttgataggtaacccattcatgtatgagacaagcattaaacactttagttgaagggaaataaactgaactgagatttaggcttctgaccaagagatagaatttggagtttgaatccaaccaagttacttccttgcattaaatacaaattcaaagtctccataatataaaattcacaatgttcaggatgaaacaacaaaaaaaatttgacttataagtaaacagaaaaatgtaacccactctcaaagaaaagacagccagcagaaartgcctctaagatgatccagatgcagaaagagcagacaaaaattttaaagcagttatttacatatgcccaaagacataaaggaggatataattgtaatggattaaaagatgggaatattaagggaaatagaaactatccaaagaagaaaaggaaattctaagacataaaaaagaaaatatctgaaataatttatagaattatagaatgggcattttaatagaatgagatgaaaggaaaacagtgaacttgtaatgggtcaaaatgatccaatataaaaaaaaattt

SEQ ID NO: 939737 - DNA, 588 bp, Homo sapiens
tttgcctggcaattgattagcttgtatctatagtgcgacaaactctaaaaggtgccagtcacagaaaagaaataatgaaactattaaaactgccacaatttgaacattattgttattatcacaaatgctgtagtatcatatgtgttgattcagttattatatatacccattgataaggcacattcttttatttaatctgacataatctaatcttccagaagtcaaactagtctaactgtaaatctgttttggaagtaggtggaatgtaaatcctatacaaatwatagtaatattttaaaaaacaagtactttgatacttcttatatgttactacactggagtgttagatgagtttgacttagggaaaaaagtgaataataaaaaaccccattctttattttcaaattgtcttttctcccatatttatccattttatttttataaaggtacaaacttttccctgcaaaatagttggaaaattttttgagagcttttgcctgtactattgagcactcaagcttttacagacagtgctacaaagagtaggaactttaaagatttccattcttctaaaatacatgaatcact

SEQ ID NO: 939738 - DNA, 571 bp, Homo sapiens
caggcaaacttctagacacggtgaagatagagaatattaaaaatgtagaaaaatgtagagtgtctagggcctttgaggtacttgcaatttatttaggagacaggtcataaaatatggaaaatttgaatagcgcacaagctattaggttggtgcaattacttttgcaccagcctaataattataacatgactcaacagtaggaggaatacaactagtgagtataggcattcactagttaattgccaaatggaagatgctgtcagttactgctttgctttgactcaactttgaactaacagaaaaacaggctgaattaaccatcatatctatccagccctttttratggctagaacacaggcacagtagacaaaagtacatgttaaagaatgatgttatgtgcacttgtctattctggtactccgtaaatgatgctgtttttaggctgataaccctaacttctcaacccagctctggagtccctataacaacaagatcccactggttgcattaaaaaaaaatctccttagaatccaagtccaaattttagggaggtcacgtcatgattctttt

SEQ ID NO: 939739 - DNA, 620 bp, Homo sapiens
agatgatcgagcttggcccagtgcaatcacaagaggacttgaaagtggacaagaggggcataagagggagtcagagaaagagaagtggtgacagaagcagagtcagggcgttgctatatgagaaagcttagaagayggaggaaggggccataagccaagaaatgtgggtggccaccagaaactggaaaaggcaaggaaacaattgctacccagtgcctactaaaaggaatacatctctgcccataccttgactttagtccattgagactcatgtcagatttctgacctatataaatgtaagattacaaatttgtattgtttaaaccactatgtttggggtaatttgttatggcagcaatagaaaactaacacaaatggtatgcagacccctgaaagtcttcaagtccctttctgtgaggtcaaaacaatatttataattataaaaaaaagtttctcttacttttttaccttgatgatattttcagtggttgcaaaagcaatggtgaataaaactgatggcactgtagtagaaataaaagcactagcacctaactatactagtaattattgtattcttcatcataatgcactcatagaaaaaaaatccagtttcacttaag

SEQ ID NO: 939740 - DNA, 688 bp, Homo sapiens
aaggagttcaagaccagcctggccaacacggtgaaaccctgtctctactaaaaatacaacaattagctgggcatggtggcggacgtatgtagtcctagctacttgggaggctgaggcaggagaatcgcttgaacccaagaggcagaagttgcagtgagctcagatcgcaccactgcactccaacctgggcgacaagagtgagactctgtctcaaaaaatcaaacaggctgggcgcggtggctcatgcctgtaatcccagcactttgggaggccgaagtgggcagatcacctgaggtcgagagttcgagaccagcttgaccaacatggtgaaaccccgtctctactaaaaatacaaaattagccaggcatggtggcgcgtgcctgtaatcccagctacttggaaggctgaggcaggagaatcgcttgaacctgggaggyggaggttgaggtgagccaaaatcgcgccattgcactccagcctgggcaacaagagtgaaactccatctcaaaacaaacaaacaaaaacaaacaaacaaacaaaaaccctattactgactcagcacttactatgcgtcaagcacccagctaagtattttagacataacctcattttgtcttcataacatgcctatgtagtttatcctcatccccgtttaacagatgatgaaatggaggatcagaggagatc

SEQ ID NO: 939741 - DNA, 444 bp, Homo sapiens
ctgctaccacggcgcgggggagcagtaccgcggcacggtcagcaagacccgcaagggtgtccagtgccagcgcgcgtccgctgagacgccgcacaagccgcagtgaatccctggtgctcccggccccgccagggccctaaccctggggcggcatgctttgatgtctgggaccagagcctggaaatggttgagactaccctgccacgacttcgctcccgctcccgcctcggttcacgtttacctccgaaccgcatgcacaactggaggagaacttctgccagacccagatrgggatagctatgggccctggtgctacacgatggacccaaggaccccattcgactactgtgccctgcgacgctgcggtgagcactagtgacgcttgccccatgaccctgcctcagcccccaccaccaaaggctggctcccttaaccccagtgaac

SEQ ID NO: 939742 - DNA, 444 bp, Homo sapiens
ctgctaccacggcgcgggggagcagtaccgcggcacggtcagcaagacccgcaagggtgtccagtgccagcgcgcgtccgctgagacgccgcacaagccgcagtgaatccctggtgctcccggccccgccagggccctaaccctggggcggcatgctttgatgtctgggaccagagcctggaaatggttgagactaccctgccacgacttcgctcccgctcccgcctcggttcacgtttacctccgaaccgcatgcacaactggaggagaacttctgccagacccagatggggatagcyatgggccctggtgctacacgatggacccaaggaccccattcgactactgtgccctgcgacgctgcggtgagcactagtgacgcttgccccatgaccctgcctcagcccccaccaccaaaggctggctcccttaaccccagtgaac

SEQ ID NO: 939743 - DNA, 669 bp, Homo sapiens
cacttaacagatcctctgttccaaccatttaaatttacaaagaagaaactaaggcacagaactacttgagaagagaagcagaattgaaaactagagctcctgattgttctcaaaataatttttatcatactgcatcgggttctaagtgagagggcttcttatttagtaatgccaaggtcatgtgttaacatgtaaaaaaattagacgaggaatggggcattggtgtaagattatacagagtgtaaagttgggctttctcttatcatctgttgtcaacaacaggatgattgttactgttacccastccttaccatcattcacacagagacattggatattgaggagagactttaaaacagaatattagtaatgcagagctataaagagccacgatcatattaatacaatcctccatacacatagtgacctgtctgcagctccagcctagagaaacccagttattcatttgtagtgggcagccccattatcagaaagcgctattcaattggaagtgctcatctgtgttaggtcaaaaacgacttcctctaaatatccattctgtgtattgaagtataaatgagtcccacttaagaaaaacaaaacaaaccaacttccaatgatttaaaaatactaacgtgaccctcttacgtttacctaaagctagtgttt

SEQ ID NO: 939744 - DNA, 808 bp, Homo sapiens
tgagctttcaattcattgtattttaagtataagctatacttactaaccttcaccttattctttgctacttaaataagcttgctttcatagttcaattgacgtattgtttaactgatatttttaattggtatattttgatatatattgataattgatagctatataattcatttgagatattttgggtatggagggttggaaggaatcctttcataatttttctacttaaaagaaatcttttttcatttaacagcttttcccatggggatagagttttcatgaataaatcaaagtcattaaatgaggtatatggtacatcttttaagagtcacagaaagaagcaacaacaatttacccaggcagagagtataagtttagaccttggttgcctgatttgtgggacaagttctttaattttttttctttatatttkgacttttttttggactctctcctccccttccaggctccaggtcaaatacttgacacctgaatgatgttcaattatttaaaagatggattggccagctcagctcctgtctcagacagactgtctttaaatgtattttcaacatgtcttcagacagttatttttcctctgttcaattttgttcatcttcttacttaaccgttcaagtgctcctatttcctttttaaatgtagtattgagaagtgcaaacattattggaaaagagagtctcactagcataattgtgcattatcttcctcttatatcgccggcctccctgcacccccatgcccacctcctcctcgcgcctccatgccgcctcccactgctccagctcct

SEQ ID NO: 939745 - DNA, 757 bp, Homo sapiens
tacttactaaccttcaccttattctttgctacttaaataagcttgctttcatagttcaattgacgtattgtttaactgatatttttaattggtatattttgatatatattgataattgatagctatataattcatttgagatattttgggtatggagggttggaaggaatcctttcataatttttctacttaaaagaaatcttttttcatttaacagcttttcccatggggatagagttttcatgaataaatcaaagtcattaaatgaggtatatggtacatcttttaagagtcacagaaagaagcaacaacaatttacccaggcagagagtataagtttagaccttggttgcctgatttgtgggacaagttctttaattttttttctttatattttgacttttttttggactctctcctccccttccaggctccaggtcaaatacttgacacctgaatgatgttcaattatttaaaagatggattggccagctcagctcctgtctcagacagactgtctttaaatgtattttcaacatgtcttcagacagttatttttcctctgttcaattttgttcatcttcttacttaaccgttcaagtgctmctatttcctttttaaatgtagtattgagaagtgcaaacattattggaaaagagagtctcactagcataattgtgcattatcttcctcttatatcgccggcctccctgcacccccatgcccacctcctcctcgcgcctccatgccgcctccc

SEQ ID NO: 939746 - DNA, 680 bp, Homo sapiens
ggttgggatggaggagagttaggactggctgtgaggaatgaagggggtcaggggttgccagaggagctggagagaagaacacagatttggggacattaatgaggccaagccaggcaatgcaaagggcaagaagagcaagggggaggtcacagttcagatccctggggackggacaggcgggcaggcagagcccacaggcaaatagcagcccacccggggagcccaagggcaggtgcctgcctcagcagttgtccctagcaactctgtgagaagcagacagagctgcccacttcttttttttttttttttttagacagagtctcgctctgtcacccaggctggagtgcagtggcgtgattttggctcactgcaacctctgcctcccaggttgaagcgattcttctgccttaccctcccaagtatctgggactacaggcgcgtgccaccatgcccagctaattttttgtgattttaggagagatagggtttcactgtgttagctaggatggtctcgatctcctgacctcgtgatccgcccacctcagcctcccaaagtgctgggattacaggcatgagtcagcacgcccggccaagccaccccttctttaagagcttcaccatagctcatgcctggaatcccagcactttcggaaagagctttaccgccccctgatggagaa

SEQ ID NO: 939747 - DNA, 611 bp, Homo sapiens
tggaagagggattggggttgggatggaggagagttaggactggctgtgaggaatgaagggggtcaggggttgccagaggagctggagagaagaacacagatttggggacattaatgaggccaagccaggcaatgcaaagggcaagaagagcaagggggaggtcacagttcagatccctggggactggacaggcgggcaggcagagcccacaggcaaatagcagcccacccggggagcccaagggcaggtgcctgcctcagcagttgtccctagcaactctgtgagaagcagacagagctgcccacttcttttttttttttttttttagacagagtctcgctctgtcacccaggctggagtgcagtggcgtgattttggctcactgcaacctctgcctcccaggttgaagcgattcttctgccttaccctcccaagtatctgggactacaggcgygtgccaccatgcccagctaattttttgtgattttaggagagatagggtttcactgtgttagctaggatggtctcgatctcctgacctcgtgatccgcccacctcagcctcccaaagtgctgggattacaggcatgagtcagcacgcccggccaagcc

SEQ ID NO: 939748 - DNA, 754 bp, Homo sapiens
atggctcactcctgtaatcccagcactttgggaagctggggcaggtggatcaccttaggtaaggagttcaagaccagcctggccaacacggtgaaaccctgtctctactaaaaatacaacaattagctgggcatggtggcggacgtatgtagtcctagctacttgggaggctgaggcaggagaatcgcttgaacccaagaggcagaagttgcagtgagctcagatcgcaccactgcactccaacctgggcgacaagagtgagactctgtctcaaaaaatcaaacaggctgggcgcrgtggctcatgcctgtaatcccagcactttgggaggccgaagtgggcagatcacctgaggtcgagagttcgagaccagcttgaccaacatggtgaaaccccgtctctactaaaaatacaaaattagccaggcatggtggcgcgtgcctgtaatcccagctacttggaaggctgaggcaggagaatcgcttgaacctgggaggcggaggttgaggtgagccaaaatcgcgccattgcactccagcctgggcaacaagagtgaaactccatctcaaaacaaacaaacaaaaacaaacaaacaaacaaaaaccctattactgactcagcacttactatgcgtcaagcacccagctaagtattttagacataacctcattttgtcttcataacatgcctatgtagtttatcctcatccccgtttaacagatgatgaaatggaggatcagaggagatcagcagc

SEQ ID NO: 939749 - DNA, 557 bp, Homo sapiens
tataggaatgcagctttatttctgggttctttcttctgttccattggtctatgtgtctgtttttgtaccagtaccatgctgttttgcttactgtagccttacaatatagtttgaagccaggtaatgtgatgcttctggctttgttcttttttcttgggattactttgcctatttgggctctttattactttattacttccatatgaattttagaatagttttttctgattctgtgaaaaatgccattggtagcttcatagaaatagcattgaatctgtagattgctttggggagtttgaccattttattattcttccaatccaygatcatggaatgtttttccatttgtttctgtcatctatgatttatttcagcagcgttttgtagttttctttgtagagaccttttacttccttggttagaggtgaaaccaaggggtgtgtgtgtgtgtgtgtgtactgtaaattaggctatgttcttcatttggctctcagcttgaatattattggtgtaaagatatggtactgatttttgtacattgattttgtatcctgaca

SEQ ID NO: 939750 - DNA, 691 bp, Homo sapiens
ctagctcccatttataaatgagaatatgcaatatatggttttctgttcctgcattaatttgcttaaaattatggcctccaactgcatccatgttgttgcaaaggacatttcactgttttttatggctgcatagtattccatgatgcatatgtaccacattttctttatccagtccactgttgatgggtacctaggttgatttgatgtctctgctattgtgaataatgctgcgatgaatatatgagggtatgtgtttttttggtagaacaatttgttttcttttcattatrtacccagtaatgggattgctgggttgaatgctagctctgttttaattaaagtggagcagtatgacatacttttaaagagatagagaaggatatttgtcagtggctttaatgcctacccccaaaagtatatgcttcccatagggagtgtaccaatttatactcccactagtaatgtcttaagagtggttttctctttcctaacccatcagtaatgtatcaaacttttggattttcacttatctgctaggctctttttgctatcctgtttaggtgaaatgcttccaacatatagaattatttatatttcaaaaattctcagagactttatatttgctgtttcccatgcttagaatgctctttctcttaattcacttagctaacttttcattcacatcttttaa

SEQ ID NO: 939751 - DNA, 691 bp, Homo sapiens
ctagctcccatttataaatgagaatatgcaatatatggttttctgttcctgcattaatttgcttaaaattatggcctccaactgcatccatgttgttgcaaaggacatttcactgttttttatggctgcatagtattccatgatgcatatgtaccacattttctttatccagtccactgttgatgggtacctaggttgatttgatgtctctgctattgtgaataatgctgcgatgaatatatgagggtatgtgtttttttggtagaacaatttgttttcttttcattatgtacccagtaatgggattgctgggttgaatgctagctctgttttaattaaagtggagcagtatgacatacttttaaagagatagagaaggatatttgtcartggctttaatgcctacccccaaaagtatatgcttcccatagggagtgtaccaatttatactcccactagtaatgtcttaagagtggttttctctttcctaacccatcagtaatgtatcaaacttttggattttcacttatctgctaggctctttttgctatcctgtttaggtgaaatgcttccaacatatagaattatttatatttcaaaaattctcagagactttatatttgctgtttcccatgcttagaatgctctttctcttaattcacttagctaacttttcattcacatcttttaa

SEQ ID NO: 939752 - DNA, 560 bp, Homo sapiens
catggattcccagcgcctcccagagcctgtctccgagggatactctaatcacttgagggcctttgcacgacataaatcagaccgactatctctagagtggagagggggataaactcacttgtagcaagtgaaggccagaggctgccctgggatggcattgcctgttcccaggggcttgtggtggtgcagcagacatggggacccctgggccccttcccctccttgctggggatgccacacagacccacgttcagggacctgaattcagagcctgccccaggggtggcgaatgtatctgggacactgagsacccccctaccgggtgcatctcatggccttttggtctttttttttgagacggagtctcactttgttgcccaggctggagtgtcatggggcgatctccgctcactaccacctccgcctcccgggttcaagcaattctcctgtctcagcctccgagtagctgggattacaggtatgtgccaccacgccagctaatttttctatttttaatagagatagggtttcaccatgttggtcaggctggtcttgaactc

SEQ ID NO: 939753 - DNA, 743 bp, Homo sapiens
ctttctgggtcaagtggggacttggggaactttcttgtctaacgaggattgtaaaacacaccaatcagcactctgtaaaatgcaccaatcagcaggattctaaaagtagccaatcgcagagaggcttttaaaaaggacactctgataggatggaaatgcaacatgggaggggacaataagggaataaaagctggccaccccagccagcagtggcaacccattcaggtcaccttacaggctgtggaagctttgtcttttagctcttcacagtaagccttgctactgctcactctcgggtccatgccatctttaagagctgtaacactcacttggaaggtctgcagctccattcttgaagtcagcgagaccacgaacccaccagcaggaaccaactccagacacaatatgggcctgacacctatgaagacaggaaagaaagaaggatttgttaggaggagcctagagccacacagagctctgaggaaaccttgaccagtgtggkggggacccccaaacaacgatttctcatgaaagtttagctgtattgggcaggcatgtctcagctagcacctccaccatggtcagtcattgtataggagctgccctggaatgctggggaatgtgccttgacctgaatagggtggaagattccaaagaagtggccagtgggtgctctcaggtgagtacactcctcataatgggttttctcttgaaaggaggtttaagggacacacttccatgac

SEQ ID NO: 939754 - DNA, 506 bp, Homo sapiens
ggtctcgctgacttcaagaatgacgccgtggaccttcatggtgagtgttacagctcagacccaaagagtgagtagcagcaagagctattgtgaaaagcaaaagaacaaagcttccacagcatggaaggggaccccagygggttgctgctgctggctgggggtgcccagcttttattcccttatttgtccccgcccatgtcctgctgattggtccattttacagagggctgactggtccattttacagagtactaattggtccattttacagagtgctgattggtgcgcttacaattctttagctagacacagagcactgattggtgcgtttttacagagtgctgattgctgcatttacaatcttttagctagacacagagcactgattggtgcgtttttacagagtgctgctgctgcatttataattctttagctggacacagatcactggtgtgtttacaatcctctagctagacagaaaggttctccaagtccccactcgaccc

SEQ ID NO: 939755 - DNA, 481 bp, Homo sapiens
agtgttggaatctatttttttaaattcagtttgagatcttcccggcacttggaatgagtagtgatttttttaatggaaacctagatattttcatattacatgatgacactttagatcttatttaagctttctgttttaggtagctttctctgacactggtatggcatgggaaacaggaacatcactttgttacttccaggtagaggtagaagtccaagttccccactcagagtctgttaacacctgaggggtggggacggggcttcttatttcttctaggtaggagtgggtgttttgtctcctatgtggtatttacagagactgytgtgagagtggccctattaacaacaggagatgggaaaatatttaggtctcttctaggccccctgtgataccacctgagtggggaggtagccatgtgccttgttactaacagatgagggttaaagtccaggcactgaaggtggtctccactgtcacc

SEQ ID NO: 939756 - DNA, 629 bp, Homo sapiens
caaggcttggagcttgcatcctctgaagcaatggcccaagctgtcccttggccccttttagtcatagctggagtggctggggtgtagggcaccaagtcctgaggctgcacacaggaggtgggccctggacctggcccatgaaaccatttttccctcctagacctcccgacctatgataataggggctgctgagaaggtctctgacatgamctggagacattttccccattgtgttggtgtattagtctgttttcaggctgctgataaagacatacctgagactgggaagaaaaagaggtttaatttgacttacagttctacagggctggggaggcctcagaatcatggcgggaggcaaaaagcacttcttatatggtggcagcaagagaaaatgaggaagaagcaaaaacagaaactcctgaaaaaacccatcagatcttgtaagacttattcactatcacaagaatagcacagaaaagactggcccccatgatttaattacctccctttgggtccctcccacaacatatgggaattctggaagatacaattcaagttgagattttggtggggacacagacaaaccatatcattcggtgatcaatatttggatccctgttacttatgga

SEQ ID NO: 939757 - DNA, 588 bp, Homo sapiens
tagaacttccagtactatgttgaatagaaatggtgacagtgggcatccttgtcttgtctcagttctcaagaggactgcttccagcttttccccattccatatgatgctggttgtgggtttgtcagaaacggctcttaatattttgaggtatgtttcttcaatgcctagtttgttgagggtttttaacatgaagggawgttgaattttatcaaaagtgttatcttcatccattgtgatgatcatgtggtgtttgtttttagttgtatttaaaatgtgataaatcacgttgatttgcttgcatacgttgaacctaacttgcaactcagaaataaagcctacttgatcctggtggattagcttttggatgtgctactggatttggtttgctagtattttcctgaggatttttgcatctatgttcaccaggagtattgccctaacattttctttcttcattgtttctctgccaggttttggtatcagaatgatgttggcctaatagaatgagttagggaggagtccttcttccttgactttttgtaatagtttcagtagaattgataccagctcttttttgtacaactggta

SEQ ID NO: 939758 - DNA, 536 bp, Homo sapiens
acctctaccttctgcgttcaagcaattctcctgcctcagcctcttaagtagctgggattacaggtgtgcgccaccatgcccagaccatgcccggctaatttttgtatttttagtagagactaaagttggccaggctggtcttgaaatcctgacctcaagtgatctgcctgcctcggcctctcaaactgctcggattataggtgtgagccactgcgcccagcctaatatgatttttagagctgactagcacataaaccctaaaattcctgttccctggaaggcagagaccaagagaaggtacagccacatggttaaaggtcaagctcccgctgggcacagtggctcaggcctctgtaatcccagcactttgggaggctsaggtgggtggatcacctgaagtcaggcgtttgagaccaggttggccaacgtgctgagaccctgtctctactaaaaatacaaaaaattagctgggcgtggtggtgcatgcctgtaattctggttgctcgggaggctgaggtagaagaatggcttgaacc

SEQ ID NO: 939759 - DNA, 536 bp, Homo sapiens
acctctaccttctgcgttcaagcaattctcctgcctcagcctcttaagtagctgggattacaggtgtgcgccaccatgcccagaccatgcccggctaatttttgtatttttagtagagactaaagttggccaggctggtcttgaaatcctgacctcaagtgatctgcctgcctcggcctctcaaactgctcggattataggtgtgagccactgcgcccagcctaatatgatttttagagctgactagcacataaaccctaaaattcctgttccctggaaggcagagaccaagagaaggtacagccacatggttaaaggtcaagctcccgctgggcacagtggctcaggcctctgtaatcccagcactttgggaggctgaggygggtggatcacctgaagtcaggcgtttgagaccaggttggccaacgtgctgagaccctgtctctactaaaaatacaaaaaattagctgggcgtggtggtgcatgcctgtaattctggttgctcgggaggctgaggtagaagaatggcttgaacc

SEQ ID NO: 939760 - DNA, 592 bp, Homo sapiens
actttctgtctctatagatttgcctataatgacatttcatataaatggaattacaaaatatgtggcatttgtgttaacttatttcacttagcataatgttttcaaggttcatccacgttgtagcatatatcagtacttcctttcttttttatggacaaataatattccaatttgtggatgtaacacattttatcattcatcagttgatggacatttcagttgtttctacttttgactattatgaataatggtgccatgaacattgtgtacaagtttttgtggggatgtatgttttcatttctcttggatytacacctagaagtggaattgctgggtcatttggtaactctacgtttaacattttgagaaactgccaagccattttctggtttgcatcaatggatataccatttacattcccaccagcaaggtatgagggttccagtttctccacatccttgcaaacacttgttattttccattttagaagagattataaccatcttagtgggtgtgacatggtgtctcattgtggttttgatgtgcatttctctaatgaataatgatgttgaacatgtgttcatgtgcttat

SEQ ID NO: 939761 - DNA, 575 bp, Homo sapiens
catctcaagactgtcctccacaatattcatcagtttttttttacaattaaattctgctccttgttgcttctaatgcttcttaaaattctcataacattattcatttccagtcattattatattaactatgcctggtttcttttatctcagtttcttttctcatatattttattttttagatttagaatccagattttatttaacctccatgaaatacaaaatgggtattacaatttacctttatttcctacagcaattctttttagagatgatattctttctttgcttgcattccttgtttgtttcctttatgtttcagaaagttttcataggttccatatgcattttatgccttcyatgacctggtattcgcttacagcatgggtgagttcttcttgagtcccctcattgttttatctagatgctgttagattcttcaccttggatattcatctggaagactggatgataacattttatatgaccagcctagggacaagcagccaagggattaggaaaccatttggtggtgtgggcctttcttgtttaaatggtttcttcatgagtttgtcaaa

SEQ ID NO: 939762 - DNA, 662 bp, Homo sapiens
ggactcaggcatctctgcactctcaagggcccaggaaggcccccctatgccgctgcaggctcagaagtgcttgttcccactgtctggtctctccccgctctctgcacccactttgatctcagagcaaagttgaggctgagcccrtgtgctgttgcaacatggccaggtgtgtgcaaactgggggcagcactgtcacaccagccccctgcctcctcgaccccctccagacttcgggcaccagtaagcatgacagcgaagctgaccggggcattgagggcagttcacgctggccttcaagcgtcccttagcacaaagtaatagttataggaggcagacagtctcccaggcagaaaagggcaggtccctggtgaagctctaccttcaggtcggggaaggcctgaagcctgggggtcgggctcccagtcccacagactggagtgggaatttatagtcctttatctgggcttctcatagccaccagatgaaccaatcagcatgcacttcctcccctctgaagcccataaaaccccgaacacaggagactggagagacgccatgacaacctgccagcagagaggagctacccactccagggtctcctctctgctgaaagctgaacactcctcaagacaccttggtggggcgaaagagctgtaacacaa

SEQ ID NO: 939763 - DNA, 662 bp, Homo sapiens
ggactcaggcatctctgcactctcaagggcccaggaaggcccccctatgccgctgcaggctcagaagtgcttgttcccactgtctggtctctccccgctctctgcacccactttgatctcagagcaaagttgaggctgagcccgtgtgctgttgcaacatggccaggtgtgtgcaaactgggggcagyactgtcacaccagccccctgcctcctcgaccccctccagacttcgggcaccagtaagcatgacagcgaagctgaccggggcattgagggcagttcacgctggccttcaagcgtcccttagcacaaagtaatagttataggaggcagacagtctcccaggcagaaaagggcaggtccctggtgaagctctaccttcaggtcggggaaggcctgaagcctgggggtcgggctcccagtcccacagactggagtgggaatttatagtcctttatctgggcttctcatagccaccagatgaaccaatcagcatgcacttcctcccctctgaagcccataaaaccccgaacacaggagactggagagacgccatgacaacctgccagcagagaggagctacccactccagggtctcctctctgctgaaagctgaacactcctcaagacaccttggtggggcgaaagagctgtaacacaa

SEQ ID NO: 939764 - DNA, 571 bp, Homo sapiens
aggcagatcacttgaggtcaggagttcgagaccagcctggccaacatggcaataccccatctctactaaaaacacaaaaattagccgggtgtggtggcacacgcctataatcccacctacttgggaggctgaggcatgagaatcgtttgaactggcaaggcggatgtagcagtgagccgaggtcacgccactgcactccagcctgggtgacagagcaagactccttctgaaaaaagaaacaaaaaaacttytcattgacttttctgcccagccatgctgtcacccctaaccacatagtagagttagacaggtcctgctacatgttaagtcacttaacatgtttctgttagagctataagacatctgagaaatggaatcgaatgtctattttatagacctagaattacatgaggaataaaagcccagcatagaaaaaaatatccaaaaaagcaaaaattaaaatcattttaatttcatcacacagatcttgattaatattttaatgtagatccttccatatttttatgcttatatgtaataaaataatatgcatgctatttttaaaccttct

SEQ ID NO: 939765 - DNA, 592 bp, Homo sapiens
ttttgacatcctcactcaaatggccaacactcatcctaacctggactcttcattcccaccataatttgccccaccctcaggtttcccatcccagtcgatggctactccatctttctgcgtacttggactacaaacttggaatctttccctactattctttttctttctttttttatttttattttttatttttttattttattttattattattatactttaagttttagggtacatgtgcacaacgtgcaggttagttacatatgtatrcatgtgccatgctggtgtgctgcacccatcaactcgtcatttagcattaggtatatctcctaatgctatccctcccccctccctctttttctttcactgcctatatctggaaattctgttggctattccttaagaatatttccagtttctgaccacatcttacgacctccattgccactaacctggtttactctgataacctctgaataagtccctgtttcttttttccattccatttttttctcaacatctattctcaaaacagaaaccagagctatcctttttaaatgaaaggcaggtcatatcattcctctgtgaaaaa

SEQ ID NO: 939766 - DNA, 629 bp, Homo sapiens
gaagacgcccccaaatccacactcgcgcagacgtcgcctggcacggaccctacccccttcggtccgtcggcggttctcttgggtcgtccttcctgccactccgactctccccgcccccgccccgcccagcaggctgcggttcctttaaaggcgcgctggtgtggggcggccccttctctcggggctggctcgggagtagcgcagtcgccaaagccgccgctgccaaagctgccgccactagccgggcatggccatggcgtccccggccatcgggcagcgcccgtacccgctactmttggaccccgagccgccgcgctatctacagagcctgagcggccccgagctaccgccgccgccccccgaccggtcctcgcgcctctgtgtcccggcgcccctctccactgcgcccggggcgcgcgaggggcgcagcgcccggagggctgcccgggggaacctggagcccccgccccgggcctcccgacccgctcgcccgctccggcctggtctgcagcagagactgcggcggcggcctggagcgccccgaccccgcgacgtgcggagcatcttcgagcagccgcaggatcccagagtcccggcggagcgaggcgaggggcactgcttcgccgagt

SEQ ID NO: 939767 - DNA, 631 bp, Homo sapiens
taacctcaaattaccagctttttacatgggcctggctggtgacagaggctcaaccagttggcatcagccagcctctgtctgcaaactatatgtgggatcaacagcaaaggctcttcttaccagtgctaatcaaactgctgttaatttcaaatatttaattttctagcaactgagatcagtgatgagttcccagaatggaaccatccattgaggagaccaatcagtacccttaaattctatgaaattgtttgagttgtgtatgctgtcatttcagcaaagaactcatcctaaggactgataaactggactccagcaaatattgttctggatataaacgtggtaatcctyaggattgtcaatagccagagcaacatgtagaaagttggtaattcatgtttactgacaatgttctctttttctcttttagattatttagccaagctatctgtcactgcccatgagtttgtatgtacactaaccattggccacttctcttcccactctgcctgaaactttgcccatatcagtaatctttccaatttgctgtctttcaaagctatccctgtttggggatgatttggaacagccgtaattttttggtttatctacatagtaagccaactcatccttt

SEQ ID NO: 939768 - DNA, 638 bp, Homo sapiens
acctaagggtaggcctccaaagagaatcacaggtttaggtcaacagaagcaaaggcacataggagacagggagggggctgggcgcggtggctcatgcctgtaattccagcactttgggaggccgaggcaggcggatcacaaggtcaggagatcaagaccatcctggctaacacggtgaaaccccgtctctactaaaaacacaaaaaaaattagccgggtgtggtggtgggtgcctgtagtcccagctattcaggaggctgaggcaggagaatggcatgaacctgggaggcagagcttgcagtgagccgagatcgsgctactgcactccagcctgggcaacagagcaagcctcccatctcaaaaagaaaaagaagaagaagacagggaggggatgtacagaaaggaaaaattatgctagaggctctaggcagagctggcaccataatttctgttgtcatgacaaaatttgatattcctaggatgcgtattataacagtttactgaaaaacacaattcagtacagcaaggctcttgctagcccccttcatgtagcttgaattcccaagtttcttatcaaaacctgatgaccattgtgttgttttttattgttttcagttgttgctcctttcattttaaat

SEQ ID NO: 939769 - DNA, 617 bp, Homo sapiens
tattcaagagctcttttcatcttgcaaaactgaaattctgtacccattacactctaactcttctttcttccctcccccaacccttaaaaaccaccatttcactttctgtctctgtgtttcttttttttctctaggtgtcttatataagtggaatcatggagtatttgtcttttcgtcactaccctactctgcacaatagacatataaatatgtcctcaaatataaaaatgtcctcaaagtacacacatgttgtaacatgtgtcagaattggctttttaaggctgaataatattccattttatgtrtataccacattacataatggattatatgtaccacatatccattcattcatggatacacatgtagattgcttccatattttgctattgcaaataatgttgttattaacatgggcttacaactatatctcttcaagtctctgccttcagttacttacccagaaacgtaattgatggatcacatagtaattccatttttagtttcctatagaacctccatactgttttctacagtgactgtaccattgtacattcttaccaacgtgcacaagagttcctatttctttgcctcttcaccaacacttgatattttgt

SEQ ID NO: 939770 - DNA, 617 bp, Homo sapiens
tattcaagagctcttttcatcttgcaaaactgaaattctgtacccattacactctaactcttctttcttccctcccccaacccttaaaaaccaccatttcactttctgtctctgtgtttcttttttttctctaggtgtcttatataagtggaatcatggagtatttgtcttttcgtcactaccctactctgcacaatagacatataaatatgtcctcaaatataaaaatgtcctcaaagtacacacatgttgtaacatgtgtcagaattggctttttaaggctgaataatattccattttatgtatataccacattacataatggattatatgtaccacatatccattcattcatggatacacatgtagattgcttccatattttgctattgcaaataatgttgttattaacatgggcttacaactatatctcttcaagtctctgccttcarttacttacccagaaacgtaattgatggatcacatagtaattccatttttagtttcctatagaacctccatactgttttctacagtgactgtaccattgtacattcttaccaacgtgcacaagagttcctatttctttgcctcttcaccaacacttgatattttgt

SEQ ID NO: 939771 - DNA, 678 bp, Homo sapiens
cagctgaatgatttgttctctttgtgtttttgttgttcaaaccaaagtgagaccatttgatacacagtgaatggctacgcacaagcatttaagacccttgagagaatacagtgtaccaggcagactactatgatgactatcagaaggataataccaagacactgaaggatgaaagggtgggttgcccctscacacctgtgggtgtttctcgtcaggtggaaggagacacttgagaaaagaaagagacacagagacaaagtatagagaaagaaaagtgggcccaggggaccggcgctcagcatacagaggatccgctccagcaccagtctctgagttccctcagtatttattgatcattatctctaccatcttggagagggggatgtggcaggacaatagggtaatagtggagagagggtcagcaggaaaacgtgaacaaatgtctctgcatcataaacaaggtaaaggaaaaggtgctgtgcttttgatgtgcacgtacgtaaacatctcaatgccttaaagagccagcatgtctcacctccagccctaaggcagttttctgctatctcagtagatggaatatacaatcgagttttacactgagacattccattgccaagggaggagcaggagacagatgccttcctcttacctcaactgcaaagaggctttcctctt

SEQ ID NO: 939772 - DNA, 678 bp, Homo sapiens
cagctgaatgatttgttctctttgtgtttttgttgttcaaaccaaagtgagaccatttgatacacagtgaatggctacgcacaagcatttaagacccttgagagaatacagtgtaccaggcagactactatgatgactatcagaaggataataccaagacactgaaggatgaaagggtgggttgcccctgcacacctgtgggtgtttctcgtcaggtggaaggagacacttgagaaaagaaagagacacagagacaaagtatagagaaagaaaagtgggcccaggggaccggcgctcagcatacagaggatccgckccagcaccagtctctgagttccctcagtatttattgatcattatctctaccatcttggagagggggatgtggcaggacaatagggtaatagtggagagagggtcagcaggaaaacgtgaacaaatgtctctgcatcataaacaaggtaaaggaaaaggtgctgtgcttttgatgtgcacgtacgtaaacatctcaatgccttaaagagccagcatgtctcacctccagccctaaggcagttttctgctatctcagtagatggaatatacaatcgagttttacactgagacattccattgccaagggaggagcaggagacagatgccttcctcttacctcaactgcaaagaggctttcctctt

SEQ ID NO: 939773 - DNA, 596 bp, Homo sapiens
gctttgctggtgttgagtgcctgtagtttttacccacagagggtacaaagctcttggtgggtctatgaatctggggtctgcatgatggtggcctccagtgtggaggctccaaccccatattttccttctgcactgccctagtagaggtttcccaggaggctctgcttttttggcagctttctgtctggacatccaggcattttcatacatcttccaaaatctatatgaaggctctgaagcctctgggctagtgctctatggactcgctggcttaagactatgtggaagccgtgaagccttatagcttgtaccctctgaagcagtgatgcaatctgtacctgtgcatctttcagccaaggtcggagcaggagctgyggctgctgggatgcaggcagcagtatcctgaggctgcacacagcagcagggccatggggctggccccggaaaccattcttctctcctaggccccagggtctgtgacaccaagggctgctgcaatcatctcatgaaatgcctccaaggctttttcccccattgtcttggctattagcactggcctccattttatgcaaatttctggaaccttcatgaatttt

SEQ ID NO: 939774 - DNA, 473 bp, Homo sapiens
ttacctaatgaaaatatgcttagtgacttgggataaaccaatagatgttcacaactgatggagagccgtgaaagagagataacggtaaatagttacaataacacaattttcctgcacctgtcgaggatttccccaaaaaaacgcagaatgtgggatgcacctaaggcataggaaagagagagggcagaaggagtaagagagaaataggaggaaggagggaaggaaagaaggaagtcaggaaggaaggaaggaaggaaggaaggaaggaagraaggaaggaaagaaggacgtaaggaaggagaaaacaccggtgttactaaaagcccccaaaaaaatggtttccccctgtgggtaagcctacaatgtggacgaatcttgaaaatattgtgctacgtgttatgtcagtcataacagctcccctattgtgcaattccgcttataggaaatgtccacaatatggtaatctatgcata

SEQ ID NO: 939775 - DNA, 743 bp, Homo sapiens
  misc_feature 662: n = A,T,C or G
gtcaaagcccaatcgaattgaatgagaagtttttttcaatcatgttgcatattaccagttgtcttatgtcataataaaaattaaatttagtggaatatctgtaacttcaccttttgtgtcacaaaggagtctctggccagcttataccttacttcgtctaagacatgatcagacgccaggcttacaagacacatttaatttctttttttctccattcaagcctttagtctcttttccattgcctcccgctatagttatattttcagtaagttttggtcgcaggatctgctgacatagtctaatatttagtgcattatgttttactaactcattataattcatagaaccttccrtagatgtttaccatcgaggaaggagaagtttaagtctgaaccaccagctttcctcagtggaaatcaagtgaagtcatcatcttgcagtttacagaccctctttcctcctggtagctggttctcttgggtagtactgtagctaatccttttcttagtgcagatcttgcattctcagagaccacagttccctgtattgacctccctttactgaaacagagatgcacagctctgctttctagctcagtagaggattcttggaatacatcgttaactcatccaagaaaaagtcttaggagtgcagcacttcanaatcaggtaatgtcaggccaatttatcagagacacatagtaggttagtattttgacttcagaaatttcggagacaaggtgt

SEQ ID NO: 939776 - DNA, 743 bp, Homo sapiens
  misc_feature 662: n = A,T,C or G
gtcaaagcccaatcgaattgaatgagaagtttttttcaatcatgttgcatattaccagttgtcttatgtcataataaaaattaaatttagtggaatatctgtaacttcaccttttgtgtcacaaaggagtctctggccagcttataccttacttcgtctaagacatgatcagacgccaggcttacaagacacatttaatttctttttttctccattcaagcctttagtctcttttccattgcctcccgctatagttatattttcagtaagttttggtcgcaggatctgctgacatagtctaatatttagtgcattatgttttactaactcattataattcatagaaccttccatagatgtttaccatcgaggaaggagaagtttaagtctgaaccaccagctttcctcagtggaaatcaagtgaagtcatcatcttgcagtttacagaccctctttcctcctggtagctggttctcttgggtagtactgtagctmatccttttcttagtgcagatcttgcattctcagagaccacagttccctgtattgacctccctttactgaaacagagatgcacagctctgctttctagctcagtagaggattcttggaatacatcgttaactcatccaagaaaaagtcttaggagtgcagcacttcanaatcaggtaatgtcaggccaatttatcagagacacatagtaggttagtattttgacttcagaaatttcggagacaaggtgt

SEQ ID NO: 939777 - DNA, 738 bp, Homo sapiens
ttggtaagcccacaagctaactctagcaaaaatgagtaaaaaataaacattactggagagcttctttgaaaacaggaaaagacccaatggtgaaacagcaggggactctaagactgccaccccaaagaaatctacacttaaaataccaagagtcctacttaaattatgagttcattgcaacaggtgattcacattctccaagccactttgtacaatatttgatgactagctatcaaacgaagccatcaaaccttcaacactgcttcgccacatggagaccaagcgccctgcgttaaaacacaagcctttggagttctttaaatgaaaaaaatgtgaatatcaagtacagaagcaattactgaaggccaccacttcatcaaatgtgtctgcactgagagcatcattcttagtagctaacggcattgctaaagctgagaaaccctttaatactggtgaagagtgatcctgtttgctgttaaggacaactgtcatgaactttcaagagaggctgcagttcaaagggtggcatgtgttcctcttttggctagcaccataactagatgaattgaggaaatagcagaggatcctgaggcmcaatcgttagagaggattagtgagtcaccgtggtaggcaatccagattgacaagtctaccgatgttgacaacaaggcaacagtgcttgtttttgtgtgatatatttttcaggaggatatccatgaaaatatgttacatgtactt

SEQ ID NO: 939778 - DNA, 455 bp, Homo sapiens
ttccccagttcatgatacaatccaaaatcatgcattgctttaaattgtctgtcattagtctctttgaaactgaacaattccatgatctttctttgtcctgatcctgacatttttgaagcaaggaggatggttattttgtagaastttttttttttttattgggagggggtaccagtctgattttgctcatgattagatgtaggctatgcattttttttgcaggaatgacacacaaatgatgttgtatccctcactgttcatcaatcatatcaggaggcaaataatgtcagtttgttccagtattgccatttagtcacttgctcattgattgattgattcattcattctcttcaatgtatttactcctttcctcaagccaataatacacagaaagtggtttctgactggctaatctataacactgattaagcaaatctgctaactagatagagttc

SEQ ID NO: 939779 - DNA, 635 bp, Homo sapiens
ctttcttacagaagaatttcaaataatatatgtaactactccccccactaaaaaaaggtgaaacttgacacccctctacacataccctgagagtagactaggcttaacgactccaccccaagcaatagaatagggaaagggaaaaatagtaactttacacttttctcctttacaggagaaagatggccaacatgacattaaccaagtgatgagggttaacatccccagagatgtcatgtggttatcatataccctcaatagaatatgatgagaagggcatttcacctctatggtcttcttcccagaaacccataatcccagtcccagtctaattatgagaaagacatcagacaaactcagattggagaacattctacaggataccctgccagcactcctcaggacttcyaaggtcattttttttttttaaaaaaaggaaagactgagaaaaaagaggaaagactgagaaactgtcacaaaccagaggagactggggagagatgacaactaaatgcattgtgctactttgggtaaaatcccggactagaaagaggacattaatgaaaaaacagatgaaaaccaaataaagcctggaattcagttaattaaaaaaaattgatggtctctaaagtctc

SEQ ID NO: 939780 - DNA, 630 bp, Homo sapiens
aaataatgctaaattttgttttcaaataaagctgtatcagggtaatatctttttatgctttctgaattataaaaagataattaggcatatttcatattcttggcattctgttgagcagcatgtacttttctcaagagattaaagttgtctgctctgcttctctattttagtaattctgagcaaataacaatactgttttatttgaagcttgtataagactttccccctacatgtgagtcttaatcttacagaaattcatttatcatacctcctccaatgcagttttctttatttaytagtgcatattcttccaaatgcatttctgagagtggcattttagtaacatcattgatctccagcccagtgtgctttggaaactctgagaatctacatgtgctctgcaagcaggaaatattgtgttagaagaaataatgattgaagggatggatgaccagaaggaagagatattaatatccgttatgtatgtttcttcctgtctgtcatatgcttaacactgtgccagcctctgagaagtcatgatgataaggatgatttctattcttagggagcttaaaataatgttatgttggactggaagtcatcaggttcagatcctccctacgagaaatc

SEQ ID NO: 939781 - DNA, 630 bp, Homo sapiens
aaataatgctaaattttgttttcaaataaagctgtatcagggtaatatctttttatgctttctgaattataaaaagataattaggcatatttcatattcttggcattctgttgagcagcatgtacttttctcaagagattaaagttgtctgctctgcttctctattttagtaattctgagcaaataacaatactgttttatttgaagcttgtataagactttccccctacatgtgagtcttaatcttacagaaattcatttatcatacctcctccaatgcagttttctttatttactagtgcatattcttccaaatgcatttctgagagtggcattttagtaacatcattgatctccagcccagtgtgctttggaaactctgagaatctacatgtgctctgcaagcaggaaatattgtgttagaagaaataatgattgaagkgatggatgaccagaaggaagagatattaatatccgttatgtatgtttcttcctgtctgtcatatgcttaacactgtgccagcctctgagaagtcatgatgataaggatgatttctattcttagggagcttaaaataatgttatgttggactggaagtcatcaggttcagatcctccctacgagaaatc

SEQ ID NO: 939782 - DNA, 775 bp, Homo sapiens
gttggattataaaacgactactgatttttgtacattgatttagtatcctgcaacttccctacatttatcaaaactatgagttttagttggagactttaggttttttcagatataagatcatatcatcaaaaagagtgtcaatttgacttcctctttacaattttgtgtcttttatttctttctctggcctgattgctctggctaggacttccagtactatgatgaatagaagtggtgaaagggggcatccttgtcttgttctagatcttagaggaaaagcttccaggttttcctcattcagtatgatgctaactgtgggtttgttatataagctctttattattttgagatatgtaccttctattcatagtttattgagagtttttttttatcataaagggatattaaattttatcaaatgctttttatgcttctttattgatttgtatatgttgagccatccttggcatccctgggataaatcccacttgatcgtggtgtcttccttttgatctgctgttgtattcaatttgctagtatgttgttgatttytgagtctaggttcatcaggggtattggcctgtaagttttcttttcttttcttttttctttctctctgtctctctttgtgtgtgtgtgtgtgtgtgtgtgtgtgtgtgtccttgtttggttttggtatcagattagtgctggcctcatagaatgagttaggaaaagtttccttcactttgagtttttggaatagtttcaggaggatggtatagttctttatatg

SEQ ID NO: 939783 - DNA, 599 bp, Homo sapiens
  misc_feature 93: n = A,T,C or G
aaatacacataacataaaatgtatgtgtattttaaccatttctaagtgtcagtttagtggcaataaatacattcatattgttgcacaaccatncatcactatccatctccaaaactcttatcatcttgcaaaactgaaactttatacccattaarcaataactttccatttcccctttccccagcccctggcaagagtcatctactctgtctctataattttggtgactctaagtactttatcatataattggaatcatacagtgtttgtccttttgtgattggcttattttacttagcataatgtcttcaagtttcatctatgttataacagatgtcagaatttccttcctttctaaggctgaaaatatttcattgtatgtgtgtaccatttttttttatctgtttatccatccgtagaattctgggttgcttccacattttagcaattgcaaatattgttgctgtgaacattaatgtacaaatacctctttgagactctgttttcaatttgggggtggcatatgtccaaaagtgaaatttttcaatcacatggcaattctatttttaattttgtgagaaatggccatgttattgttt

SEQ ID NO: 939784 - DNA, 716 bp, Homo sapiens
tccttctactgtgatcttttcccagttcctctggctactgtgatcttttcccagttcctctggcagccctcctcaaggaacactgtgagacaagtcagacatagcttccctggggacccagagagcccacagggcttttcctgcttctcctctacccctgtatttcactcggctctataaatttactcagctcaaggcaaggtgaaatccttctcccgtgatctagaccttcaggttactctgtaagggtatgtgttcaggggtacatgatccccctttctcactttcacagtttgggcactcacagtatttgagctgtctcctgggtcttgcaggagcaattcacttccttctcatatttcattctttttcatcctctggtagtgtgttttgacatatcacgtctttgagcttactaattctttcttctgtttgatcaactctgttattgacacacatgcatttttcattctgtcaattgaatttttcagctctaagatatctgtttgatgttttaaaatgatttcagcttctatggtaaaatctctgatggaattctgaataccttctmtgtgttatcttgcagttcattgagcttccacaaaatagctattttgaattctgcctctgagaggttctatatctctggcacttcaggattggtttctagtgtcttatttagttcatttagtgatatcatgtctcctggatgttct

SEQ ID NO: 939785 - DNA, 797 bp, Homo sapiens
tcagcatactgccaagcctcagtgtctctatctgtaaagtgggcataaaatcttcctccttcacagggtagtgttgttattagcacagtgcgcaacatagaacacacgtgttaggtggaacttgatcatggtgatgtgattatcataattgtcatattgtgattctgcctccatcattgcctcagcctgcagcttttagctaaatatcactgcctcggggaagccttctccccactatcacccccacccccaatcaggtcaggccgtctaacagccaggctgtggcaaactgtgggacagatccaccctctgttttcatatgggcacaaccacccctctttggttgacatatcgcctgtggctgttttcatgcagcagtggcagagttgagtgcttgggacaaagaccctgtggmctgcagagcgtgaactatttactatctggcttttacaggcacatgctggccctggctccttcctgcaactggccctcatgctcctccgtggcacttccttctgcagtgatggcacagttagttgtgggcttatttgcccatgtctgtctgctccgccagactgaaagctccttgaggaagggcccagtctagaattcctagagcccaggcactagcaaatctcctgccgatgcagcgcactaactactctcaagctccttacagggtcctgtaggcacctggtcctcagaggcagctccagagtgggctgactgctgactcggcacagccttgggagaagtgctgatgctggcagttttccacagcagagcaagccccagct

SEQ ID NO: 939786 - DNA, 640 bp, Homo sapiens
cacattttttacattgggacattatgtttgcatgtcactgtgtatgtcattacaaaattctctctttccatggtttactttgatcttcctcaacaccttgtggtttttattaatttttttatttttaatttttatgggtacatcagtaggtgtatatatatatatttatgggggggtgcagtttaattgttcctgaatcacaggtggaggaattggatccccagttaaggtcacgtggcctgtaagtgtcagctctgaatctcacgcccagtccttttaacacccacgccagtgctccttccttgctaactgtggtgaataagaaaaggatcgcacctctcagcttytcaattgccactagccctgcaagcattaggactgggatgttttgcaaccagtccctggcctggtaatagaggctgctcctcagtgggctaggctgaaggaatcagagccttgcaacaggagtcccggctgagctcagggctagagtctcaacactcagctgtagaggcaggagggatgtcataggctgtcaggttacatttatgttgcagtttctttattttggattacatttgttcagaagcgaatagtcctgcaatttgccctggtttgccaatgtcccacttaacataat

SEQ ID NO: 939787 - DNA, 582 bp, Homo sapiens
tattctctttgaagcaattgtgaatgggagttcactcatgatttggctccctatttgtctgtaattggtgtataagaatgctcatgatttttgcacattgattttgtatcctgagactttcctgaagtttcttatccrcttaagaagattttggactgagacgatggggttttctaaatatacaatcatgtcatctgcaaatacggacaatttgacttcctcttttcctaattgaatatgctttatttcttactcttgcctgactgccctggtcagaacttccaacactatgttgaataggagtggtgagagagggcatccctgtcttgtgccagttttcaaagggaatgcttccagtttttgcccattcagtatgatattggctgtgggtttgtcaaaaatagctcttattattttgagatatgttccatcaatacctagtttattgagagtttttagcatgaagggctgttgaattttgtcaaaggccttttctgcatctattgagataatcatgtggtttttgtctttggttctgtttatgtgatggattacgtttattgatttgtgtatgttgaacca

SEQ ID NO: 939788 - DNA, 611 bp, Homo sapiens
gcagaaatcaaaaaattatttgaaacaatgaaaagactcacaccatatcaaaacctctgggcttcagtaaaagcactgttatgaggaaactttatactggtaaatgcctacatcaagaagatagaaggatctcaaattaacagcttaatrtcacaactggaggagctagaaaaacaagaacttaacctaaagatagaagaagaaaagaaacaactaaaatcagagcagaactaaattatattgagaccaaaacaatatacaaataatcaatgaaatgaaaaattggcttttgaaaggataaacaagattgataggccactagccagattaacaaagaaaaaaagagagaaggctcaaataagtgaaatcagaagtgacaaaaataacaacaactgattccacagaaatacaaaagattctaagggaccactataaatatctctgtgtacacaaactagaaaaccttgaggaaatggataaattctcagaaacacaccacctcctaagactgaaccaggaagaaattgaaacctcaaaccaaacaataaaaaattatgaaactgaatcagtgatagaaaaactaccaaccataaaaagcactggaccagaca

SEQ ID NO: 939789 - DNA, 761 bp, Homo sapiens
ctctttttgttcctagtttcaggtatgtctttatcagcagcatgaaaacagactaatacagtaaattggtaccagtagagtggggctttgctgaatagatacccaaaaatgtggaagtgactttggaactgggtaacaggcagggactggaacagtttgaaaggctcagaagaagaaaggaaaatgtgggaatgcttagaatttcctagagatttgtttaatggctttgtccaaaatgccaacagcgatatggacaataaaatccaggctgaggtggtctcagatggagatgaggaatttgttgggaactggagcaaatgtgactcttgttaggttttagcaaagagactggtggcattttgcctctgccctagagatttgtggaactttgaacttgagagagatgatttagggtatttggcggaagaaatttctaagcagcaaagcattcaagatgtgacttgggtactgttaaaggcattcagttttaaaagggaaacagagttcagaaaatttgcagcctgactatgcaatagaaaagaaaaacccattttctgggaagaaattcaagctagctgyagaaatttgcataagtagcatggggcctaatgttaatccccgagaccatggggaaaatgtctccaagccttgtcagagaccttcatggcagcccctcccatcacaggcccagaggcccaagaggaaaaagtggtttcatggactggacccagggtccctgcgccatgggcagcctagggatt

SEQ ID NO: 939790 - DNA, 579 bp, Homo sapiens
cagttctcctgtatgtattcaatttctcatccccactgttaagttaactcttccctggcacagatgccctcatctctctgctagggttctgataattctttatcccaggtatgtagatgaaaatggaaattaagtgatttgtccatggtcacatgataggctattaaaggaattacagtccctgtcctttggcctgttttttgtttgtttgtttgtttttgagatggagtctcactctgtcgcccaggctggagtgcagtggtgcgatctcgggtcaccgcaacctccacctcccgggttcaagtgattctcctgcctcagcctcccaagttgctgggattataggcgagcaccaccacgcccggccaatttttgtatttttagtagagatgaggtttcaccwtgttggccgggctgttcttgagctcctgacttcaggtgatccacccacctcggccttccaaagtgctgggattacaggcgtgagccactgcatccagcttctttgtcatgtgttaatgataacttaatataattggtgatcaaaacatgaactttaaagttgcttaggtctaggtt

SEQ ID NO: 939791 - DNA, 605 bp, Homo sapiens
ctggttttatattaaaattgtcctggggattttaggtaatatactaagagaagggaaaaaagaacagacattaaatatataaatattaacagaaagagtaaaccattcttattagcagccaatatgatcttccaccaaaaaaacaaaaacaaagtgtaagcacttagagctagagttgagcaagattataaaagatgactgtgcaaaactcagatgattttctataaaactaaacatttacaataccaacaagaaacataaaataaccagaaataaatcttaaaacaaatgtacaatataattatatgaagtcaaaaaccaaaaacacttgtgtractcactttattacaatattccctttattgtggtggtctagaaccaaaataatgaaatagaggagtagaacaacactacagaacaaatggaactaaaagaataatacagaatattccactcaacaacaacagaatatacattcatcttaatggcacatgaaacattctccatgacagaccataaaacaaggctcaacaatttttaaaatactaaaattatataaagtattttttctgatcacaatgtaataaaaccagaaatcaattaca

SEQ ID NO: 939792 - DNA, 608 bp, Homo sapiens
cacgctggccgaagagcacaccgacagatgctggcatgccggcaggccatcgaccggtgggacaaggctgagtctggctggggcagtaggaggagagccgggccatcgagcggcccaactccgggtgaaaaccatctcccttctgcctcccccatcagtggagagctacttccactgaataaaactttgcactcattttccaagcccacgtatgatctgattcttcgggtacatcaaggccagaacccsggatacagaaagtcctctgtcattgcgacaaggtagagggtctaattgagctggttaacacaagccacctacagatggcaactaagagagcatcctgtaacacatgcgcactggggcttcagaagctctaaacattcacccctataccagacactggattatacgctttacttatatcactgctttttttttcctctaaaaaagtcactgccatgaggttggagccccacaaactgcccatctttatgctcacttacaggtttgagcagcagggcactgaggaagttagccactcccccatcacgtgtcctgcgaggaggacaagggaacctttcccatttcaataatgtgcactatac

SEQ ID NO: 939793 - DNA, 614 bp, Homo sapiens
ccaatagctcctaacaagagagtcagcctgtctttgaagctttaaaaccaggcattgacttctctctatctctgaaagttctagatggcattttcttccaaaatgaggctattttgtcttcattgaaaaactgtattttagcatagacttcatcaacaaaattagctataatagatcttctagatgacttgctgtagcttctctrttagcacttgctgcttcaccttgcacttttgttatggagacagcttctttccttcagcctcatgaaccaacctctgctagcttccaacttgtcttctactgctttcccacctctctcagccttcacagaactgaagacagttagggccttgctccatattaggctttggcttaaaggaatgctgtggctggtttgatcttctttccagaccactaaaacgttttttatatcagtaataaggctgtttcactttatttaggtgttcactggagtagtacttttaattttcttcaataacttttcctttgcattcacaacgtggcacaagaggccaagcttttgacctatcttggttttcaacatgccttttttcactaagcttaatcatttctagttttttaaagtgaga

SEQ ID NO: 939794 - DNA, 639 bp, Homo sapiens
atggtgtatatgtaccacattttctttatccaagctgttgttgatgggcatttaggttgattccatgtctttgctatgatgaatagtgctgcaatgaacattcacatgcatgtggctttaggtagaatgatttatatttctctgagtatatgcacattcctttttttcccacaatctcaccagcatctgttattttttggctttttagtaataagcattctsactggtgtgagaaggtatcttatcgtggttttcatgatgttgagctttgtttcatatgcttgttggctgcatgtatgtcttctgttgagaagtctctattcatgtcctttgcccacttcttaatggtgttgttcgtttttctcttggaaatctgatatcgatttttcctaggcatgaacatgggatgtttcttcattgtgtgtcttctcttttttctttgagtgctattgtataattcttattgtacagatctttcacctcactgttagttgcattctgaggtattttactctttcatggcagttgtgaatgggattgacttcctgatttggctctgggtttggctgttgttggtgtatagaatgctagtgttttttgtacattgattttgtatcctgcaacatgcctgaagtagtt

SEQ ID NO: 939795 - DNA, 639 bp, Homo sapiens
atggtgtatatgtaccacattttctttatccaagctgttgttgatgggcatttaggttgattccatgtctttgctatgatgaatagtgctgcaatgaacattcacatgcatgtggctttaggtagaatgatttatatttctctgagtatatgcacattcctttttttcccacaatctcaccagcatctgttattttttggctttttagtaataagcattctgactggtgtgagaaggtatcttatcgtggttttcatgatgttgagctttgtttcatatgcttgttggctgcatgtatgwcttctgttgagaagtctctattcatgtcctttgcccacttcttaatggtgttgttcgtttttctcttggaaatctgatatcgatttttcctaggcatgaacatgggatgtttcttcattgtgtgtcttctcttttttctttgagtgctattgtataattcttattgtacagatctttcacctcactgttagttgcattctgaggtattttactctttcatggcagttgtgaatgggattgacttcctgatttggctctgggtttggctgttgttggtgtatagaatgctagtgttttttgtacattgattttgtatcctgcaacatgcctgaagtagtt

SEQ ID NO: 939796 - DNA, 606 bp, Homo sapiens
caatcctcaattcttgacatctgtgaactcgcaggctcaaagccacgtggaagctgccaaggcttgaggctagcaccctctgaagcaacagtctgagctgtaccttggcaccttttagccatggctaccacagctgggatacagggcgctaagtccctaggctgcacacagcagggggccctgggcccagcccacaaaaccattttttcctcctaggcctctgggcctgtaatgggacaagctgccttaaagatctctgacataccctgaagacattttccccattgtcttagtgatttacatttggctccttgttacttatgtaaatttctgcagctggcttcaatttctcctccgaaaatgaatttttcttttctattgcatcatcaggctacaaattktccaaacttttatgctctgtttcccttttaaaaatgaatgcttttaacacacccaagtcacctcttgtatgcttcactggttagaaatttcttccaccagataccctaaatcatctccctcaagttcaaagtttctcaaatctctagggcaggggcaaaaatgctgccagtctctttgcatagcaagaatgacctttactcctgt

SEQ ID NO: 939797 - DNA, 718 bp, Homo sapiens
aacccacaggtcaaccacagtccccaggttgatacctggtccccaggtggctactcaatctgcagggtaacattagtcccctgtaggatcccaggccccaagtggattcctaggcccctggtgaacatcaggtgcaggtgtccaagtaggccctgggtggacataactgtgtacaggtaaggagttgacctgtggggaggatgagcagtcagcagcccactggggtcctgagtaggtcttctggaaggaggaggctgaggggatggaaccttaaagaagcaacctcacttctttggcaacagaccctaacagaacttagaattctggtaaccaggccaggcacggtggctcacacctgtaatcccagcactttgggaggctgaggcaggaggatcatgaaatcaggagatcgagaccagcctgaacaacatggtaaaaccacatgtctactaaaaatacaaaaagcaaacaaggtcaggagatcgagaccatcctggctaacacagtgaaaccccgtctctactaaaaatgcaaaaattagccgggsgtagtggtgggcgcctatagtcccagctactcgggaggctgaggcaggagaaaggcatgaacccaggacacggagcttgcagtgagcccagatcacgccactgcactccatccagcctgggtgacagagcgagactctgtctcaaaacaaacaaacaaacaaaaaacaaac

SEQ ID NO: 939798 - DNA, 670 bp, Homo sapiens
ttcccttgcttgaggtgatgaatgccccatttaccctgatgtgattattacacattgcatgcctgtgtcaaactatctcatgtaccccataaatatatacacctaccatgtactcatataaattaaaaataaaaataaattttttaaaaaagtgtgagttttaaaggtgaggtttgccctccagcgctggtgcctgccaggtgtgaccttcacatcatctttccacatggtccaggtccccatctgcagaggccaacagttcccagagtgaccttcctcagaaaacagggtcttggaggagacagtcagaggagggggcctcgtcctccccactgcacagccccttgtggggattggaagtgagggtctctgcccacaagttrgcagtcaccctaagctgttttgtgggaggaagcatagggaatataggtcagtgctggaacagcatttcctgatcctgacttggagaaggtgttaaaatcttgacattcccgactcctcctttgtgagagcccctgtcctgcaggtctcacaggattgtgagggccacctgtggtgatgggtttggaagtgctttgtgaatgacacagtgggccttcctattcctgtcattggcctttcgaccttcaatactaattgcctggggatctccaggcctcaaggtctaatc

SEQ ID NO: 939799 - DNA, 670 bp, Homo sapiens
ttcccttgcttgaggtgatgaatgccccatttaccctgatgtgattattacacattgcatgcctgtgtcaaactatctcatgtaccccataaatatatacacctaccatgtactcatataaattaaaaataaaaataaattttttaaaaaagtgtgagttttaaaggtgaggtttgccctccagcgctggtgcctgccaggtgtgaccttcacatcatctttccacatggtccaggtccccatctgcagaggccaacagttcccagagtgaccttcctcagaaaacagggtcttggaggagacagtcagaggagggggcctcgtcctccccactgcacagccccttgtggggattggaagtgagggtctctgcccacaagttgkcagtcaccctaagctgttttgtgggaggaagcatagggaatataggtcagtgctggaacagcatttcctgatcctgacttggagaaggtgttaaaatcttgacattcccgactcctcctttgtgagagcccctgtcctgcaggtctcacaggattgtgagggccacctgtggtgatgggtttggaagtgctttgtgaatgacacagtgggccttcctattcctgtcattggcctttcgaccttcaatactaattgcctggggatctccaggcctcaaggtctaatc

SEQ ID NO: 939800 - DNA, 568 bp, Homo sapiens
gattattacacattgcatgcctgtgtcaaactatctcatgtaccccataaatatatacacctaccatgtactcatataaattaaaaataaaaataaattttttaaaaaagtgtgagttttaaaggtgaggtttgccctccagcgctggtgcctgccaggtgtgaccttcacatcatctttccacatggtccaggtccccatctgcagaggccaacagttcccagagtgaccttcctcagaaaacagggtcttggaggagacagtcagaggagggggcctcgtcctccccactgcacagccccttgtggggattggaagtgagggtctctgcccacaagttggcagtcaccctaagctgttttgtgggaggaagcatagggaatataggtcagtgctggracagcatttcctgatcctgacttggagaaggtgttaaaatcttgacattcccgactcctcctttgtgagagcccctgtcctgcaggtctcacaggattgtgagggccacctgtggtgatgggtttggaagtgctttgtgaatgacacagtgggccttcctattcctgtc

SEQ ID NO: 939801 - DNA, 595 bp, Homo sapiens
tctctgcccacaagttggcagtcaccctaagctgttttgtgggaggaagcatagggaatataggtcagtgctggaacagcatttcctgatcctgacttggagaaggtgttaaaatcttgacattcccgactcctcctttgtgagagcccctgtcctgcaggtctcacaggattgtgagggycacctgtggtgatgggtttggaagtgctttgtgaatgacacagtgggccttcctattcctgtcattggcctttcgaccttcaatactaattgcctggggatctccaggcctcaaggtctaatcctggaagggtatgagatgtccctagtggaatattctacacctcctgggaggtctctcacttcaaccttcacctgacataacccctgctcctgttccttcaacctggagagcttgcccaggagcacagggtagtactggactgacctctttggaaagggtgattacatcctcatttcagctctccctcctcctagctttccacgtagaaatccagggctccatgcagcatttgctggacatgaggggaaaacttttagggcagggatctgccctgggtggggacagaggagt

SEQ ID NO: 939802 - DNA, 763 bp, Homo sapiens
gatcgtgtttcctttgatccaaggggtggctttggcaagctgtattcctccttcccttagggctggtcctcaccaaagtttaggtctcctggggaatggggttcacctccctcttgtttcttggaactgatggagtactctctcaactgaccaagggagcaggctgagacacccagcaatgacacacacagaccagttccaggttgcaaagctgttcttggctgcaagtctcaccatccttgagaaacctctgctttagcaactctcttcccactacagtcctgcaagaggaaagagcctaattccaacacttactgctggggcactttccacactcaacactcaattctggctgttgaggctgctcccctgctccagagcaagcactccaattcctagcccaagattaaagtgtctgcagtggccaccattgccaggcaccaaaaaatgattgactttgtatgagcccagattaaaaagggcatccttctctcagtcccaggtctrggtaaatgcctgcagcttttctgagtgtctttcctctttccccatctctcagccacttttgtgctagctccaaggcttgggagaaacagagtgttctcccttaatctggattgcacaaatccccagtgaaaaggtgagttgcagagggagactggctgctcttctctcatactggagtttcactcccttttatgaaccaaatgctatcacagagtctgctttcccacctccccatccacaggatctggagtgttct

SEQ ID NO: 939803 - DNA, 633 bp, Homo sapiens
gcggtcgcctgcagttccaactactcgggaggttgaggcaggagaattgtctgaacccgggaggcggaggttgcagtgagccgagatcgtgccactgcataccagcctgggtgacaggcaagactatatctcaaaataaatacatacatacatacatacatacatacatacaaacacatatatgtaatgtataaatattacctttttgtcatctatttaacaaaatatttgctcaaatatatmcttccatctgacaactatttaacattacttttctaatatttttaccttattgctgctgacttgatacatttttattcattccactacatccttgttattttggaagatctatcctttatttctttattaaggggtatcttcaattttttgacctcacaattagatgcataattttcaagtactatttgaaataaagatgccttctattgtcttagcaaattagtcaatttctctacttacccctcctcaataagttgacaaattcaaaaaacataaatttccccatttctttttcaccactcccctccaagaaaccttggaaccagtttgttccaaggtttgttcccaccaaagtctagattatacaaaaatattttagaatgttaacga

SEQ ID NO: 939804 - DNA, 582 bp, Homo sapiens
ttgatctcatttttactattcttctcattgctcattcaattcaatttcaagcataatgattttttgctcttttgggaatacactagctttttgatttcattagagcctgtacacttccctcttcctgaaatgttcttccccaaatttatgtatagcttattttctctctttgttcagggctcagtgtaattgtagattgttctctaccttgaatatgtcttacccctcatttgactggttttccttcataccaattatttgtattctaaaatattttatatttttctgttgacttgttcactgagttccttcctctaaaatgtagcttcatgaggkcgatattttgttaaaattgtatgctactgtatcactagaactgagaacaatgcctgaacagagtagctactcatgactcattggctaaaacaagttaatgaatgagaacaggcaggtagaaagccaggaaggaaaagaggatattatattaagttgaatgagggattaaatgaatataaataagctgaaagtagcataggttatgcaatatgcttaataaagtatgtttgtctattttcgttatgt

SEQ ID NO: 939805 - DNA, 625 bp, Homo sapiens
atcatctgtttatgtttggagacagaagaacccacaaatttttccttgtactgacaattaaggatacataacattttttgaatggtcttgaaataagaaaacagtgctctgtataatgttaatgattcctcagtataatttaagtagtcttaggtattgtatgccaggtgcatgtgtcccagctctttgcctgctagtctatttaattaaatctgccttatgtcctgaactatcatcaaatttatgagccatgtccctagatgcttatagaaaaaaaaagctattttatcacctactcttactttcaatccagtctagcttaagtggggtttttttcaacttttctttataggttcagggatgtccatgtgcaggtttgttacrtaagtgtgtgttgccgaggtttggtgtacaaataattccatcacccagatagtgagcatagtacccaataggtagtttttcaccccacattccctcccaccttcctacatcaagtagtccccagtgcctatcgttcccatttgtttgtgtccatatgtactcattgttcagctcctacttataaatgagaatatgcagtatttggttttctgttcctatgttagtttgcttaagataatgg

SEQ ID NO: 939806 - DNA, 627 bp, Homo sapiens
tatgttacccagggcaggcactctggggtctcaggcaatgggcggggctatggagcctccaaatatccctgtccattgtgttatgctaccagggctcataaagtggcaaagcctggtgaggactggaccaggcaagtcctcactcaggctctccaggtacaagcacaagcagtgtccccagtggggatcagagaacagctttctggccactggggtaatgttccaraggggagcagagctgcctctggtgcacagaagaatccacacagggagtgggagcaggagggagtagtagaaggcagtaaggcccactcagctcccatgcacttggcacagcaagtcccataccctcagtattctgctaacagcaactagctgtgttccaggcagtctacacttagaacacaaaactgccccaagcagtaagccttcctgccagcgatagaaaccaggctttcaggccatgcccctccctatccacctgcgaagcaggggcgcccaacttctgcactatagcacacttcatgccagccccctggttctggccgacagggttagtctccacttaaaatcatattgcgaatctcaggagctcttttcaacctgttactacagcctgagttactg

SEQ ID NO: 939807 - DNA, 596 bp, Homo sapiens
gtagcaatcagaataatcagactcatgcagagctcttgcactggctaattaatcacagtgttcctagaagtgaaatcaagaggaagcctactgcattcctacttagtctatataagcagaaacctgccaggtcaagtggaaaagagactaatctgaattctaaaaacagagaattacagcccytcaatcaatttccagacttgagccagtttacagacacacaactccttgaataaaggggaggctggattcccttgagaatggaccccactacactatagacactttatgctgttactgtttttcccattcttcctcaaggagacctccagccttttaccagggtaatggtatattgggacaagggaaatgatcagatattttggggactactggacattggctctgagctgacattgattcaaggggatctaaaacatcattgtggttctccagttacagtaggggcttatggaggtcaggtaatttatggagtttcagctcaggtctgacttacagtgggtccaataggtccccggactcatcctgtggttattcccccagtgccagaatacatgattggcataggcatattt

SEQ ID NO: 939808 - DNA, 714 bp, Homo sapiens
gtggaatggccttttgaagtcacaattacaatgccagctaggtgacaatactttgcatgactagggcaaagttctccagaaggctgtgtatgcactgaatcagcatccaatatatggtacagtttctcccatagccaggattcacaggtccaggaatcaaggggtggaaatataaatggcaccatttaccatcaccagtaatgacccactagcaaaattgttgcttcctatcccacgacatcatgttctgctagcctagaggtcttagtcttagagggagaaacgctgsccccaggagacgcaacaacgattccttttaactggaagttaagattgccacctggacactttgggctcctcctacctttaggccaatgggctatgaagggaattacagtgttggctgaggtgactgacctggactatcaagatgaaatcaccctactactccacaacagaggtaaggaagattatgcatggaatacaggagatcccttggcacatctcttagtataaccatgccctgtgattaaggtcagtgggaaactcaacaacagctctatccaggcaagacaacaaaggtcctagacccttcgtgaaggaaggtttgtgtcactccaccaggaagaaaaccacaacctgctgaggtgcttgaaggcaaagggaatacagaatgggtagtagaaaaaggtagttttcttttgttaaaaacat

SEQ ID NO: 939809 - DNA, 598 bp, Homo sapiens
gctggggttacaggtgtgagccaccgcacctgaccggccaacattctttgtttcttgttttttcttttttcttttcttttctttttttttttctgagacggaatctcactttgttgcccaggctggagtgcagtggtgggatctcggctcactgcaacctctgcctcccgggttcaagcgattctcccacctcagcctcctgagtagctgggattacaggtgcacaccactacacccagctaatttttgtattttgaatagagatggggtctcaccatgttggccaagctggtctcaaactcctgacctcaggtgatctgcccacctcggcctcccaaagtgctgggattacaggcatgagccaccatgcccggcagtcaatattcttaaattaaggcttaggaagcagttgaacatgatgtttcactctgcactgtacccagmcctgagtcctgaagaacaagacctggctcatgtgggtagaagctgctaagccagagaggaatttcctggtaggggcgtgcaggaccaggtttcctgttctttcacctgcttgaatcactggctttggcttccttcctctatgaggctctgtgat

SEQ ID NO: 939810 - DNA, 719 bp, Homo sapiens
cccggagccttccgcccagcgccctgtgtaggtagcgagtgtcgggagaaatcatcactacgaattcgtttccatataggggcaacgccaggcggggcacaatgatctgtccttgaggacaaagagtgattccggagagagcaggtttttgtccctccacgcaggtttctctccccasaccccagccttcggcttcctcccttcctgtcacggacgcagccggagaaactggggcccagacgcggagctcactccgccagaaaccctgggtcccttcccctacgctggcaggctgggtccggttccatcgtcgcggctccgtttatccctccagggagcgcgggcagagcgccgagcgcggcgcagggactggagttctcgccagcttcgggttctttctccccggagctgcccggggggtctcggcctcgggcgctcccgccgccgtcctgttcccctcagggttcatgtcctgttcccggggccccagaggtcccgtctgagagcggcccccgcgagcttgggtgtcgcggaaccaccgctgtcggaagccgaggttacacaaacgccacgggcaggagcgggagggcaccggcggcggctgcgaggccgggccctgacatgccgctgtgtccgcagtgaaggaggagggcgaccgcgagatctccagctccagggacagtcccccggtgcgcctgaaaaagccacgcaaggcgcgc

SEQ ID NO: 939811 - DNA, 583 bp, Homo sapiens
agtattaaagtcccccactattgttgtgttgctgtcaatctcatttcttaggtctattagtcattgttttataaatttgtaatctccagtgttaggtgcatatgtatttagagttgtgatattttcctcttgtacaaggccttttatcattatgtaatgtccctcttggtttttttctaaatgctgttgctttaaagtttgttttgtctgatacaaaaatagctactcctgctcgctgttggtgtccatttgcrtggaatgtctttttccacctctttaccttaagtttatgtgagtccttatgtgttaggtgagtctcttgaaggcaacagaaacaaggttggtgaattgttagccattctgtaattctgtatcatttaagtggagtatttaggctatttaccttcaatgttagaggagatggataaattgctgaaaagatacaaccctcttatcttaagtcaggaagaattagaaacccagaacagaccaataacaagcggtagattgaaatggtaaaaaaaaaaaaaaaaaaaaaaaattagcaccaccaccaacaacaactacaaatccaggaccagat

SEQ ID NO: 939812 - DNA, 583 bp, Homo sapiens
agtattaaagtcccccactattgttgtgttgctgtcaatctcatttcttaggtctattagtcattgttttataaatttgtaatctccagtgttaggtgcatatgtatttagagttgtgatattttcctcttgtacaaggccttttatcattatgtaatgtccctcttggtttttttctaaatgctgttgctttaaagtttgttttgtctgatacaaaaatagctactcctgctcgctgttggtgtccatttgcgtggaatgtctttttccacctctttaccttaagtttatgtgagtccttatgtgttaggtgagtctcttgaaggcaacagaaacaaggttggtgaattgttagccattctgtaattctgtatcatttaagtggagtatttaggctatttaccttcaatgttagaggagatggataaattgctgaaaagatacaaccctcttatcttaagtcaggaagaattagaaacccagaacagaccaataacaagcrgtagattgaaatggtaaaaaaaaaaaaaaaaaaaaaaaattagcaccaccaccaacaacaactacaaatccaggaccagat

SEQ ID NO: 939813 - DNA, 583 bp, Homo sapiens
agtattaaagtcccccactattgttgtgttgctgtcaatctcatttcttaggtctattagtcattgttttataaatttgtaatctccagtgttaggtgcatatgtatttagagttgtgatattttcctcttgtacaaggccttttatcattatgtaatgtccctcttggtttttttctaaatgctgttgctttaaagtttgttttgtctgatacaaaaatagctactcctgctcgctgttggtgtccatttgcgtggaatgtctttttccacctctttaccttaagtttatgtgagtccttatgtgttaggtgagtctcttgaaggcaacagaaacaaggttggtgaattgttagccattctgtaattctgtatcatttaagtggagtatttaggctatttaccttcaatgttagaggagatggataaattgctgaaaagatacaaccctcttatcttaagtcaggaagaattagaaacccagaacagaccaataacaagcggkagattgaaatggtaaaaaaaaaaaaaaaaaaaaaaaattagcaccaccaccaacaacaactacaaatccaggaccagat

SEQ ID NO: 939814 - DNA, 728 bp, Homo sapiens
attcaaagaagaattggtagcaatcctgctgaaaatatttcaagagatagagaaagatggaagtctccataaatcattctatgaactcagtattaccctgataccaaaaacaggaaagaacataacaaaaatactacagaccaatatctctgataaacatggatgtaaaaatcctcaacaaaatactagawaaccaaatccagcagcatataaaaaatataatacaccattatcaagtgggtttcataccatggatgtggaattagattaacatatgcaagccagtaaatgcaatacaccacataaacagagttaaaagcaaaaattatgtgatcatctcaacagatgaagaaaaagcatttgacaaaattcagcctcgctttatgattagaacccttagcaaattagcatagaagggacacgctttaaggtaataaaagccatctatgacaaactcaccaccaacagaatactgaacggaaataagttgaaagcattccccctaagaagtggaacaagacagggatgctcaattttaccacttctattcaacatagtattagaagttttagccagaccaatcagaaaggagaaagaaataaagagcatctaaactggtaaaaaggaagtcaaactgttgctattcaccgtaatatgatggaatacctaaaaaaccctaaagactcctccaaaaagctcttacatctgattagcaccactatacagca

SEQ ID NO: 939815 - DNA, 728 bp, Homo sapiens
attcaaagaagaattggtagcaatcctgctgaaaatatttcaagagatagagaaagatggaagtctccataaatcattctatgaactcagtattaccctgataccaaaaacaggaaagaacataacaaaaatactacagaccaatatctctgataaacatggatgtaaaaatcctcaacaaaatactagataaccaaatccagcagcatataaaaaatataatacaccattatcaagtgggtttcataccatggatgtggaattrgattaacatatgcaagccagtaaatgcaatacaccacataaacagagttaaaagcaaaaattatgtgatcatctcaacagatgaagaaaaagcatttgacaaaattcagcctcgctttatgattagaacccttagcaaattagcatagaagggacacgctttaaggtaataaaagccatctatgacaaactcaccaccaacagaatactgaacggaaataagttgaaagcattccccctaagaagtggaacaagacagggatgctcaattttaccacttctattcaacatagtattagaagttttagccagaccaatcagaaaggagaaagaaataaagagcatctaaactggtaaaaaggaagtcaaactgttgctattcaccgtaatatgatggaatacctaaaaaaccctaaagactcctccaaaaagctcttacatctgattagcaccactatacagca

SEQ ID NO: 939816 - DNA, 578 bp, Homo sapiens
tttttttggctggtagggtatttgttactgccccttcagaacttgttattggtctattcagggatttagcttctccctggctcagttttgggagggtgtatgtgtctaggaatttatctgtttcttctagattttctagtttatttgcatagaggtatttatagtattatctgaaggttgtttgtatttctgtggggtcagtggtgacatcccctttatctttttttgttgtatctatttgattcttttctcttttcttattagtctagcttgcagtctatccattttattaattttttcaacaaacggcttctggattcattgatttttttggaagggtttttcatgtctgtatctccttcaattctgctctgatcttggttatttcttttcttctgctagtgttgtggyttatttgctcttggttctctatttcttttagttttgatgttagggtgtcaacttgagatttttctagctttttgatgtgggcagttagtgctataaatttccctcttaacactgctttagctggatcccagagactctgtgtgttgtctctttgttatcattggttt

SEQ ID NO: 939817 - DNA, 603 bp, Homo sapiens
aagtccactggtctgagcccaactctgcactagggcttgcctaggagttgaagtcattgtggcctagacagtcttttaagtttatatagagccccaaagtcctgtggtaatgaggcttgccagaactcaggttccaaccactgggatgggtkattgtcctctggacaggtctggtctaaatgctctttctgtgggcaggcatgagatgcatttggcccggttttgctctctgctatgacagggcaagaccgagttcaatgcaaagtccaacagtcactgcattctccctcccctaagtgcacaattctctctccatgtcacatggccactgccaggagataggggaagggtggcactggtaatttaagactgtctttcctaccctcttcagtgcctctttcagtcatttgaagttaaaaccaggtactgtgagtgctcacctgatttctgattcttatgtaggtgttttttttgtgtgtgtaggtagttcttaaatttggagttcccacagcataaagtcttctatttggccatcttgctgtacgttctcccctagattttttaataaattacaaagctgacttttagatgttctatttattt

SEQ ID NO: 939818 - DNA, 603 bp, Homo sapiens
aagtccactggtctgagcccaactctgcactagggcttgcctaggagttgaagtcattgtggcctagacagtcttttaagtttatatagagccccaaagtcctgtggtaatgaggcttgccagaactcaggttccaaccactgggatgggtgattgtcctctggacaggtctggtctaaatgctctttctgtgggcaggcatgagatgcatttggcccggttttgctctctgctatgacagggcaagaccgagttcaatgcaaagtccaacagtcactgcattctccctcccctaagtgcacaattctctctccatgtcacatggccactgccaggagataggggaagggtggcactggtaatttaagactgtctttcctaccctcttcagtgcctctttcagycatttgaagttaaaaccaggtactgtgagtgctcacctgatttctgattcttatgtaggtgttttttttgtgtgtgtaggtagttcttaaatttggagttcccacagcataaagtcttctatttggccatcttgctgtacgttctcccctagattttttaataaattacaaagctgacttttagatgttctatttattt

SEQ ID NO: 939819 - DNA, 576 bp, Homo sapiens
gcggcgtgtccggagtttgttccttctgatgttcagatgtgtttagagtttcttccttctggtggattcatggtctcgctggcttcaggagtgaagctgcagaccttcgagtgttacagctcataaaggcagtgtggatccaaagagtgagcagcagcaagatttattgcaaagagtgaaagaacaaagcttccacagtgtggaaggggacccaagggggttgccactgctggctctggcagcctgcttttattgtcttatctggccccacccacatcctgctgatyggtccattttacagagagccgattggttttacagagagctgattggtccattttgacagggtgctgattggtgcgtttacaatccctgagctagacacaaaagttctcgaagtccccactagattctttagatacagagtgctgattggtgcatccacaaaccctgaggtagacacacggtgctgattggtgtgttcacaaaccttgagctagatacagagtgctgattggtgtgtttacaatcccttagctagacataaaggttctccaagtccccactagactcagg

SEQ ID NO: 939820 - DNA, 610 bp, Homo sapiens
tgtttgatgaagtgttctgtaaatatctatgaggttcatttggtttataatgtagattaagtctgatgtttctttgttgattttctatctggatgatctgtccattgctgaaagtagggtattgagatctccagctattattgtattgtcatattgaagtctggctctctctttaatgctaacaatatttgctttwtatatctgagtactccggtgctggatatataggtatttataattgttatatcctcttgctaaattggcccctttatcattatataatgaccttttctttctctctttatatttttttgtctcaaattttaaaaatatgatataagtatagctagtcatgttcttttttggtttccacttcatggaatatctttttctatccctttattttcagtccatgtgcatctttataggtgaaatgagtttcttgtaggtagtgtatcattgggtcttgttttttaatccattcagctactatgtatcttttggttggagagtttagtccatttgcattcagtattattattcatagatgagtacttgctactgccattttgttatttattttctggttgttttgtggtcctctctttca

SEQ ID NO: 939821 - DNA, 580 bp, Homo sapiens
gttcaacatacacaaatcaataaacgtaatccatcacataaacagaaccaaagacaaaaaccacatgattatctcaatagatgcagaaaaggcctttgacaaaattcaacagcccttcatgctaaaaactctcaataaactaggtattgatggaacatatctcaaaataataagagctatttttgacaaacccacagccaatatcatactgaatgggcaaaaactggaagcattccctttgaaaactggcacaagacagggatgccctctctcaccactcctattcaacatagtgttggaagttctgaccagggcagtcaggcaagagtaagaaataaagcatattcaattaggaaaagaggaagtcaaattgtccgtatttgcagatgacatgattgtatatttagaaaaccccatcgtctcagtccaaaatcttcttaagyggataagaaacttcaggaaagtctcaggatacaaaatcaatgtgcaaaaatcatgagcattcttatacaccaattacagacaaatagggagccaaatcatgagtgaactcccattcacaattgcttcaaagagaata

SEQ ID NO: 939822 - DNA, 740 bp, Homo sapiens
gcacggtggctcacacctgtaatcccagcactttgggaggccaaggcgggcggattacctgaggccaggagttcaagagcagcctgaccaacatggtgaaaccccgtctctacttaaaatacaaaaaattagctgggcgtagtggcaggtgcctataatctcagctacttgggaggctgaggcaggagaattgcttgaacccaggaggcggaagctgcagtgagctgagatcacaccattgcactccagcctgggcaacaagaccgaaactccatctcaaaaaaaaaaaaaaaatcagtcagaaacatcctggatgctgctgcaaagataattaggatttttatatcaggaatacaaagacagaggtagtgttctttttcagctttttaaaataagcttatgtgttgaactccatgtcagaaataatagtcctaaaggccaaagatttggatttgcaagggttgggttttcttgggggggaaaagtgtctcttgagactccaaacggagaggatgtcgaatttaagcctttgctatggaatgaataaagaagaggagagatgcatcccaccctcccctgagcaygggatgggagccacacaggctgtaagtagagttggatgagtagtgttccttcatgaagaaaaccagtggatcttggagaagatgatcagcaaggagaggaggagataatgagcaggaagaggccaagccaatggctgcagaccatcatcaagccag

SEQ ID NO: 939823 - DNA, 759 bp, Homo sapiens
gcattacaaatgtttcctctatcttgtctttaacctgttcatgatagctttggttaggcatacattaatttaaatgacagatctatcaatcgtttaccttatgttttgtactttctgcttctcatgtaaggaatcttattttttaaacgatattatttctctacaaccataaagatattcttctatwttttctattgaaatcttgtagttttaattctcatattaaatctttaatctacttaagatttattttatataatgtgagttaaggattgaattttaatttttccttttggttatgtcacagcataaattattaaacagcccatcctttctgcactagttatagtgctgcctctgtcatagatcaagttttcatatcagtccatttctacactctctatcctgctccattgatgtcttcatccttctctaagccaatttcacattgtcttcattattatgggttgagataacctaactatctggtatgtgagcctcccaaccttttttgtttgtttgtttgtttgttttttgttttgttttgttttttgagacagtcttgctctgtcaccaggccagagtgcagtggcgcgatcttggctcactgcaagctccacctgccgggttcaagcgcttctcctgcctcagcctccgaagtagctgggattaaaggcgcctgccaccacgcccagctaatttttgtatttttagtagagacggggtttcaccatattggccaggatgatcttgatctcc

SEQ ID NO: 939824 - DNA, 568 bp, Homo sapiens
atgttactattatctgaatgtttgtgtcattcccaaactcatatattgagacctaatcatcaaggtgttaccaaatggtgttaccaaatggggccttgggaggtaatgaggtcaagagggtagagccccatgaatagaatcagtgcccctatagkaggactccagagagctccttctccccttccaccatgtggggacacagctcacaggaacccccatgaataggatcagtggccccagaggagggaccccagatagctccttctccccttccaccatgtgaagacacagctcacaggagcccccataggagggaccccagagagctccttctccccttccactgcgtgaagacacagccagaaggcaccgtctatgaaccttcagggagcaggccctcaccaaacaccaaatctgccttgattttgaacttttcagcctccagactgcaggaaataaatgtctgttgtttataagccacccggtacatgatactctattattacagcaagaacagactgagaaaaaaacaacaacataaaatggtagattgttggtagaagtgacc

SEQ ID NO: 939825 - DNA, 817 bp, Homo sapiens
catgagagagtgtgccagtgaagcagggtaatggggagagagggaggagggatagtgccagcaagtcagaagtcacagtctctatgacctggtctagaaagtaacatcccaccacttttgctgtattctattcatgagatgtaagccagaggagattgcatgagggtgtaaataccaggaggcagggttcagtggggccaggtcacacatgtgcctacacagaatactcagtcaccatctaccatccctccttcccattcctctcatccttgcccaagttcaggtcctcttgattctttatctgaactcatacagttgacccttaactggtctctcccaataaaccatccattgctctgagtcgtcttgctaaaacagtgacctgatcatgttttacacttgctcagaagtccccagaggcccataagctggccccaccagcctcctgggcccttcagcatccatcaggccctgccttgcactttgtttctattacccagaagtgcctgcagcacttggcccacgcyatctggtctcagcctttactctggccgttccctgggcctggtcatcccttcccacattttctctcctgtccaacacctgcagctacttagggctcaggcaccatccctccaggaagcttttccatgactgtcctcagtacttccatttcccactgtgcctccctcttctggagagtggtcaaggaggagattataaagtgcttggccagagacctggcccaagggaagcacctgtcaagggctgacctcttatttaagagctctgtatgagcacacctgtggcaacccct

SEQ ID NO: 939826 - DNA, 595 bp, Homo sapiens
tgtcagtacctcagagggtgacgttatttggagatggggttgttgcagatggaatgagttctgttagaataaggtcatactagaatgggtaggtcctactccaatctgactagggtcctaacaagaagggaacatttgggccgggcacggtggctcacacctgtatcccagcactttgggaggccgaggcgggcagatcagctgaggtcagaagttcaagaccagcctggccaacatggtgaaaccccatctctactaaaaatacaaaaattagcctggtgtggtggygggcatctgtagtcccagctactcaggaggctgaggcaggagaatcgcttgaacccaggaggcagaggttgtagtgagccaagatcatgccactacactctagcctgggtgacagactgagactccatctcaaaaaaagaaaaaaaagaaggggacatttggacacagagacggagacacagggagaacaccatgtgaagatgaaggcagagattagggtgatgcttctataagccaaggaacaatgccaaagattgttagcaaactcccagaaactaaatgaggggcccggaacagattctgcctc

SEQ ID NO: 939827 - DNA, 560 bp, Homo sapiens
aaaccccgtctccaccaaaaaatacgaaaaccagtcaggcgtggcggcgcgtgcctgcaatcccaggcacttggcaggctgaggcaggagaatcaggcagggaggttgcagtgagtcgagatggcggcagtacagtccagcctccgctcggcatcagagggagaccrtgcaaaggggagagggagagggagagggagaggtgtttctttcttttcactctttttttgtctaatcttgtcttcttgctttatttcattgagttgatcttcaatctctgatatcctttcttccgcttgatcaatttggctattgatacttgtgtatgcttcacaaagttctcgtcctgtgtttttcagctccatcaggtcatttatgttcttctctaaactgggtattctagttagcaattcctgtaaccttttttcaaggttcttagcttcctggcattgggttagaacatgctcctttagctcagaggagtttgttattacccaccttctgaagcatacttctgtcaattcgtcaaactcattctccatccagttttattcccttgctgg

SEQ ID NO: 939828 - DNA, 560 bp, Homo sapiens
aaaccccgtctccaccaaaaaatacgaaaaccagtcaggcgtggcggcgcgtgcctgcaatcccaggcacttggcaggctgaggcaggagaatcaggcagggaggttgcagtgagtcgagatggcggcagtacagtccagcctccgctcggcatcagagggagaccatgcaaaggggagagggagagggagagggagaggtgtttctttcttttcactctttttttgtctaatcttgtcttcttgctttatttcattgagttgatcttcaatctctgatatcctttcttccgcttgatcaatttggctattgatacttgtgtatgcttcacaaagttctcgtcctgtgtttttcagctccatcaggtcatttatgttcttctytaaactgggtattctagttagcaattcctgtaaccttttttcaaggttcttagcttcctggcattgggttagaacatgctcctttagctcagaggagtttgttattacccaccttctgaagcatacttctgtcaattcgtcaaactcattctccatccagttttattcccttgctgg

SEQ ID NO: 939829 - DNA, 630 bp, Homo sapiens
ggcacctcgggaggccgaggcaggcagatcactcgcggtcaggagctggagaccagcccggccaacacggcgaaaccccgtctccaccaaaaaatacgaaaaccagtcaggcgtggcggcgcgtgcctgcaatcccaggcacttggcaggctgaggcaggagaatcaggcagggaggttgcagtgagtcgagatggcggcagtacagtccagcctccgctcggcatcagagggagaccatgcaaaggggagagggagagggagagggagaggtgtttctttcttttcactctttttttgtctaatcttgtcttcttgctttatttcattgagttgatcttcaatctctgatatcctttcttccgcttgatcaatttggctattgatacttgtgtatgcttcacaaagttctcgtcctgtgtttttcagctccatcaggtcatttatgttcttctctaaactgggtattctagttagcaattcctgtaacmttttttcaaggttcttagcttcctggcattgggttagaacatgctcctttagctcagaggagtttgttattacccaccttctgaagcatacttctgtcaattcgtcaaactcattctccatccagttttattcccttgct

SEQ ID NO: 939830 - DNA, 644 bp, Homo sapiens
tggttaatacgtgatgttcttctgtggtactgtttggccctggagttctttggagtctaaagacgtttggcctttaaaaatcaaaatgccatggaaactgctttactccaaattttggttcacaaccataactggattacctaccagggcaaacaaaatttagcaatgtgaaaatgttcataaactagtgagcttgtattgctatcttatggctagagttccaaggtaaaagccattggaactttgtgcatgtatatacatgtctagatgtgtttatttgtatgtacatttattaggttatatgttgtgtcttccaaattggcttataattgagagtgcttaaattaaaggagcacataagttaaataaatatgtcctagcatttttcaarttcacatgacttgaatatatcttctttaataaacaagctggctttaaaattattggtaaaataaaaatagaaatgtctttaaaattgtcagcatacatttttgtctggattttacatttgtccatgctagatactttgaggtgtcaggatttggcacgaaaggttataaaactataaatctagccaaaaccaaaatgatctctgtttgtgtgacttttgacaaataagaccagtttaatgttgttggtttcac

SEQ ID NO: 939831 - DNA, 466 bp, Homo sapiens
cccaaagtactgggattataggcatgagccactgtgcccagccaactatttcttcttctaattcttaagtctctcgtaatttacaggatgtcatttaatgacatgtattcatgcattctacttgtgttatgccacatgtgaccatcatgatctccaatcatactgggaacyctttgaattcattaataagagcccacatttatcgtcagagctaatattaatcctcactgttctgtcagcaaaatacaaccactttcattaactcattggcacctcccagcaaccctgagtgagggtagagcagaggagagaatcgagcttgtaaagaaggtaaagtgtctttttcaagggctcattgctctaaataacagagttattctaactccagacacataactcatttgaccagatcctgggaccttcatcaacagttctctgcctagattaggaagagattcataaataa

SEQ ID NO: 939832 - DNA, 559 bp, Homo sapiens
ttgtattagtccattcttgcattgctataaggaaatacatgacaccgggtcatttataaggataaaagatttgattgattcacaattcctcaggaagtacagaaagcatggctggagcggctttgggaaacttacagtcatggtggaatacaaaggggaagcaggcagatctcatgacaggaggaggaagagagagaaggggaaagtgctacaccacgcttgtcaaacccacagcctgtgagtcgcatgcagcccaggatcactttgaatgtggcccaacacaaattcataaactttcttaaaacattaggagawttgttttgcaattttcttttttagctcatcagctattgttaatgttagtgtattttatgtgtgtcccaagacaattcttccttttccaatgttgtccagggaagccaaaagattggacatccctgtgctacacactttaaacaaccagatcttgtgagaacttgctcactatcataagaacagcatggggggacttcgtccccatgattcaatcacctcccaccaagcccgtcctccaacattg

SEQ ID NO: 939833 - DNA, 667 bp, Homo sapiens
cccacagaccggaacatttagaccagccctagccaaaagggaattgccaatcccagaagtcagaacttgagttcctgcgatccttgacacaataggctaaagtgctatggatctctgagtaaacttgaaaggcagtctaggcgacaaggactgcaacttttacaggagtcctagtgatgaactgggcccagagacagtggacgaggagggcacaccacctattgaggcaacagccagagcagttaaggaagtactggcatcactcgtccctaaagcccaggttgtgcagcttgcagctccaaaagagacccattctttccccttgaggagaggaaagggaagagtgcaggaggactgccttgcttcttggataccagctcagccacagcaggatacagaactggtcagagttatgagaacmctgttccaggcccaagttcctggacgatatttccagacgcaccctgggcaagaagagaactcactgccttaaagggaaaaaacccagtcctgacagcattcatcatctgctaagtgaagacccttgggccttgaataatcaaaagtaatacccaggtaatatgtcaagggccttaggtgagcctctgagacttgctggcttcaggtattatcttggcctcagtggcatagaccactaagcaagcca

SEQ ID NO: 939834 - DNA, 616 bp, Homo sapiens
acccattctttccccttgaggagaggaaagggaagagtgcaggaggactgccttgcttcttggataccagctcagccacagcaggatacagaactggtcagagttatgagaaccctgttccaggcccaagttcctggacgatatttccagacgcaccctgggcaagaagagaactcactgccttaaagggaaaaaacccagtcctgacagcattcatcatctgctaagtgaagacccttgggccttgaataatcaaaagtaatacccaggtaatatgtcaagggccttaggtgagcctctgagacttgctggcttcaggtattatcttggcctcagtggcatagaccactaagcaagccaggatgttggggtcctagattctaggacttgacycttagatggcatttctggacctgcccattgccagaagggagcccactgccctaaagggtgagtcccaagccaggtagcattaagcacaagcttacttgagagcccttgggccttaaggccacattggtggcaatttggcattactctctgtgggcctattgtggtggtggccatagggtgtggctcctctgccttttgaaaggcaggagaaagagtgggagac

SEQ ID NO: 939835 - DNA, 635 bp, Homo sapiens
atattagcattgcatcaagagaaaacaatgtttgtaaaatattcttaataaaactctgtgaacatagaagacttcctatttacaataactatttgtattaactgcagaatttaaaatctgtttactatttacattcactgcagaactgcttctggtagtgactgaatatgacaaattgtaactcgatcaccaggtaacatattagaaaggatattagactagaatctagagccttgattgcctaggatattccactaattcactatatgattttaggcagtcacttaacctttaggagcctgtgttacagactcacccactgstacctgtacacgtaattgttattatatagatcatatgtttagactctagaactctgaaataaaatatatttattattacaaagaatacaaaatgtttaccaaaatacactgcctcttcttagggacacagctaactatatatgttgtttccctggaagttatgtggtgccatgagattaagttttagaaagtggaacataaacatatgtaaatgtttgcacataaaattctctactttctggctggtgggcatggagatgaccacgacgaccttaaaaaccacaagctaaagactgtgaagtgagccaagat

SEQ ID NO: 939836 - DNA, 667 bp, Homo sapiens
tgaacttaaaaggtggtcagtttccaattgcagaggtacaagaactgggcccaaccgaagcctgcccaggaagggattatatgaagaactgccccatagaaatataatgtgagccacattttctttctttctctcctttttttctttttttttttagatggagtcttgctctgtcacccaggctggagtgcagtggtgcgatcttggctcactgcaacctccgcctcttgggttcaagcgattctgctgcctcagcctcctgagtagctgggattacaggcgtgagccaccacacctggctaatttttgtatttttagtagagacgggggtctcaccatgttggtcctgctggtcttgaactcctgacctcgtgatcctcccccttygacctcccaaagtgctgggattacaggtgtgagccaccacgcccagcctgtgagccacattatcaatgtccggtttcctagtagccacattacaaacagtaagaagaaacaggtgaattaattttcataatttatttctcatttaactcattctttccagactatgacacctatactgttaccgtttcacctgtgatcgatgtgaagttatgagtgagatggtaaattattttctttcgcactgtgtttgactttgagaccccatgtgttttgtacactt

SEQ ID NO: 939837 - DNA, 745 bp, Homo sapiens
atggggccttccaagtcataggcagatgcaaagatgttctgatcagcagttggttattacctaaagacctgaaatcagtagaaaggaatgtctgagttacgataaggggttgtggagaccaaagttttatcacgcaggtgaagcctccaggcggaggtttcagagagaatagattgtaaatgtttcttatcagacttaaagcgtctgtcctctcagtctgaaggtctgtgttgatggtaataaggtatgtccaactccctcttcccatcttggcctgagctagtttttcaggttaactttggaatgcatgtggcagagaggacaggtccaatcrgatggttggggggcttacaattttacttttggtttacctgactatcataattttcataagcaatctaggcaaactattaaaaattaattaattaagtgtaatggactaaatgcttgcaaataaacatcatagaatttaaaatctaaagttatagcaaattaaataatatttgttaaatgtctgtatcgtttccaatttttttaacaaaaatttgattataggagaaaacatttttctgaaaaataatgtgtttttatgaaaaggaaataatttttgtctaattcaaaggctatttaaacgtcatttttgaaacaaggtgtattagggttctctagagggacaggactaataggatagatatatacatataaaggggagtttattaagcattaacttacacaatcacaaggt

SEQ ID NO: 939838 - DNA, 745 bp, Homo sapiens
atggggccttccaagtcataggcagatgcaaagatgttctgatcagcagttggttattacctaaagacctgaaatcagtagaaaggaatgtctgagttacgataaggggttgtggagaccaaagttttatcacgcaggtgaagcctccaggcggaggtttcagagagaatagattgtaaatgtttcttatcagacttaaagcgtctgtcctctcagtctgaaggtctgtgttgatggtaataaggtatgtccaactccctcttcccatcttggcctgagctagtttttcaggttaactttggaatgcatgtggcagagaggacaggtccaatcagatggttggggggcttacaattttacttttkgtttacctgactatcataattttcataagcaatctaggcaaactattaaaaattaattaattaagtgtaatggactaaatgcttgcaaataaacatcatagaatttaaaatctaaagttatagcaaattaaataatatttgttaaatgtctgtatcgtttccaatttttttaacaaaaatttgattataggagaaaacatttttctgaaaaataatgtgtttttatgaaaaggaaataatttttgtctaattcaaaggctatttaaacgtcatttttgaaacaaggtgtattagggttctctagagggacaggactaataggatagatatatacatataaaggggagtttattaagcattaacttacacaatcacaaggt

SEQ ID NO: 939839 - DNA, 577 bp, Homo sapiens
ccactactctcttcaaagctgtcagacagggacatttaagtctgcagaggtttctgctgccttttgtttggctatgccctgccccagagatggagtctacagaggcaggcaggcctccttgagctgcggtgggctccacccagtttgagcttcctggctgctttgtttacctactcaagccatggcaatggcgggcacccctcccccagcctcactgccaccttgcaatttgatctcagactgctctgctctcmatgagcgagagagactccgtgggtgtaggaccctccgagccaggtgcaggatacaatctcttgatgtgccatttgctaagaccattggaaaagcacagtattagggtgggagtgacctgattttccaggtgccatctgtcacccctttccttgactaggaaagggaattccctgactccttgtgcttcctgggtgacatgatgcctcgccctgctttggctcacgctcggtgcgctgcatccactgtcctgcatccactgtccgacaatccctagtgagacgaacctggtacctcagttggaaatgcagaaatcagtcgtctt

SEQ ID NO: 939840 - DNA, 597 bp, Homo sapiens
cctcccaaagtgctgggattacaggtgtgagccatggtgcccagccatttttttttttttgatacagagtctcactctgtagcccaagctggagtgcagtggtgcaatctcagctccctgtaacctctgcttctggggctcaagtgattctcgtgactcagcctcctgagtagtggggactacaggcgcctgccaccacacgcagctaatttttttgtattttagtagagatgggattttaccatgttgcccctgggtgttctcaaactcctgggctcaggcgatccaccagctttggcctcccaaagtgctgggattacagacatgaaccactgmacccggccagtaatatgcattcgaggtttcttcgtgtctttttgtggcttgagaattcatttctttttatcataatattccatggtctgcatgcaccatagcgtgtgtttctatttacctattaaaggacatcttggttgcttccaagttttggcaatggtggtgcaagttttcctgtggacctaagttttcagttcatttggttgaattcccaggagcatgattgctgagtatggtgagcatttttattactgagaatgg

SEQ ID NO: 939841 - DNA, 395 bp, Homo sapiens
gcaaagttgaaggatacaaaataaatgtacaaaaatcactagcattcttatacaccaacaacagctaaactgagagccaaatcaggagggcaatcccattcacaaaagccacaaaaagaataaaatacttgtgaatacagctaaccaggaaggygagagagctctataataagaaggataaaacactactcaaagaaattaaagaagacatatagatgcatagatggaaaaacatctatgttcatggataggaagaatcaatatcattaaaatggctatactgccgaaagtgatttacagattcagtgctattcctatcaaactaccaatgacattcttcacagaactagaaaaaactattttaaaattcatatggaaccaaaaaagagcctgaa

SEQ ID NO: 939842 - DNA, 673 bp, Homo sapiens
actccttccctctgcttgagaaaaggataagggagagtaaagaggattttgtctttcaacttggatagcagctcagctacagtaggaatgggcagaagtgtgaggcacccattccaggtcttagctcctgcgtgacatttacagacagatgctgggccagaaggaaaactgctgccttgaaggcaaggactcagttatgaaaggattcatcgcctgcyctctaaagggcccttgggccctaaataattagcagcagtaccaaggcagtactccctgtgggcctctgaggagactcagagctgtgctggcttcaggtgtgatccaccacattcctagttgtgatagctacaagaaaagtctccttctgcttgagaaaagcagagagaagattacctgattccaggatgtggtccttggacagcatttctggacctgcctgggccagaagggagcccactgccctgaaggatgaccattcaccacaagctgactgaagaaccttggaccttaagtgaacatcagcagtagcccaccagtacaccctgtgagcctatgctagtagtggcactgaggagagactcctctgcctgtgaaaaggaaagggtgaaagactttgagctgtggtttgagtgccagcttggcagcaatgaaaaagagaaccagatagatttct

SEQ ID NO: 939843 - DNA, 459 bp, Homo sapiens
caatgggaacagacaaaagaaaagtctgctctctctaggcacagaatcaggaaagtggcaacctagcaagatagacaacaattgtcctgctcctgccaaacaccacataaaatgctgcagccctaacctactcctgtcattaaaggtcaagtagggagtctgggtttctgcctttatcaggctatcctgaagtgctccaaaccaccctattgtggtggtatgatagaaagccaagtggggagcctggactttcatccccaccragtggtaatgattacagccatctacactgtgacaaagaacttctactggaaagtcagaaagtcaggacttttctcacaagctcaaaccccagcagtatcagtggagatatctgcagagcattaatgaggcatccatcccccattatcaggatggtatcagcaaaaacctcatgggaaaactgacctaacacccatc

SEQ ID NO: 939844 - DNA, 703 bp, Homo sapiens
cacatctgtacgagaggaccgcggtggcatcttgaagcctggagatgccaggaaccacagagtcccaaagagggtgtcacagccttggctcaaggagcccctgggtctgggctccccaaaggtccccagctcttctctccttctcgtcacccgcaacatggcaagtggcggagcatgtttcagccctgtttgtgttacagctctttcagtcccgccattcagtgggttccaagttcttgtgccgcatccaggaasaatgaggtttgcagaccactggaggttgagcatggcagagagtaccttcactgagcaacagaacagttctcaggagacctgcagtgggtagctcctttccataggcaggtcgtcctggtgagagtctagctctcagtggagaggagatctacagtgggtagctcctttaccataggcaggttgtcctggtgagagtctagctctcagtggagaggagacctacagtgggtagctcctttccacaggcaggttgtcccaacgtctgtgtgaatctagatgagtctgcggtctttataagctctggaaggaagaagtgtgtgctgattggtccgtgggtgtccttgggcaggcctggaaaaagcaccttgagttttcactccggacttcaactccccgacccagaactggcaaccctgcccccaggctttaggcagtcaccttcctggct

SEQ ID NO: 939845 - DNA, 682 bp, Homo sapiens
aggggaggcacggcagggactgcacactccacggagctagctggggctgggaacaggccagagtcccaccccctactgagttagggtgggagtcctgcactcctgggcacaactgaagcagcccagccatggctctggacctgagcatccctgcactctcaggggcctggaatcctccttcctccacaagatcagaagtgcctgctcccactccctggcctctcaccatgcccagtgcctgctctagaggggaggaatgttttggctgagccctggtgctgttgcaacccagccaggtgtataccttcacagtgatgctgacaccccagccccttgctgcctcggccccctccagacttgggcactaaggagcgcmggagggaggccgggatggagctgaggtgcccctcagcacgaacaacctggctgccatagtcaacatgttgatggcgggaggcaggttcctgggtggaaaggggtgggtccccggtgaaaccctaccctcaggtcaggaacagcctgaagactaagggtcgggctgccagttctggttgaagtccagggcctggagtgaggacttcatcgatgactgtttggccaattagatggtgcttttggggggccaaccaaggcaaccttttaagtaatcagcacgcacttcctcccttctgagcccataaaa

SEQ ID NO: 939846 - DNA, 682 bp, Homo sapiens
aggggaggcacggcagggactgcacactccacggagctagctggggctgggaacaggccagagtcccaccccctactgagttagggtgggagtcctgcactcctgggcacaactgaagcagcccagccatggctctggacctgagcatccctgcactctcaggggcctggaatcctccttcctccacaagatcagaagtgcctgctcccactccctggcctctcaccatgcccagtgcctgctctagaggggaggaatgttttggctgagccctggtgctgttgcaacccagccaggtgtataccttcacagtgatgctgacaccccagccccttgctgcctcggccccctccagacttgggcactaaggagcgccggagggaggccgggatggagctgaggtgcccctcagcacgaacaacctggstgccatagtcaacatgttgatggcgggaggcaggttcctgggtggaaaggggtgggtccccggtgaaaccctaccctcaggtcaggaacagcctgaagactaagggtcgggctgccagttctggttgaagtccagggcctggagtgaggacttcatcgatgactgtttggccaattagatggtgcttttggggggccaaccaaggcaaccttttaagtaatcagcacgcacttcctcccttctgagcccataaaa

SEQ ID NO: 939847 - DNA, 682 bp, Homo sapiens
aggggaggcacggcagggactgcacactccacggagctagctggggctgggaacaggccagagtcccaccccctactgagttagggtgggagtcctgcactcctgggcacaactgaagcagcccagccatggctctggacctgagcatccctgcactctcaggggcctggaatcctccttcctccacaagatcagaagtgcctgctcccactccctggcctctcaccatgcccagtgcctgctctagaggggaggaatgttttggctgagccctggtgctgttgcaacccagccaggtgtataccttcacagtgatgctgacaccccagccccttgctgcctcggccccctccagacttgggcactaaggagcgccggagggaggccgggatggagctgaggtgcccctcagcacgaacaacctggctgccatagtcaacatgttgatggcgggaggcaggttcctgggtggaaaggggtgggtccccggtgaaacccyaccctcaggtcaggaacagcctgaagactaagggtcgggctgccagttctggttgaagtccagggcctggagtgaggacttcatcgatgactgtttggccaattagatggtgcttttggggggccaaccaaggcaaccttttaagtaatcagcacgcacttcctcccttctgagcccataaaa

SEQ ID NO: 939848 - DNA, 629 bp, Homo sapiens
tgggaggctgaagtgggaggatcgcctgagcccagggaggtcgaggctacagtgaactatgatcgtgcgactgcacgtgcctgggcaacagagcaaggccttgtctcaataaataaatagtatttaataaataaacaaatactatgcaagttaaacccaataagccagcagcctccaattgataatttctgaaataaactcatattttcaactgcttttgtgacttctccacttggatctctaaaaggcatctcagacctgacatgtcaaaaatgaaactctcgattccagcaggcatctccccgccccatccacccccacaccgactccaacacacctctgctcctcrtcacattcacaggcaagtcagtgaccagagcattcattcaccacccagcccatgcacaagtctcggctccctctgccccacccacctccccaaccatccttcagcataactctctgcttcacccacctccagcaccatcatctctgtgaaagaacaggcattgtgacactgtgatgcacacctctggtagagacagccgtgatggcagactgtgtgggccatggtggatgttgttgttgtttgcagtgcacaccagcctggaaatgcttcagcctggagg

SEQ ID NO: 939849 - DNA, 574 bp, Homo sapiens
gggtaaggagaccagaatacaaaaacacaaaagaccgactgacctttctgtccagaaaatgtgtaaatttttttttgttccgtttttggtaaatctatcccagaaaaaaaaaaaaagcctaaagaataggtagtaaaattgttaatatattgtcttgcctcaagtgataacagcactttttcttttatttaaatgttaccaactttcagaaaagaactaccctgttaaaaagtggagattaaagcacatgaatcttgaatgctcattagctgcacaaatatgagaaaaaatatgtaagtggccttggtaataaaatgaaaagtcatttctgtttagttatgcatctaaaatacttaatatcaatcattttrttccaactgtgttatcatttttaaactatttagtattcactataatttatccaatcataataaattcatttgacatttgcagattgttgcacgaataatgtcatccaatttttatatgttccaagatcaattgcttaccaatgctgtaaatttttgtttcctaatttgaaaactgtgaaacaatagtttttaataatggacaa

SEQ ID NO: 939850 - DNA, 766 bp, Homo sapiens
gaaaatgggattttcttttctactggattgtcaggctgcaaattttctgaatatttatgctctgcttcccttataaaactgaatgcttttaacagcacccaagtcacctcttgaatgctttgccgcttagaaatttcttccgtcagataccctaaatcatccctsaagttcaaagttccacaaatctttagggcaggggcaaagtgccaccagtctctttgctaaaacataataagaaacaccttgctccagatcccaacaagtttctcatctccatctgagaccacctcagcctggatttcattgtccatatcattatcagtgtttcattcaaagccattcaacaagtctctagggagttccaaacttccccacattttcctgccttcctcttatccctccaaactgttccaatctctgcctgttacccagttccaaagtcacttccacatttttgtgtatcttttcagtggcaccccactctgacagtaccaaattactgtattaatctgtgttcatgctgctgataaagacatatccgagactgagcaatttacaaaagaaagaggtttaactggacttatagttcttcatggctcaggaagcctcacaatcatggtagaaggcaaggaggagctagtcacatcttacatggatggcagcaggcaaagagagcttgtgaaggcaaactcttgtttttaaagccatcagatcccatgagactcactcactcacaagaacagtgcaggaaagacctgccctcata

SEQ ID NO: 939851 - DNA, 766 bp, Homo sapiens
gaaaatgggattttcttttctactggattgtcaggctgcaaattttctgaatatttatgctctgcttcccttataaaactgaatgcttttaacagcacccaagtcacctcttgaatgctttgccgcttagaaatttcttccgtcagataccctaaatcatccctcaagttcaaagttccacaaatctttagggcaggggcaaagtgccaccagtctctttgctaaaacataataagaaacaccttgctccagatcccaacaagtttctcatctccatctgagaccacctcagcctggatttcattgtccatatcattatcagtgtttcattcaaagccattcaacaagtctctagggagttccaaacttccccacattttcctgccttcctcttatccctccaaactgttccaatctctgcctgttacccagttccaaagtcacttccacatttttstgtatcttttcagtggcaccccactctgacagtaccaaattactgtattaatctgtgttcatgctgctgataaagacatatccgagactgagcaatttacaaaagaaagaggtttaactggacttatagttcttcatggctcaggaagcctcacaatcatggtagaaggcaaggaggagctagtcacatcttacatggatggcagcaggcaaagagagcttgtgaaggcaaactcttgtttttaaagccatcagatcccatgagactcactcactcacaagaacagtgcaggaaagacctgccctcata

SEQ ID NO: 939852 - DNA, 605 bp, Homo sapiens
atccagctattgcccattcagtatgatgttggctgtggagttgttataggtggctctaattatgttgaagtatgttcctgcaatacctagtttattgagagtttttgacatgaaaagatgttgaattttatcaaaggacatttttgtatctattgaaatatgcatgtggtttttgtctatagttctgtttatgtgctgaatcaaacgttttgatctgtgcatgctgaaccaaccttgcatcgtgcagattaagcctacttgatcatggtggaattagtgactactttttttttttttttcttttgagacagattctcactcagcctatcgccttcggtgaagtgcagtggcatgatttcgactcacagcaaactccacttttggggttcaagcgattctcctgcctctgcctcccaagtagctgggattacagtcatkcgcaaacacacttggctaatttttgcatagatactagagacaggatttcaccgtgttggccaggctgatcctaaactcttgacctcaagtgatccacctgcttcagcctcccaaagagctgggattacaggcatgagtcaccgtgcccagcctgaattaactatttg

SEQ ID NO: 939853 - DNA, 638 bp, Homo sapiens
agcttcctttcattgggttagaaaatgctcctttagctcagaggagtttgttattatccaccttctgaagcctacttatgtcaaatcgtcaatctcattttccatccagttttgtgtccttgctggagagaagttgtgatcatttggaggagaggaagcattctggtttttgtaattttcagcgtttttatgctttttttttttctcatctttgtgcatttatctacctttgatctttgaggctgatgacctttggatgggggttttatctgggttctttatgttgatgttggtgttgttgctttctgtttgttaatttttcttctaacaatcagggccctcttctgcaggtctgctgcagtttgctagaggtccactttagaccctgtttgcctgggtatcaccagtggaggctgcagaacagcaaagtttgctggctgctccttcctcyggcagcttcatcccagaggggcctggcctgatgacagccagagctctcctgtatgaggtgtctgttgacccctgttgagaggtttcttccagtcaggaggcatgggtgtcagagacgcacttgaggaggcaagctgtctcttagcagagcttgtgcactgtgctggggaatccctgttgtcaggatc

SEQ ID NO: 939854 - DNA, 617 bp, Homo sapiens
gagtcaccatttgagcttatgataatccactgtcattatccaagatctagctgtcttctgcacaggccgaacagaagagctgaatgggaatgtgatggaaatcaccacccctgcatcttccaagtccttgatggtggcactaagccytgcaacccctccagggatgcaatattgtttgtgacttactatttttctaggtagaggcagctccaatagctttcatttggcctttcccaccataatagccctcaccctaccagtcagggagccaatgtggggattctgccacctgctaagtccatgtctatgccaattatctattctggcactggagaaatgaccacaggatgattacagagacccactggacccaccgtaaatcaaacctgagctataattccatttaattacctgaccttcataagcctcaactttaactggagaaccaaaatgacactttgggtcccgtggaatcaacatcaattcagagccagagtccagtagttcccgaaaaatctgatttttctcgtgtccccaatatacagttactctggtaaaaggctgaaggtctccttggggaaaatggaagaaagattaacagtataaactgtcagtag

SEQ ID NO: 939855 - DNA, 648 bp, Homo sapiens
gctgctggtccagggactaatccttaagtagccaggccatagaggagctgtggttgaatcaggttagcctgattgttttatgttgttgttgttttcttttttttttttgagacggagtctcgctcgtcgcccaggctggagtgcagtggcacgatctcrgctcgctgcaacctccgcctcctgggttcatgccattctcctgcctcagcctcccaagtagctgggactacaggcgcccgccgccacactcggctaattttttgtatttttagtagagacggggtttcaccgtgttggccaggttggtctcgatctcctgaccttgtgatccacccaccttgggctcccaaagtgttgggattacaggtgtgagccaccacgcccggcccccttttttttttttttttttttaagacagggtcttgctttgccacccaggctgggtagagtgacatgatcatagctcactgcagccttgacctcccaggctcaagtaaacctcccacctcagcctccccagtagctgggtctacaggtgcacaccaccacatccagctaatttctgcaattttttagagatagggttttgccacattgcccagggtggtctcgaactcctgagctcaggcaattcaccagccctcagct

SEQ ID NO: 939856 - DNA, 648 bp, Homo sapiens
gctgctggtccagggactaatccttaagtagccaggccatagaggagctgtggttgaatcaggttagcctgattgttttatgttgttgttgttttcttttttttttttgagacggagtctcgctcgtcgcccaggctggagtgcagtggcacgatctcggctcgctgcaacctccgcctcctgggttcatgccattctcctgcctcagcctcccaagtagctgggactacaggcgcccgcygccacactcggctaattttttgtatttttagtagagacggggtttcaccgtgttggccaggttggtctcgatctcctgaccttgtgatccacccaccttgggctcccaaagtgttgggattacaggtgtgagccaccacgcccggcccccttttttttttttttttttttaagacagggtcttgctttgccacccaggctgggtagagtgacatgatcatagctcactgcagccttgacctcccaggctcaagtaaacctcccacctcagcctccccagtagctgggtctacaggtgcacaccaccacatccagctaatttctgcaattttttagagatagggttttgccacattgcccagggtggtctcgaactcctgagctcaggcaattcaccagccctcagct

SEQ ID NO: 939857 - DNA, 609 bp, Homo sapiens
gcagtgatgctatctcggctcactgcaacctccgcctcccaggttcaagtgtttctcatgtctcagcctcctgagtagctgggatttcaggcgcctgccaccacacccagctaatttttgtatatttagtagagcctgggcttcaccatcttagcygggctggtctcgaactcctgaccttaaatgatcccccctatcttggcctcccaaagtactgggattaaagtgcgagccactgtgcctggcctgtatgtcttcttttgacaaatgtctattcaaatcttttgcccattttaaaatcagattattatttttttgctattgagttgtttgaactactgatatattatatagtctggttattaatcccttgtcagataagtagcttgcaatgttttcctccattctgtgggttgtgtcttcactttgtcaattgtttcccttgctgtgcagaagcttttcagcttgacatgatcccattcatccatttttgcttctggtgcctgtgcttttgaagtcttactcaagaaatctttactcagaccaatgtcctgaagtgtttctgcaatgttttcttctcaagaaatgtttttagtttcaggtcttaga

SEQ ID NO: 939858 - DNA, 648 bp, Homo sapiens
tcaccagtgtcttcaaaaagagcattcgtattttacccagcttgtctacgtagtgatctatgctggctacttcataacagccagaagcaatagtcattaagtggtattttaattaactatattggcattttatatatatatatatacacacacacacacacacacacacatacgcacactatgttcagcactacagagtccaaatacaagacacttttaccaagtattttatttgtaaaggcatcccaaaggtaagatgtcaacacgcaagattggagtgtggaggtgacgctcatccaacttctttatttctttttttttttttttttgagacagactcttgctctrtcacccaggctggagtgcagtggcatgatcttggctcactgcaacctccgcctcccgagttccagtgattctcctgcctcagcttcctgagtagctgggataacaggcacacgccgccaccatgcctggatttttttttgtatttttagtagagatgggttttcgccatgttggccaggctggtctcaaactcctggcctcaagtgatctgcccgcctcagcctcccaaagtgctaggattacaggcatgagccaccgcgcccagcctatatttctgattataaaaaaattgcagcaatg

SEQ ID NO: 939859 - DNA, 589 bp, Homo sapiens
ccactggactcctgaatgtgagaaggacacaggctcccaggactatccagaagcatgcctcatcaccataaagctctgaaacaccggctgggtgcagaggctcacacccgtaatcccaacacattcagaggctgaggtgagaggatcacttgaggccaggaactcaagaccagcctaggcagcatagcaagaccccatctctacaaaaagtataccccaaaattagctgggtgtggtggcacatgcctgtagtctcaattaattgggaggctgaggcgggactatcccttgagcccaggwgtttgaggctgcagtgaggtatgatcgcaccaccacactccagcctgggagacagattgagaccatctctaaaacaacaacaacaggccaggtgcagtggttcatgcctgtaatcccagcaatttgggaggctgaggcgggttgatcacctgaggtcaggagttcaagaacagcctgggcaacctggtaaaatcccatctctactaaaaatacaaaaaaattagcagggcatggtggcaggcgcctgtaatcccagctactcgggaggctgagggaggagaattgcttg

SEQ ID NO: 939860 - DNA, 546 bp, Homo sapiens
catgagccactatccccagcttacaattttatttagtttttaataaatagtaaattcacattgtagaatatctaaaaaataaaataatgacatgttaacttcttccccactgttgtccccagttcctttctgcagaggcacctgctgtcacttgctcctcacgaattctgctagagctacactatgtgtagacatatggcarcgtgctcctcagcctcttccgtgctggtttgtccactgaatttatcttggcgatttttcctcgtgattacatgtagagctgcctcattatctacagtagctgggatgcacatttcacatgtttatgtacactgacttccaaaaggttgcacttacagtatgtgagtttctaaaaaggagagaccatgttggcagttctccacacagaagacaaactgagaagggagagcgggcacgaattactcatctgtccacagagatggtgagacagctcagtgtgggaagctgtataagggaagtatatacaattctacctgaattggaagtaaacagggacattgcatt

SEQ ID NO: 939861 - DNA, 546 bp, Homo sapiens
catgagccactatccccagcttacaattttatttagtttttaataaatagtaaattcacattgtagaatatctaaaaaataaaataatgacatgttaacttcttccccactgttgtccccagttcctttctgcagaggcacctgctgtcacttgctcctcacgaattctgctagagctacactatgtgtagacatatggcagcgtgctcctcagcctcttccgtgctggtttgtccactgaatttatcttggcgatttttcctcgtgattacatrtagagctgcctcattatctacagtagctgggatgcacatttcacatgtttatgtacactgacttccaaaaggttgcacttacagtatgtgagtttctaaaaaggagagaccatgttggcagttctccacacagaagacaaactgagaagggagagcgggcacgaattactcatctgtccacagagatggtgagacagctcagtgtgggaagctgtataagggaagtatatacaattctacctgaattggaagtaaacagggacattgcatt

SEQ ID NO: 939862 - DNA, 772 bp, Homo sapiens
tgggcagctgctgggctggggattggcctgactcagaacagtcagaattaataagggatcgcttggcctgactcagaacagtcagaattgataattgattgtccactaggctgtagttaaactagctagatgccctcttatgccttagccctcaacactgagtcacagttaattcccagacttgagtgaaataacaaatcctgatgaaacccttggttccatgaacagtgggtgggaagataagaggctttagtcataatgcaccaccaactcttcaccaggcagtctcaggccattgacatgggtgggccatcaccttcatgctgtcactccaacccctgtgctgattgtcacccggcagaggagggatgggagttcaacagaccacatgggataaaacaaggcratgtctcagaggcagatcatggacagcttacccacccaggtgcttcacttctccattcctctccttcttatccacctttagacctcaccaccactgtctagtgcattttctaaaagggaggagggaaaacatttattttctatgtcctatgaagtgctcagaaaaagatgaaactcaaaagttgcctaaaatgagggcttggaatgttctcttcctgctgattaccgaaagcatttccagaggaatggacctgcagcctttggctgcagccatttgcgagcatacaaccctgggtgaacagaccactgcctggcagaagcctcaggaacccccagctcaggcaacatcatccgatgagtgctgggc

SEQ ID NO: 939863 - DNA, 666 bp, Homo sapiens
cttatgccatcctcccccaacccaaggcagtgcaactcacaggaacaaaagtgtccccttccttctgcttagggggtggagagtaaagagtaaagacgactctgtcttgtattgtggatacctactcagccacagtaggagagggtactgggcagaggcattcaaggccctagctccagataacatttctagacacactctgggccaaaaggaaatccattgcttttatgaaacaatccagttctggcaagattcatcacctgctgtctaaagagctcttgggcactgaataacctgcaacgatccccagagagtacacaatgggccttgggccctgagacatgctggcttcagatgtgacccagaagattcccagcaatggtggctattataaaagacttccatttgagaaaagcagaggsaaaagtaaaggggaaattttcttgcaccttaggtaccagcttgcacacagtggggcagagcaataagcaggcacttggggtccctgagtccaggcccgggctcctagcatttctaggcctgtcctgggccagaagggagcccgctaccttgaagggtgagtcccaggctgtgcagcgtttaccacaagctgtctgaagaactcttgggcattaagtgaacactagcagtggcctggcagaactc

SEQ ID NO: 939864 - DNA, 606 bp, Homo sapiens
agaggtcaaggtgggcggaccacctgaggtcaggcgttcaataccagcctggccaacatggtgaaaccccgtctctactaaaatacaaaaatcagccaggcacgatggcgggtgcctataatcccagctacttgggaggctgaggcgggagaatcacttgaaccmgggacatggtggttgcagtgtgagctgagatcgcgccactgcactccagcctgggcggcagagccagattccatctcaaaaaaaaaaaaaaaaaaagtgctgggcgtggattgatgtgtgcctgtagtcccaggtacttgggaagctgaggcaggagaatccttgaacttgggaggtggaagttgcagtgtgccgagatcatgccactgcactccagcctgggcaacagagcaagactccatctaaaaagacaaaacaaaacaaaacataggtaaaattaggccattctgcttcttaaagctctccaatgacttttctttattcttagagtacaactaggctctttaccatgcactacaagccactacatctgacagcgtctatatgcttctctgacttcattccaaatagcattcccccaactcctaatacttagccaca

SEQ ID NO: 939865 - DNA, 606 bp, Homo sapiens
agaggtcaaggtgggcggaccacctgaggtcaggcgttcaataccagcctggccaacatggtgaaaccccgtctctactaaaatacaaaaatcagccaggcacgatggcgggtgcctataatcccagctacttgggaggctgaggcgggagaatcacttgaaccagggacatggtggttgcagtgtgagctgagatcgcgccactgcactccagcctgggcggcagagccagattccatctcaaaaaaaaaaaaaaaaaaagtgctgggcgtggattgatgtgtgcctgtagtcccaggtacttgggaagctgaggcaggagaatccttgaacttgggaggtggaagttgcagtgtgccgagatcatgccactgcactccagcctgggcaacagagcaagactccatctaaaaaracaaaacaaaacaaaacataggtaaaattaggccattctgcttcttaaagctctccaatgacttttctttattcttagagtacaactaggctctttaccatgcactacaagccactacatctgacagcgtctatatgcttctctgacttcattccaaatagcattcccccaactcctaatacttagccaca

SEQ ID NO: 939866 - DNA, 760 bp, Homo sapiens
acatttctctccatctaatttctccagaatttggaaaatatttgtgagtgttcttaacttatggcaatgtaattatttgcataagtgcaataagaatgttttcttttgcaacaggacacaattggagaaactgattgttttaccaaggctttgacttaaatggcatgctctcctttaaggaatcaagcttgacttagccaataagagctccttgggaaaactggccttatagcttgtctgcacagtccctgtatagggcttctgacctataataagtaaagaatattgatagtgactggaggcagtcaaatgactaggcagatgatgcgggccctggggaaaccccactttcaagccaaaaacaccctggagtgcttgttctggacgaaacccatgacccacagtgagaacgtctattgctgtttgcccaacctttcctgattggttctttctgaataatgcttttaaccaatcaaatgtygccttatccagtactatgtatggcctgcccctcccccatcccatgcctataaaaactccagactcagcaacaatgggggggatgatgtgacttcaggtgagagaccacctccccattccctctctgctgaaagctgttttgtcacttagtaaaattatccaccgtcatcaccctccaattgtcagcatgacctcattcttcttgggcacatgatatgagctcaggacccactgaaaacaggtacctagaaaggctgtaacactgtggccctctgccctt

SEQ ID NO: 939867 - DNA, 601 bp, Homo sapiens
tttccttgtagttgtgtggtttcaggtgaacttcttaatcttgagttctagtttgattgtgctgtggtctgagagactgttaagatttaagttcttttgcatttgctgaggagtattttaattctcattatgtgatcaattttagagtaagtgccagagttctgtagatatctatcaggtccmcttgatccagagcttagttcaggccctaaatatctttgttaattttctgtctcagtgatctgtctaataatgtaagtggggtgttaaagtctcccactattattatgtgggagttgaagtctctttgcagatctctaagaacttgctttatgaatttaggtgttcctgtattgggtatatatatataatagttagctcttcttgttgaattgaactctttaccattatgcaatacccttcttgtcttttttgatatttgttgctttaaagtctattttgtcagaaattaggagtgcaacccctgcttttttctgtcttctatttgcttggtaaattttcctccactctgttattttgagcctatctgtatctttgcatgtgagatgggtctcttgcagagagcatgcaaatgggcctt

SEQ ID NO: 939868 - DNA, 574 bp, Homo sapiens
aatttcatcatgcatattattaaattaactagtaacattcacaaataataatatataggtacctatgttgagtgtgaaaataaacaatttcagggtgacttttaggcctttctctcccatgagtagagtgagaatagtatgtaaagtttacggtttataaagatcaggaaacagcagttcttggttatgataattgtcatggagaaaagtagtcaattttactcaaaattgttgtcaactacctttgagagtcagcattttaaaattaatgcttgaagcaattatatggaagtagwggcataataatgtatatcaaacaagtcggaaggaaggaaggaaaacgaagggaggaagaaagaatgagagaagaaagaaagaaaaagaaaagaaaggaaaggaaggaaagaagggaaagaagaaagaacaaaggaaagaaagagaaaagaaaagaaaaaagtagaggaataaaggagagaaagagatagggaagagggagggataaagagggaggagcagaagaagggaaaaggaaggaagaaggaaagggaaggagggaaggaaggaaaggggaacg

SEQ ID NO: 939869 - DNA, 574 bp, Homo sapiens
aatttcatcatgcatattattaaattaactagtaacattcacaaataataatatataggtacctatgttgagtgtgaaaataaacaatttcagggtgacttttaggcctttctctcccatgagtagagtgagaatagtatgtaaagtttacggtttataaagatcaggaaacagcagttcttggttatgataattgtcatggagaaaagtagtcaattttactcaaaattgttgtcaactacctttgagagtcagcattttaaaattaatgcttgaagcaattatatggaagtagtggcataataatgtatatcaaacaagtcrgaaggaaggaaggaaaacgaagggaggaagaaagaatgagagaagaaagaaagaaaaagaaaagaaaggaaaggaaggaaagaagggaaagaagaaagaacaaaggaaagaaagagaaaagaaaagaaaaaagtagaggaataaaggagagaaagagatagggaagagggagggataaagagggaggagcagaagaagggaaaaggaaggaagaaggaaagggaaggagggaaggaaggaaaggggaacg

SEQ ID NO: 939870 - DNA, 630 bp, Homo sapiens
ccagaggtacaaagaggcgctgctaccattccttctgaaactattccaaacaagagaaaaagagggaatcctccctaactcattttatgaggccagcatcatcctaataccaaaacctggcagaaacacaacaaaaagaaaatttcaggccaatatccctgatgtcccatcaatgtgaaaatcctcaataaaatatggcaaactgaatccagcagcacatcaaaacttatccaccatgatcaagtcagcttcatacctggaatgcaaggctggttcaacatatgcaaatcaataaacgtaatccagcatataaacagaaccaatgagaaaaaccacatgattatcttaatagatgcagaaaaggccttcaacaaaattcaacaccccytcatgctaaaaactctgaataaagtaggttttgatgaactgtatcttaaaataataagagctatttatgacaaacccacagccaatatcatactgaatggacaaaaacttgaagcattccctttgaaaactggcacaagactaggatgccctctctcaccactcctattcaacatagtgttggaagttctggccagggcaattaggcaggagatggaaataaagagtattcaaataggaaaa

SEQ ID NO: 939871 - DNA, 689 bp, Homo sapiens
gaatttctaattccactcatgagtgctctgatcccaagacctaatcacctaccaaagcccccaccttctgatagcattaccttggggcttaggatttgaacatatgaactggggaggactctggggaaacacatttaaaccacagcactaatgtaggatgttaataataaaggaaactgggtgtggggtttatggaaactctcttaacttggtatgaggtatatgcaaactctctttaatatcttcagaattttcctgtaaactttaactttaatctgaacttctaaaaattatagttatacacgcatacacagagagagagagagagagagcgagagagagagagagagagagagagaagttatacatagccttmgtgttgcaggtctagcctacacttctagccttattccccctgtttaaaccttataagtcagccaatataatgaaatttccttaaggtcaagatgctactatgtttattctccaaaaaatttgaaaaataaatgagttttcttaatttcttagaagactcaataaagttgagatcataaagtgtaagttaaggaagaattctacctgaagagactcatgaaacaaaaatgatggtgaggaaagggagtgctgtttcattgactagaaaagaattagcaaattaatcagcacattgccttttaaatgttccactt

SEQ ID NO: 939872 - DNA, 689 bp, Homo sapiens
gaatttctaattccactcatgagtgctctgatcccaagacctaatcacctaccaaagcccccaccttctgatagcattaccttggggcttaggatttgaacatatgaactggggaggactctggggaaacacatttaaaccacagcactaatgtaggatgttaataataaaggaaactgggtgtggggtttatggaaactctcttaacttggtatgaggtatatgcaaactctctttaatatcttcagaattttcctgtaaactttaactttaatctgaacttctaaaaattatagttatacacgcatacacagagagagagagagagagagcgagagagagagagagagagagagagaagttatacatagccttcgtgttgcaggtctagcctacacttctagccttattccccctgtttaaaccttataagtcagccaatataatgaaatttccttaaggtcaagatgctactatgtttattcyccaaaaaatttgaaaaataaatgagttttcttaatttcttagaagactcaataaagttgagatcataaagtgtaagttaaggaagaattctacctgaagagactcatgaaacaaaaatgatggtgaggaaagggagtgctgtttcattgactagaaaagaattagcaaattaatcagcacattgccttttaaatgttccactt

SEQ ID NO: 939873 - DNA, 689 bp, Homo sapiens
gaatttctaattccactcatgagtgctctgatcccaagacctaatcacctaccaaagcccccaccttctgatagcattaccttggggcttaggatttgaacatatgaactggggaggactctggggaaacacatttaaaccacagcactaatgtaggatgttaataataaaggaaactgggtgtggggtttatggaaactctcttaacttggtatgaggtatatgcaaactctctttaatatcttcagaattttcctgtaaactttaactttaatctgaacttctaaaaattatagttatacacgcatacacagagagagagagagagagagcgagagagagagagagagagagagagaagttatacatagccttcgtgttgcaggtctagcctacacttctagccttattccccctgtttaaaccttataagtcagccaatataatgaaatttccttaaggtcaagatgctactatgtttattctccmaaaaatttgaaaaataaatgagttttcttaatttcttagaagactcaataaagttgagatcataaagtgtaagttaaggaagaattctacctgaagagactcatgaaacaaaaatgatggtgaggaaagggagtgctgtttcattgactagaaaagaattagcaaattaatcagcacattgccttttaaatgttccactt

SEQ ID NO: 939874 - DNA, 532 bp, Homo sapiens
caattatttcttctttgagaccttgacacagtaaggtttatattctaagtgtatttttagcaattaaatatcaaagccaacccaattagtctaatacaggagactcgttcaatcacatgtttatgtttttctctctatgaaaaagaatctaaattggccttttttcactatgcagcagaactgtgtttctggacctctaccagtttgtcagctgagcagttctggctgcagcttgtctgttgatggatagcacagcccctctatctgagtgctcagcagagtgcttgtgaaggcagcaccacagcaacagtwgctcagagcgaacggattcaggagcctcaatttagcaatagagtccagggttttcagctcagtgtctttagcctgtctctgctggtcatgtcagttatgttctattcaatccaggaggtgctgtttacgttgtagtacatatatagtcattgcctaatgagtcatacagagagaaaagtaagttataaattatgtcccccatttgctgcaactctcagtg

SEQ ID NO: 939875 - DNA, 488 bp, Homo sapiens
cccaggaatcacctacaaactcacgagcctcacggtgctccacccccgtgtctttcatctcttcacccccaggcctcagggactctcctgtggctcccagttactctccagccatccccaggttcctgcgggagtcagccccatgcacccaggagtcccccagagactcacaggtctygggagaaagtgagcggtcccccagccctgactcctcaagattcatgcctgcctcacccagcttctccctctcccctcccagaaactcagacccaaggggcagctcctcaccagggatgtggaagtcctctacatcatcccgcagggcttcagcactctcacatccgtcatcaacagaattccacaactttacgtttccctttcctaaccaagcaggacagtcactcatgtcattgtgttctcccgtgacctcctctggagattcttcacagtcacctcattcatcaataatataccatatgttcttactg

SEQ ID NO: 939876 - DNA, 488 bp, Homo sapiens
cccaggaatcacctacaaactcacgagcctcacggtgctccacccccgtgtctttcatctcttcacccccaggcctcagggactctcctgtggctcccagttactctccagccatccccaggttcctgcgggagtcagccccatgcacccaggagtcccccagagactcacaggtctcgggagaaagtgagcggtcccycagccctgactcctcaagattcatgcctgcctcacccagcttctccctctcccctcccagaaactcagacccaaggggcagctcctcaccagggatgtggaagtcctctacatcatcccgcagggcttcagcactctcacatccgtcatcaacagaattccacaactttacgtttccctttcctaaccaagcaggacagtcactcatgtcattgtgttctcccgtgacctcctctggagattcttcacagtcacctcattcatcaataatataccatatgttcttactg

SEQ ID NO: 939877 - DNA, 388 bp, Homo sapiens
aactcacagacctcagtgagatcctcgccagtctctctcacgtcttcacccccagcccttacggaccctccagtctgtcccagctactctccaaccacgcccacatttcagcgcgggtcagttccaggatcgaagggatcaccaccaagcccaccgctttcactgagttactccccagtctctagcacgtctttatctccaaccctcagggactcgcctgtctgtcccagccactctccaarcacgcccacacttcagcgggagtccgttgcaggcacccagaagtcaccaccaaactcaccaatttcactgcgttactccccagtctctctcatgtcttcaccatccctcagggactctcccgtctgtcccagctactctccaacca

SEQ ID NO: 939878 - DNA, 627 bp, Homo sapiens
aaccccctgctggcccacgtggctgccacagcccatgctggcacgacgctccagcaggtcggcgttcctgcgggccaaactaccggtgacgtgtctagcgtgaccctccttcctggcagtgacactgttgatgtgaaccccaatttcacatctgtcrtttgtaaataggaccattttcccttttcgctctcccttccattcacagggcttttcattctctctgttactgcctccgtttcagatatttactcacctttttctctctcactttgtctgccatgggctctatgagagtgcgccacataagattccccaattaaaagtcgtgaattgagtggcttttagtatacctgtggttgtgcacattcaaatttaattcgcaattcattgtagaacgtcttatcactcccggccagagaaaaaccctgtagacattagtcactcctcattctgtctcaaaccctctccctgaccctcagccctaggtagcaactacctagtgcgatcaatcccatatgcatagattaccatattgtggacatttcctataagcggaattgcacaataggtgagctgttatgactgacataacacgtagcacaatattttcaagattcgtccacattg

SEQ ID NO: 939879 - DNA, 630 bp, Homo sapiens
aaccccctgctggcccacgtggctgccacagcccatgctggcacgacgctccagcaggtcggcgttcctgcgggccaaactaccggtgacgtgtctagcgtgaccctccttcctggcagtgacactgttgatgtgaaccccaatttcacatctgtcgttkgtaaataggaccattttcccttttcgctctcccttccattcacagggcttttcattctctctgttactgcctccgtttcagatatttactcacctttttctctctcactttgtctgccatgggctctatgagagtgcgccacataagattccccaattaaaagtcgtgaattgagtggcttttagtatacctgtggttgtgcacattcaaatttaattcgcaattcattgtagaacgtcttatcactcccggccagagaaaaaccctgtagacattagtcactcctcattctgtctcaaaccctctccctgaccctcagccctaggtagcaactacctagtgcgatcaatcccatatgcatagattaccatattgtggacatttcctataagcggaattgcacaataggtgagctgttatgactgacataacacgtagcacaatattttcaagattcgtccacattgtag

SEQ ID NO: 939880 - DNA, 627 bp, Homo sapiens
aaccccctgctggcccacgtggctgccacagcccatgctggcacgacgctccagcaggtcggcgttcctgcgggccaaactaccggtgacgtgtctagcgtgaccctccttcctggcagtgacactgttgatgtgaaccccaatttcacatctgtcgtttgtaaataggaccattttcccttttcgctctcccttccattcacagggcttttcattctctctgttactgcctccgtttcagatatttactcacctttttctctctcactwtgtctgccatgggctctatgagagtgcgccacataagattccccaattaaaagtcgtgaattgagtggcttttagtatacctgtggttgtgcacattcaaatttaattcgcaattcattgtagaacgtcttatcactcccggccagagaaaaaccctgtagacattagtcactcctcattctgtctcaaaccctctccctgaccctcagccctaggtagcaactacctagtgcgatcaatcccatatgcatagattaccatattgtggacatttcctataagcggaattgcacaataggtgagctgttatgactgacataacacgtagcacaatattttcaagattcgtccacattg

SEQ ID NO: 939881 - DNA, 635 bp, Homo sapiens
cacagctgtgcagcgggaaccccctgctggcccacgtggctgccacagcccatgctggcacgacgctccagcaggtcggcgttcctgcgggccaaactaccggtgacgtgtctagcgtgaccctccttcctggcagtgacactgttgatgtgaaccccaatttcacatctgtcgtttgtaaataggaccattttcccttttcgctctcccttccattcacagggcttttcattctctctgttactgcctccgtttcagatatttactcacctttttctctctcactttgtctgccrtgggctctatgagagtgcgccacataagattccccaattaaaagtcgtgaattgagtggcttttagtatacctgtggttgtgcacattcaaatttaattcgcaattcattgtagaacgtcttatcactcccggccagagaaaaaccctgtagacattagtcactcctcattctgtctcaaaccctctccctgaccctcagccctaggtagcaactacctagtgcgatcaatcccatatgcatagattaccatattgtggacatttcctataagcggaattgcacaataggtgagctgttatgactgacataacacgtagcacaatattttcaagattcg

SEQ ID NO: 939882 - DNA, 641 bp, Homo sapiens
aaccccctgctggcccacgtggctgccacagcccatgctggcacgacgctccagcaggtcggcgttcctgcgggccaaactaccggtgacgtgtctagcgtgaccctccttcctggcagtgacactgttgatgtgaaccccaatttcacatctgtcgtttgtaaataggaccattttcccttttcgctctcccttccattcacagggcttttcattctctctgttactgcctccgtttcagatatttactcacctttttctctctcactttgtctgccatgggctctatgagagtgcgccacataagattccccmattaaaagtcgtgaattgagtggcttttagtatacctgtggttgtgcacattcaaatttaattcgcaattcattgtagaacgtcttatcactcccggccagagaaaaaccctgtagacattagtcactcctcattctgtctcaaaccctctccctgaccctcagccctaggtagcaactacctagtgcgatcaatcccatatgcatagattaccatattgtggacatttcctataagcggaattgcacaataggtgagctgttatgactgacataacacgtagcacaatattttcaagattcgtccacattgtaggcttacccaca

SEQ ID NO: 939883 - DNA, 641 bp, Homo sapiens
aaccccctgctggcccacgtggctgccacagcccatgctggcacgacgctccagcaggtcggcgttcctgcgggccaaactaccggtgacgtgtctagcgtgaccctccttcctggcagtgacactgttgatgtgaaccccaatttcacatctgtcgtttgtaaataggaccattttcccttttcgctctcccttccattcacagggcttttcattctctctgttactgcctccgtttcagatatttactcacctttttctctctcactttgtctgccatgggctctatgagagtgcgccacataagattccccaattaaaagtcrtgaattgagtggcttttagtatacctgtggttgtgcacattcaaatttaattcgcaattcattgtagaacgtcttatcactcccggccagagaaaaaccctgtagacattagtcactcctcattctgtctcaaaccctctccctgaccctcagccctaggtagcaactacctagtgcgatcaatcccatatgcatagattaccatattgtggacatttcctataagcggaattgcacaataggtgagctgttatgactgacataacacgtagcacaatattttcaagattcgtccacattgtaggcttacccaca

SEQ ID NO: 939884 - DNA, 627 bp, Homo sapiens
cctgtggttgtgcacattcaaatttaattcgcaattcattgtagaacgtcttatcactcccggccagagaaaaaccctgtagacattagtcactcctcattctgtctcaaaccctctccctgaccctcagccctaggtagcaactacctagtgcgatcaatcccatatgcatagattaccatattgtggacatttcctataagcggaattgcacaataggtgagctgttatgactgacataacacgtagcacaatattttcaagattcgtmcacattgtaggcttacccacagggggaaaccatttttttgggggcttttagtaacaccggtgttttctccttccttacgtccttctttccttccttccttccttccttccttcctgacttccttctttccttccctccttcctcctatttctctcttactccttctgccctctctctttcctatgccttaggtgcatcccacattctgcgtttctttggggaaatcctcgacaggtgcaggaaaattgtgttattgtaactatttaccgttatctctctttcacggctctccatcagttgtgaacatctattggtttatcccaagtcactaagcatattttcattaggtaaacctg

SEQ ID NO: 939885 - DNA, 630 bp, Homo sapiens
ttagtatacctgtggttgtgcacattcaaatttaattcgcaattcattgtagaacgtcttatcactcccggccagagaaaaaccctgtagacattagtcactcctcattctgtctcaaaccctctccctgaccctcagccctaggtagcaactacctagtgcgatcaatcccatatgcatagattaccatattgtggacatttcctataagcggaattgcacaataggtgagctgttatgactgacataacacgtagcacaatattttcaagattcgtccacattgtaggcttacccacagggggaamccatttttttgggggcttttagtaacaccggtgttttctccttccttacgtccttctttccttccttccttccttccttccttcctgacttccttctttccttccctccttcctcctatttctctcttactccttctgccctctctctttcctatgccttaggtgcatcccacattctgcgtttctttggggaaatcctcgacaggtgcaggaaaattgtgttattgtaactatttaccgttatctctctttcacggctctccatcagttgtgaacatctattggtttatcccaagtcactaagcatattttcattaggtaa

SEQ ID NO: 939886 - DNA, 664 bp, Homo sapiens
gccacataagattccccaattaaaagtcgtgaattgagtggcttttagtatacctgtggttgtgcacattcaaatttaattcgcaattcattgtagaacgtcttatcactcccggccagagaaaaaccctgtagacattagtcactcctcattctgtctcaaaccctctccctgaccctcagccctaggtagcaactacctagtgcgatcaatcccatatgcatagattaccatattgtggacatttcctataagcggaattgcacaataggtgagctgttatgactgacataacacgtagcacaatattttcaagattcgtccacattgtaggcttacccacagggggaaaccatwtttttgggggcttttagtaacaccggtgttttctccttccttacgtccttctttccttccttccttccttccttccttcctgacttccttctttccttccctccttcctcctatttctctcttactccttctgccctctctctttcctatgccttaggtgcatcccacattctgcgtttctttggggaaatcctcgacaggtgcaggaaaattgtgttattgtaactatttaccgttatctctctttcacggctctccatcagttgtgaacatctattggtttatcccaagtcactaagcatatttt

SEQ ID NO: 939887 - DNA, 627 bp, Homo sapiens
cctgtggttgtgcacattcaaatttaattcgcaattcattgtagaacgtcttatcactcccggccagagaaaaaccctgtagacattagtcactcctcattctgtctcaaaccctctccctgaccctcagccctaggtagcaactacctagtgcgatcaatcccatatgcatagattaccatattgtggacatttcctataagcggaattgcacaataggtgagctgttatgactgacataacacgtagcacaatattttcaagattcgtccacattgtaggcttacccacagggggaaaccattttttkgggggcttttagtaacaccggtgttttctccttccttacgtccttctttccttccttccttccttccttccttcctgacttccttctttccttccctccttcctcctatttctctcttactccttctgccctctctctttcctatgccttaggtgcatcccacattctgcgtttctttggggaaatcctcgacaggtgcaggaaaattgtgttattgtaactatttaccgttatctctctttcacggctctccatcagttgtgaacatctattggtttatcccaagtcactaagcatattttcattaggtaaacctg

SEQ ID NO: 939888 - DNA, 664 bp, Homo sapiens
gccacataagattccccaattaaaagtcgtgaattgagtggcttttagtatacctgtggttgtgcacattcaaatttaattcgcaattcattgtagaacgtcttatcactcccggccagagaaaaaccctgtagacattagtcactcctcattctgtctcaaaccctctccctgaccctcagccctaggtagcaactacctagtgcgatcaatcccatatgcatagattaccatattgtggacatttcctataagcggaattgcacaataggtgagctgttatgactgacataacacgtagcacaatattttcaagattcgtccacattgtaggcttacccacagggggaaaccatttttttgggrgcttttagtaacaccggtgttttctccttccttacgtccttctttccttccttccttccttccttccttcctgacttccttctttccttccctccttcctcctatttctctcttactccttctgccctctctctttcctatgccttaggtgcatcccacattctgcgtttctttggggaaatcctcgacaggtgcaggaaaattgtgttattgtaactatttaccgttatctctctttcacggctctccatcagttgtgaacatctattggtttatcccaagtcactaagcatatttt

SEQ ID NO: 939889 - DNA, 700 bp, Homo sapiens
tgggctctatgagagtgcgccacataagattccccaattaaaagtcgtgaattgagtggcttttagtatacctgtggttgtgcacattcaaatttaattcgcaattcattgtagaacgtcttatcactcccggccagagaaaaaccctgtagacattagtcactcctcattctgtctcaaaccctctccctgaccctcagccctaggtagcaactacctagtgcgatcaatcccatatgcatagattaccatattgtggacatttcctataagcggaattgcacaataggtgagctgttatgactgacataacacgtagcacaatattttcaagattcgtccacattgtaggcttacccacagggggaaaccatttttttgggggcttttagtaacaccggtgttttytccttccttacgtccttctttccttccttccttccttccttccttcctgacttccttctttccttccctccttcctcctatttctctcttactccttctgccctctctctttcctatgccttaggtgcatcccacattctgcgtttctttggggaaatcctcgacaggtgcaggaaaattgtgttattgtaactatttaccgttatctctctttcacggctctccatcagttgtgaacatctattggtttatcccaagtcactaagcatattttcattaggtaaacctgttt

SEQ ID NO: 939890 - DNA, 675 bp, Homo sapiens
agattccccaattaaaagtcgtgaattgagtggcttttagtatacctgtggttgtgcacattcaaatttaattcgcaattcattgtagaacgtcttatcactcccggccagagaaaaaccctgtagacattagtcactcctcattctgtctcaaaccctctccctgaccctcagccctaggtagcaactacctagtgcgatcaatcccatatgcatagattaccatattgtggacatttcctataagcggaattgcacaataggtgagctgttatgactgacataacacgtagcacaatattttcaagattcgtccacattgtaggcttacccacagggggaaaccatttttttgggggcttttagtaacaccggtgttttctcyttccttacgtccttctttccttccttccttccttccttccttcctgacttccttctttccttccctccttcctcctatttctctcttactccttctgccctctctctttcctatgccttaggtgcatcccacattctgcgtttctttggggaaatcctcgacaggtgcaggaaaattgtgttattgtaactatttaccgttatctctctttcacggctctccatcagttgtgaacatctattggtttatcccaagtcactaagcatattttcattaggtaaacctgtttt

SEQ ID NO: 939891 - DNA, 675 bp, Homo sapiens
agattccccaattaaaagtcgtgaattgagtggcttttagtatacctgtggttgtgcacattcaaatttaattcgcaattcattgtagaacgtcttatcactcccggccagagaaaaaccctgtagacattagtcactcctcattctgtctcaaaccctctccctgaccctcagccctaggtagcaactacctagtgcgatcaatcccatatgcatagattaccatattgtggacatttcctataagcggaattgcacaataggtgagctgttatgactgacataacacgtagcacaatattttcaagattcgtccacattgtaggcttacccacagggggaaaccatttttttgggggcttttagtaacaccggtgttttctccttcyttacgtccttctttccttccttccttccttccttccttcctgacttccttctttccttccctccttcctcctatttctctcttactccttctgccctctctctttcctatgccttaggtgcatcccacattctgcgtttctttggggaaatcctcgacaggtgcaggaaaattgtgttattgtaactatttaccgttatctctctttcacggctctccatcagttgtgaacatctattggtttatcccaagtcactaagcatattttcattaggtaaacctgtttt

SEQ ID NO: 939892 - DNA, 600 bp, Homo sapiens
ttcaaatttaattcgcaattcattgtagaacgtcttatcactcccggccagagaaaaaccctgtagacattagtcactcctcattctgtctcaaaccctctccctgaccctcagccctaggtagcaactacctagtgcgatcaatcccatatgcatagattaccatattgtggacatttcctataagcggaattgcacaataggtgagctgttatgactgacataacacgtagcacaatattttcaagattcgtccacattgtaggcttacccacagggggaaaccatttttttgggggcttttagtaacaccggtgttttctccttccttacgtcsttctttccttccttccttccttccttccttcctgacttccttctttccttccctccttcctcctatttctctcttactccttctgccctctctctttcctatgccttaggtgcatcccacattctgcgtttctttggggaaatcctcgacaggtgcaggaaaattgtgttattgtaactatttaccgttatctctctttcacggctctccatcagttgtgaacatctattggtttatcccaagtcactaagcatattttcatt

SEQ ID NO: 939893 - DNA, 610 bp, Homo sapiens
aatttaattcgcaattcattgtagaacgtcttatcactcccggccagagaaaaaccctgtagacattagtcactcctcattctgtctcaaaccctctccctgaccctcagccctaggtagcaactacctagtgcgatcaatcccatatgcatagattaccatattgtggacatttcctataagcggaattgcacaataggtgagctgttatgactgacataacacgtagcacaatattttcaagattcgtccacattgtaggcttacccacagggggaaaccatttttttgggggcttttagtaacaccggtgttttctccttccttacgtccttcyttccttccttccttccttccttccttcctgacttccttctttccttccctccttcctcctatttctctcttactccttctgccctctctctttcctatgccttaggtgcatcccacattctgcgtttctttggggaaatcctcgacaggtgcaggaaaattgtgttattgtaactatttaccgttatctctctttcacggctctccatcagttgtgaacatctattggtttatcccaagtcactaagcatattttcattaggtaaacctgttt

SEQ ID NO: 939894 - DNA, 675 bp, Homo sapiens
agattccccaattaaaagtcgtgaattgagtggcttttagtatacctgtggttgtgcacattcaaatttaattcgcaattcattgtagaacgtcttatcactcccggccagagaaaaaccctgtagacattagtcactcctcattctgtctcaaaccctctccctgaccctcagccctaggtagcaactacctagtgcgatcaatcccatatgcatagattaccatattgtggacatttcctataagcggaattgcacaataggtgagctgttatgactgacataacacgtagcacaatattttcaagattcgtccacattgtaggcttacccacagggggaaaccatttttttgggggcttttagtaacaccggtgttttctccttccttacgtccttctttccttcyttccttccttccttccttcctgacttccttctttccttccctccttcctcctatttctctcttactccttctgccctctctctttcctatgccttaggtgcatcccacattctgcgtttctttggggaaatcctcgacaggtgcaggaaaattgtgttattgtaactatttaccgttatctctctttcacggctctccatcagttgtgaacatctattggtttatcccaagtcactaagcatattttcattaggtaaacctgtttt

SEQ ID NO: 939895 - DNA, 574 bp, Homo sapiens
cgtcttatcactcccggccagagaaaaaccctgtagacattagtcactcctcattctgtctcaaaccctctccctgaccctcagccctaggtagcaactacctagtgcgatcaatcccatatgcatagattaccatattgtggacatttcctataagcggaattgcacaataggtgagctgttatgactgacataacacgtagcacaatattttcaagattcgtccacattgtaggcttacccacagggggaaaccatttttttgggggcttttagtaacaccggtgttttctccttccttacgtccttctttccttccttccttccttccttccttcctgacttccttctttccttccctccttcctcctatttctctctwactccttctgccctctctctttcctatgccttaggtgcatcccacattctgcgtttctttggggaaatcctcgacaggtgcaggaaaattgtgttattgtaactatttaccgttatctctctttcacggctctccatcagttgtgaacatctattggtttatcccaagtcactaagcatattttcattaggt

SEQ ID NO: 939896 - DNA, 648 bp, Homo sapiens
gagtggcttttagtatacctgtggttgtgcacattcaaatttaattcgcaattcattgtagaacgtcttatcactcccggccagagaaaaaccctgtagacattagtcactcctcattctgtctcaaaccctctccctgaccctcagccctaggtagcaactacctagtgcgatcaatcccatatgcatagattaccatattgtggacatttcctataagcggaattgcacaataggtgagctgttatgactgacataacacgtagcacaatattttcaagattcgtccacattgtaggcttacccacagggggaaaccatttttttgggggcttttagtaacaccggtgttttctccttccttacgtccttctttccttccttccttccttccttccttcctgacttccttctttccttccctccttcctcctatttctctcttactccytctgccctctctctttcctatgccttaggtgcatcccacattctgcgtttctttggggaaatcctcgacaggtgcaggaaaattgtgttattgtaactatttaccgttatctctctttcacggctctccatcagttgtgaacatctattggtttatcccaagtcactaagcatattttcattaggtaaacctgtttt

SEQ ID NO: 939897 - DNA, 506 bp, Homo sapiens
ccccccacacccaggaatcacctgcaaactcacgagcctcacggtgctcctcccctatgtctttcatctcttcacccccaggcctcagggactctcctgtggctcccagttactctccagccatccccaggttcctgcgggagtcagccccatgcactcaggagtcccccagagactcacaggtctcgggagaatatgagcggtcccccagccctgactccycaagattcatgcctgcctcacccagcatctacctctcccctcccaggaactcagacccaaggggcagctcctcacaagggatgtggaagtactctacatcatcccgcagggtttcaccactctcacatccgtcatcggcagaattccacaactttacatttccctttcctaaccaagcaggacaatcactcatgtcattgtgttctcccgtgtcctcctctggagattcctcacagtcaccccagtcatcaataatataccatatgttcttactgccatcatcc

SEQ ID NO: 939898 - DNA, 566 bp, Homo sapiens
ccccccacacccaggaatcacctgcaaactcacgagcctcacggtgctcctcccctatgtctttcatctcttcacccccaggcctcagggactctcctgtggctcccagttactctccagccatccccaggttcctgcgggagtcagccccatgcactcaggagtcccccagagactcacaggtctcgggagaatatgagcggtcccccagccctgactcctcaagattcatgcctgcctcacccagcmtctacctctcccctcccaggaactcagacccaaggggcagctcctcacaagggatgtggaagtactctacatcatcccgcagggtttcaccactctcacatccgtcatcggcagaattccacaactttacatttccctttcctaaccaagcaggacaatcactcatgtcattgtgttctcccgtgtcctcctctggagattcctcacagtcaccccagtcatcaataatataccatatgttcttactgccatcatccagcagctcacccccagccaccaatgactctcctgtctgtcccagctactctccaactacg

SEQ ID NO: 939899 - DNA, 506 bp, Homo sapiens
ccccccacacccaggaatcacctgcaaactcacgagcctcacggtgctcctcccctatgtctttcatctcttcacccccaggcctcagggactctcctgtggctcccagttactctccagccatccccaggttcctgcgggagtcagccccatgcactcaggagtcccccagagactcacaggtctcgggagaatatgagcggtcccccagccctgactcctcaagattcatgcctgcctcacccagcatctmcctctcccctcccaggaactcagacccaaggggcagctcctcacaagggatgtggaagtactctacatcatcccgcagggtttcaccactctcacatccgtcatcggcagaattccacaactttacatttccctttcctaaccaagcaggacaatcactcatgtcattgtgttctcccgtgtcctcctctggagattcctcacagtcaccccagtcatcaataatataccatatgttcttactgccatcatcc

SEQ ID NO: 939900 - DNA, 506 bp, Homo sapiens
ccccccacacccaggaatcacctgcaaactcacgagcctcacggtgctcctcccctatgtctttcatctcttcacccccaggcctcagggactctcctgtggctcccagttactctccagccatccccaggttcctgcgggagtcagccccatgcactcaggagtcccccagagactcacaggtctcgggagaatatgagcggtcccccagccctgactcctcaagattcatgcctgcctcacccagcatctacctctcccctcccaggaactcagacccaaggggcagctcctcacaagggatgtggaagtrctctacatcatcccgcagggtttcaccactctcacatccgtcatcggcagaattccacaactttacatttccctttcctaaccaagcaggacaatcactcatgtcattgtgttctcccgtgtcctcctctggagattcctcacagtcaccccagtcatcaataatataccatatgttcttactgccatcatcc

SEQ ID NO: 939901 - DNA, 628 bp, Homo sapiens
agccccccacacccaggaatcacctgcaaactcacgagcctcacggtgctcctcccctatgtctttcatctcttcacccccaggcctcagggactctcctgtggctcccagttactctccagccatccccaggttcctgcgggagtcagccccatgcactcaggagtcccccagagactcacaggtctcgggagaatatgagcggtcccccagccctgactcctcaagattcatgcctgcctcacccagcatctacctctcccctcccaggaactcagacccaaggggcagctcctcacaagggatgtggaagtactctacatcatcccgcagggtttcamcactctcacatccgtcatcggcagaattccacaactttacatttccctttcctaaccaagcaggacaatcactcatgtcattgtgttctcccgtgtcctcctctggagattcctcacagtcaccccagtcatcaataatataccatatgttcttactgccatcatccagcagctcacccccagccaccaatgactctcctgtctgtcccagctactctccaactacgcccagatttcagcgggcgtcggtatcccacaccccagaaacacctacaaactcacagacc

SEQ ID NO: 939902 - DNA, 650 bp, Homo sapiens
ccccccacacccaggaatcacctgcaaactcacgagcctcacggtgctcctcccctatgtctttcatctcttcacccccaggcctcagggactctcctgtggctcccagttactctccagccatccccaggttcctgcgggagtcagccccatgcactcaggagtcccccagagactcacaggtctcgggagaatatgagcggtcccccagccctgactcctcaagattcatgcctgcctcacccagcatctacctctcccctcccaggaactcagacccaaggggcagctcctcacaagggatgtggaagtactctacatcatcccgcagggtttcaccactctcacrtccgtcatcggcagaattccacaactttacatttccctttcctaaccaagcaggacaatcactcatgtcattgtgttctcccgtgtcctcctctggagattcctcacagtcaccccagtcatcaataatataccatatgttcttactgccatcatccagcagctcacccccagccaccaatgactctcctgtctgtcccagctactctccaactacgcccagatttcagcgggcgtcggtatcccacaccccagaaacacctacaaactcacagacctcagtgagatcctcgccagtctct

SEQ ID NO: 939903 - DNA, 601 bp, Homo sapiens
ggaatcacctgcaaactcacgagcctcacggtgctcctcccctatgtctttcatctcttcacccccaggcctcagggactctcctgtggctcccagttactctccagccatccccaggttcctgcgggagtcagccccatgcactcaggagtcccccagagactcacaggtctcgggagaatatgagcggtcccccagccctgactcctcaagattcatgcctgcctcacccagcatctacctctcccctcccaggaactcagacccaaggggcagctcctcacaagggatgtggaagtactctacatcatcccgcagggtttcaccactctcacatccgtcatcgrcagaattccacaactttacatttccctttcctaaccaagcaggacaatcactcatgtcattgtgttctcccgtgtcctcctctggagattcctcacagtcaccccagtcatcaataatataccatatgttcttactgccatcatccagcagctcacccccagccaccaatgactctcctgtctgtcccagctactctccaactacgcccagatttcagcgggcgtcggtatcccacaccccagaaacacctaca

SEQ ID NO: 939904 - DNA, 635 bp, Homo sapiens
cccacacccaggaatcacctgcaaactcacgagcctcacggtgctcctcccctatgtctttcatctcttcacccccaggcctcagggactctcctgtggctcccagttactctccagccatccccaggttcctgcgggagtcagccccatgcactcaggagtcccccagagactcacaggtctcgggagaatatgagcggtcccccagccctgactcctcaagattcatgcctgcctcacccagcatctacctctcccctcccaggaactcagacccaaggggcagctcctcacaagggatgtggaagtactctacatcatcccgcagggtttcaccactctcacatccgtcatcggcagaattccacaactttacatytccctttcctaaccaagcaggacaatcactcatgtcattgtgttctcccgtgtcctcctctggagattcctcacagtcaccccagtcatcaataatataccatatgttcttactgccatcatccagcagctcacccccagccaccaatgactctcctgtctgtcccagctactctccaactacgcccagatttcagcgggcgtcggtatcccacaccccagaaacacctacaaactcacagacctcagtgagatcc

SEQ ID NO: 939905 - DNA, 645 bp, Homo sapiens
cacacccaggaatcacctgcaaactcacgagcctcacggtgctcctcccctatgtctttcatctcttcacccccaggcctcagggactctcctgtggctcccagttactctccagccatccccaggttcctgcgggagtcagccccatgcactcaggagtcccccagagactcacaggtctcgggagaatatgagcggtcccccagccctgactcctcaagattcatgcctgcctcacccagcatctacctctcccctcccaggaactcagacccaaggggcagctcctcacaagggatgtggaagtactctacatcatcccgcagggtttcaccactctcacatccgtcatcggcagaattccacaactttacatttccctttcctaaccaagcaggacaatcactcatgtcattgtgttctcccgtgtcctcctctggagattcctcacagtcaccccagtcatcaataatrtaccatatgttcttactgccatcatccagcagctcacccccagccaccaatgactctcctgtctgtcccagctactctccaactacgcccagatttcagcgggcgtcggtatcccacaccccagaaacacctacaaactcacagacctcagtgagatcctcgccagtctct

SEQ ID NO: 939906 - DNA, 630 bp, Homo sapiens
ctttacatttccctttcctaaccaagcaggacaatcactcatgtcattgtgttctcccgtgtcctcctctggagattcctcacagtcaccccagtcatcaataatataccatatgttcttactgccatcatccagcagctcacccccagccaccaatgactctcctgtctgtcccagctactctccaactacgcccagatttcagcgggcgtcggtatcccacaccccagaaacacctacaaactcacagacctcagtgagatcctcgccagtctctctcacgtcttcacccccaggccttacggaccctccagtctctcccagctactctccaaccacgcccacatttcagcgcgggtcagatccagggacccagggatcaccaccaagcccaccactttcactgtgttactccccagtctcaagcacgtctttatctccaaccctcaggaactctcctgtctgtcccagctactctccaaccacgcccacrtttcagcgggagtccgttgcaggcacccagaaatcaccaccaaactcaccaatttcactcaattactctccagtctctctcatgtcttcaccagccctcagggactctcccatctgtcccagctactctccaaccac

SEQ ID NO: 939907 - DNA, 630 bp, Homo sapiens
ctttacatttccctttcctaaccaagcaggacaatcactcatgtcattgtgttctcccgtgtcctcctctggagattcctcacagtcaccccagtcatcaataatataccatatgttcttactgccatcatccagcagctcacccccagccaccaatgactctcctgtctgtcccagctactctccaactacgcccagatttcagcgggcgtcggtatcccacaccccagaaacacctacaaactcacagacctcagtgagatcctcgccagtctctctcacgtcttcacccccaggccttacggaccctccagtctctcccagctactctccaaccacgcccacatttcagcgcgggtcagatccagggacccagggatcaccaccaagcccaccactttcactgtgttactccccagtctcaagcacgtctttatctccaaccctcaggaactctcctgtctgtcccagctactctccaaccacgcccacgyttcagcgggagtccgttgcaggcacccagaaatcaccaccaaactcaccaatttcactcaattactctccagtctctctcatgtcttcaccagccctcagggactctcccatctgtcccagctactctccaaccac

SEQ ID NO: 939908 - DNA, 656 bp, Homo sapiens
gcaagtacgatgggccatgcacttctggcggtcgatgaagagactgttggtcatggcggtaacgtccttctccaggctcatgtggatgtcctcgaggttgcaaagggactgctccccttctagaagcttctcccgcagcgctgtgatggacatgttcagctcctccacctcactcaccagcttggggatgttggggggtgtgagctggggctggggagggcataagtatgcacctactggggtgcaggggacccaaaactcccaatgggagctggcaggaggtcctgggaagacgccatgaaaggatcccaccaggaaagcggctctagggcagagcataaattacgagggtcctcccagggagcacggkcctgagtgggaatgagtgacctgcgtgcaatctcgaccctggcagaacaggactggcctcagccgacaaggctcagttctttccattcctgatatttgacggaaggaggcacccagttccttgaaggaactgaggggcaggaaaggaagaaaggtacttaggctcagaaggggccaccaggcatccattaacaagggaaacaaaaggacggcccatctatgcctatagcccaggcgtaggtcatactttccaccagaggtggggacagcaccctcagggcagcagg

SEQ ID NO: 939909 - DNA, 560 bp, Homo sapiens
caggtttacctaatgaaaatatgcttagtgacttgggataaaccaatagatgttcacaactgatggagagccgtgaaagagagataacggtaaatagttacaataacacaattttcctgcacctgtcgaggatttccccaaaaaaacgcagaatgtgggatgcacctaaggcataggaaagagagagggcagaaggagtaagagagaaataggaggaaggagggaaggaaagaaggaartcaggaaggaaggaaggaaggaaggaaggaaggaaggaaggaaggaaagaaggacgtaaggaaggagaaaacaccggtgttactaaaagcccccaaaaaaatggtttccccctgtgggtaagcctacaatgtggacgaatcttgaaaatattgtgctacgtgttatgtcagtcataacagctcccctattgtgcaattccgcttataggaaatgtccacaatatggtaatctatgcatatgggattgatcgcactaggtagttgctacctagggctgagggtcagggagagggtttgagacagaatgaggagtgactaatg

SEQ ID NO: 939910 - DNA, 561 bp, Homo sapiens
aaaaacaggtttacctaatgaaaatatgcttagtgacttgggataaaccaatagatgttcacaactgatggagagccgtgaaagagagataacggtaaatagttacaataacacaattttcctgcacctgtcgaggatttccccaaaaaaacgcagaatgtgggatgcacctaaggcataggaaagagagagggcagaaggagtaagagagaaataggaggaaggagggaaggaaagaaggaagtcaggaaggaaggaargaaggaaggaaggaaggaaggaaggaaggaaagaaggacgtaaggaaggagaaaacaccggtgttactaaaagcccccaaaaaaatggtttccccctgtgggtaagcctacaatgtggacgaatcttgaaaatattgtgctacgtgttatgtcagtcataacagctcccctattgtgcaattccgcttataggaaatgtccacaatatggtaatctatgcatatgggattgatcgcactaggtagttgctacctagggctgagggtcagggagagggtttgagacagaatgaggagtgact

SEQ ID NO: 939911 - DNA, 492 bp, Homo sapiens
aggaaaaacaggtttacctaatgaaaatatgcttagtgacttgggataaaccaatagatgttcacaactgatggagagccgtgaaagagagataacggtaaatagttacaataacacaattttcctgcacctgtcgaggatttccccaaaaaaacgcagaatgtgggatgcacctaaggcataggaaagagagagggcagaaggagtaagagagaaataggaggaaggagggaaggaaagaaggaagtcaggaaggaaggaaggaagraaggaaggaaggaaggaaggaaggaaagaaggacgtaaggaaggagaaaacaccggtgttactaaaagcccccaaaaaaatggtttccccctgtgggtaagcctacaatgtggacgaatcttgaaaatattgtgctacgtgttatgtcagtcataacagctcccctattgtgcaattccgcttataggaaatgtccacaatatggtaatctatgcatatgggat

SEQ ID NO: 939912 - DNA, 471 bp, Homo sapiens
ttacctaatgaaaatatgcttagtgacttgggataaaccaatagatgttcacaactgatggagagccgtgaaagagagataacggtaaatagttacaataacacaattttcctgcacctgtcgaggatttccccaaaaaaacgcagaatgtgggatgcacctaaggcataggaaagagagagggcagaaggagtaagagagaaataggaggaaggagggaaggaaagaaggaagtcaggaaggaaggaaggaaggaaggaaggaaggaagraaggaaggaaagaaggacgtaaggaaggagaaaacaccggtgttactaaaagcccccaaaaaaatggtttccccctgtgggtaagcctacaatgtggacgaatcttgaaaatattgtgctacgtgttatgtcagtcataacagctcccctattgtgcaattccgcttataggaaatgtccacaatatggtaatctatgca

SEQ ID NO: 939913 - DNA, 636 bp, Homo sapiens
caacttcctctcttcctttttcaataccctttatttctttctcttgcctgattgccctggctagaactcccaatattatgttgaataggagtggtgagcgagggcattcttatcttgtgcatgccagttttaaagaggaatgcttccagcttttgcccagtcagtataatattggatgtaggtttgtcataaatggctcttactattttgagatgtgttcatcaatacctagtttttttgagagttttaaacatgcagggatgttgaattttatagaaggcctattctgtgtctgttcagataatcatgtggtttctgtctttagttctgtttatgtgataaattttaccgatttgtgtatgtcaaaccagtcttgcatcttgggggtgaaggcaacttgattgtggtgaataagcttttagatgtgctgctgkattcggtttgccagtattttattgacgatttttgcatcaatgttcatcagaggtattggcctgaagttttccttttttgttgtatcttttccaggttttggtaccaggatgatgcgggcctcataaaatgagttaaggagtccctccttttcaattgtttggaagcgtttcagaagaaatggtgccagttcctgtttgtacc

SEQ ID NO: 939914 - DNA, 736 bp, Homo sapiens
gtatacttctgacctttccagctgaacacaaattacttctggtgggccttgtggacagaaatggagaaaaaggcatttgcctagtcaataccagataccaggagatttgttgatttgctcaaacaataaaactatctggtacagcagatacaattggagtcaccacttggttaagcttacaatactctgctgttttctccaagatccatctgtcttcagcacaagccaaatggggtagttgaatggcgatatggtgggaatcaccaccccttcatctttcaagaccttggtggtggcactaatctctgcaatccctccagggatgtggtattgtttttgatttacttttgattttctatgtagaggcagatgtaatggcttctatttgacctttcccccaataatagcccttaccctaccagttagggagccaatgtgggggttctgctagctgctaagtatgtctctgccaattatgcattttggccctggggaaatgaccatagaatgagtacagcgacccactggacccrctgtaagtcagacctgagctaaaattccattaattacctgacctccataagcccctacttcaactggaggaccacaatgacgttttgtgtcccctggaatcaatgtcagctcagatccagtgtccagtagtccctgaaacgtctgatcatttccctttccccagtgcacagttactctgataaaaggctggaggtttccttgg

SEQ ID NO: 939915 - DNA, 739 bp, Homo sapiens
acctgagctaaaattccattaattacctgacctccataagcccctacttcaactggaggaccacaatgacgttttgtgtcccctggaatcaatgtcagctcagatccagtgtccagtagtccctgaaacgtctgatcatttccctttccccagtgcacagttactctgataaaaggctggaggtttccttggggaaggataggtgaaagattcactgcataaattatcagtagagtagtggggtccttcttcaaggtgagccggcttccccttcacttaaggggttctgggtttgtaaaatggctcaagtctggaaatttattgactggccatgtttttttttaataattcaaattagtcttttgtccatttgacctagaagttttctgcttatataaattaaataggaatgcagtaggcttcctatcaatttcacttctagaaacactttgattaattaggtaatgccagagtgctatacgactcagactattctgattgccatttgcctctgctgtctattactgtagctacggccaccttgcttttgatrgttgagtgatgccacttggcccctgccacctcaggatccaattattcccattgtatttaaattttgtagttgagtgactgtggtttccactgttagatctgacatacagaaaagagcaattacagggtccttcaaaaatgcagatgctacccttataaatctattttgcaaggcattgatcaaggg

SEQ ID NO: 939916 - DNA, 609 bp, Homo sapiens
cctgtggtgcccaacccgtacactcttttgtcctgaataccttcctccacaactcactattccctgcttgatcttaaagacgcttttttcactattcccctgcacccctcgtcccagcctctctttgctttcatttggactgaccttgacaccatcaagctcagcaaactacctaggctgtactgccgcaaagcttcacagacagcccccattacttcawtcaagcccaaatttcttcctcatctgttacctatctcggcataattctcataaaaacacacgtgctctccctgccaatcgtgtctgactgatctctcaaaccccagcacctcctacaaaacaacaactcctttccttcctaggcatggttagcgcagtcagaattcttacacaagagccaggaccacaccctgtagcctttctgtccaaacaacttgaccttactgttttagcctagccctcatgtctgcatgcagtggctgccgctgctttaatacttttagaggccctcaaaatcacaaactatgctcaactcactctctacagttctcataacttccaaaatctattttcttcctcatacctgacgcatatactttctgcttcccg

SEQ ID NO: 939917 - DNA, 690 bp, Homo sapiens
gaactcctgacctcaggtggtctacccgccttggcctcccaaagtgctgggattataagtgtgagccactgcacctggcctctctttttaaaattttatttgcagattgttcattgttagtttatggaaatgcaactgacttgtgtgtgttactgtatcctgaaactttgttgaatttcattattttaccagtattttgggaatttcaggatttttacccattacatcctgttgtctgtgaacaaaattttgtactttttcctttccaatttgcatcctttttattactttctcttgactaattattctgagtagaaattccagtactgtgatgaatagaagtggcaggaagagatgttgytatcttattcctgatcctagaggaaaagattttagtctttcaccattgagtatgatgttagctgtgagcttttcctgtataatctttatttactgaggagtttccatatattactaattctttgagtgtttttattacaaaaggtgttcatctggctctggaaccagataaacgttgacctgataaatggattggaatgtccccttctggtttttgaacatttttggaatattttgcagaggattggcattaattcttcttgaaatatttggtaaaattttccagtgaagttatctggacatggaattttctttttggtggggtttttg

SEQ ID NO: 939918 - DNA, 690 bp, Homo sapiens
gaactcctgacctcaggtggtctacccgccttggcctcccaaagtgctgggattataagtgtgagccactgcacctggcctctctttttaaaattttatttgcagattgttcattgttagtttatggaaatgcaactgacttgtgtgtgttactgtatcctgaaactttgttgaatttcattattttaccagtattttgggaatttcaggatttttacccattacatcctgttgtctgtgaacaaaattttgtactttttcctttccaatttgcatcctttttattactttctcttgactaattattctgagtagaaattccagtactgtgatgaatagaagtggcaggaagagatgttgttatcttattcctgatcctagaggaaaagattttagtctttcaccattgagtatgatgttagctgtgagcttttcctgtataatctttatttactgaggagtttccatatattactaattctttgagtgtttttattacaaaaggtgttcatctggctctggaaccagataaaygttgacctgataaatggattggaatgtccccttctggtttttgaacatttttggaatattttgcagaggattggcattaattcttcttgaaatatttggtaaaattttccagtgaagttatctggacatggaattttctttttggtggggtttttg

SEQ ID NO: 939919 - DNA, 544 bp, Homo sapiens
taaagaagttattcatggacccgaaccaaataccaccgtaccccaataacctatgggaaaaaaaataaaaaatacaataaaaaagagtcagaaaaaaagaaaataatcactgtacttaccatgacacttagaaatggtggctagcattatttgtgtcacctaatattattattttttctttatgctacaaactagctctgctattacaatcactactatttgaagtgttactaaattaaattaaatttattgtatccttctggactcagaaatgggggtaaatgctaagacaatttcagaatattatcacatattaaaagcwtattatatggggaaaatgtgattttaaaaaaatagaaattggtagagaaacagtttttgggtctctttgatttccgcacattttgcaagtatggacgctgactttcttgttccaaatgatagttttcaagcatgtttgtatagaaaacagccttggaatagaaaaccagtacctccttctggaacaaaggaaaagtttatttactgtctagtataatgcaga

SEQ ID NO: 939920 - DNA, 655 bp, Homo sapiens
gagttagggcacccttaccctgaggaactgttgggaacaagcctccccaaatctggccataaactggccccaaaactggccataaacaaaatctctgcagcactgtgacatgttcatgatggccataacacccaggctggaaggttgtgggtttactggaatgagaacaaggaatacctggcccgtccagggtggaaaaccacttaaaggcattcttaagccacaaacaatagcatgagtgatctgtgccttaagaataagggatacttttagttaatctaatatctatagaaacaatgytaatgactggcttgctgttaataaatacgtgggtaaatctctgttcagggctctgctctgaaggctgtaagacccgccccccccccccgatttcccacttcacacctctatatttctgtgtgtgtgtctttaattcctctagtgctgctgggttagggtctctccaaccgacctggtctcagcaagtggtgcccattcatgggggctcaaatacaggtcaaaggatcgctggagcaacgattggagaatgtggaactagctggaggacacccgagtactcttaaagcaatccccgtggtgagtaagaaggggagctcggaagcatcagggtagcaataggacaagtgtgggctgt

SEQ ID NO: 939921 - DNA, 603 bp, Homo sapiens
ggaattctccagttttcataattaagaaaaaatcaggtaaatggagaatgttaactgacttaagagccatcaattcagttatacaacctatggaaatataacagccaggattcccttctctactataattccaaaaaattggcctttaataatcacagatttaaaagactgtttctttactatccttttagctgagcaagactgtgaacggtttgcatttacaattcctgcagtaaacaacctgcagcctgctaagcgttttcattgtttcacagatgggtctagtaatggtaaaggttcttattctggatcaaaagctaaagttttccagacaccctatacttcagctcaaaaggyggagcttgtagctgtaattgaggtgttgactgcttttgatatgcctgttaatgtgatttctgattcttcatacatgggtcattccacacagttaattgaaaatgctcagttaagatttgatacagatgaacaactgataataaaaacaaaaacgggggagaaacagggattatgggatagcccatacacaattgaatcttgcattattaactttcaaatttttgagcctgcccaaaggccagatgt

SEQ ID NO: 939922 - DNA, 609 bp, Homo sapiens
gtgaacaccaaatcagctactctcctgtattcggagatcaggatgaaatgaaaagaacaagcaggccgggcacggtggctcatgcctgtaatgtcaacactttgggaggcttacgtgtgcggatcacccgaggttgggagttcgagaccagcctgaccaacatggagaaaccccgtctctactaaaaatgcaaaatgagctgggcgtggtggcacaagcctgtaatcccagcttgggaggctgaggcaggataagtgcttaaacctgagaggcggaggttgcggtgaggcaatattgcaacattgcactccagcctgggcaacaagagtgaaactccatctcaaaaaaataaaaaataaaaaaagacccccaaccttgtctagactgtggggttcagtttcacccmgggggggtcctggttgggttagaaccctgaatctggtttgagttcgtatcctaaagaataaagggaataaaggctgtagccactaagctactcaatctggtccggttctggcttttgtgtgtctgtctgtatttttggtctaaatatttggcccaacagaggttaaaggctttgatgttctcagcaaaagccttgtgagatct

SEQ ID NO: 939923 - DNA, 634 bp, Homo sapiens
ggtggggtcagccaggtggaagttgctgctgggggttgctgggaggagaggcatgggctgcctttcacgtggggctaactcagacctctctccccgacctgctaggacccctccagaggccactgctgaagacgaaaaacactactgccgttcactgggggaggtgataatgttgactgcaggcagttggctcggggaggagccttcttgggaatcctactcagcctggatggggagaaatctgggagaggctgtgtgtgagcaggcagtgcagggaagacttcctggaggagggagcctggcttccaccgcacaggccaaggcacaggggctgggaccagggaaggaggtgtctgggctaggcctctcgctttatcttgagctctggttcactgtgataggctcgttgctaaccaggcccggccctccccagctccaaacccgactgccaggcagtgaggattcttcttcccacccrgccactctcagagatgcagacacagaccctggagggtgggcccgaaagcttccaggaccttctctccagtgcagattcagggggaactgtcgtttcccatcaccacggaagccacactacttgtcacaagccaccagtcactacagtgacacccag

SEQ ID NO: 939924 - DNA, 548 bp, Homo sapiens
  misc_feature 513, 514, 515, 516, 517, 518, 519, 520, 521, 522, 523, 524,525, 526, 527, 528, 529, 530, 531, 532, 533, 534, 535, 536,537, 538, 539, 540, 541, 542, 543, 544, 545, 546, 547, 548: n = A,T,C or G
tgctaaccaggcccggccctccccagctccaaacccgactgccaggcagtgaggattcttcttcccacccggccactctcagagatgcagacacagaccctggagggtgggcccgaaagcttccaggaccttctctccagtgcagattcagggggaactgtcrtttcccatcaccacggaagccacactacttgtcacaagccaccagtcactacagtgacacccaggcccactcttattctttggggtgccatttaaattcgccctggatgctgttaccatggggctttgacagccaggagcagaggcagtgggacacagcagccaagtctcacctgggggctgcagacagttggtgtcctgtccatgtagctcctcaaagctgttccaggacaccaggcaggggctgaggcaatgacctgcccagggaataccaaagaaccatctccctgcaatcacccccacccagcacagggaaaacctgcagtgaggcagatggtggtgaactcaaannnnnnnnnnnnnnnnnnnnnnnnnnnnnnnnnnnn

SEQ ID NO: 939925 - DNA, 591 bp, Homo sapiens
cttttgaagtacacaaactacagactgttccgcaatgacaatttctcatgtataaactatgcattcaacaaaggtctaatattcagaatctataaggaacttaaatttacaaacacaaaacaaacaacctcatcaaaaaatgggcaaaggacatgaacagacacttgttaaaagaagacacacacatggccaacaatcatatgaaaaaatgcccacataactaatcactacaaaaatgcaaatcaaaatcatgagatagcatctcacaccagtcagaatgacattattaaaaagtaaaaaaaaaaacagatgctaatgaggttgcagagaaaakagaatgatcatatactggatgggaatgtaaattagttcagccactgtgaaaagcagtcaagaaatttcttatgaaacttaaaacaactaccattcaatccagcaatcccattactggatatacacccaaaggaatataattcattctgccataaagacatatgtgctcatatgttattctcagcactattcacaatagcacacacatggagtcaacctagatgctcatcaatagtggactggataaggaaaatgtga

SEQ ID NO: 939926 - DNA, 625 bp, Homo sapiens
gaaatgcggaagtgtgactcttccaactttgttcttctttttcaagattttttggctattctgggttacttgcattgctatataaattttagaaccatactgtttattttcccaaaaacatttctgggtttttcagtaaagtttttgttttgttttgttttgtttgtttgtttggagatgatgtctcgctatgttgcccaggctgggcttgaactccgggactcaagggatcctcccacctcagcctcttgagtagctgagattacaaaggtgagccactgtgcatagctgggaagtacaattaatgtgataagtttttaaaatctagttcaaattaatacaaacttgattttgatagtacaccaaaactttgctctgacatagctctattccctcctccctccttggtgcttttattttcatacaaattacatctgtatacattataaactcatcaacatagttttacaattattgctttatrtaatttcgatcagataggagaagaaaaaaatacaaaccaaaataacacaataaagctggcttttatatttctctttgtacctacctttaccagtactctttattgttttatgtggatttgagtcactgtccagtctctcca

SEQ ID NO: 939927 - DNA, 660 bp, Homo sapiens
taataatgcttcagtaactgatctggacccaattggaagattaattacattcatcgcctccctcatcccaatccttattttttcccccctcagaattgcttgccttcatctttctgaagccttctcagagttaagaaatcctgtcttcttcctcaaagccctattctgagtcatcactgctttgggtatctcctgtccttctcaatcagatttgtagctatctagmacatactgtctcctacaacctgcctaaactttgtataaatttctttctagacctcttcttgatcatctcgtgtgtctgacttagcaatgtattagctgcagttccctcactcatcctcttacttcttctgccgcttagcaaagaggaaacagaagcttttatagaatctgtgagctgtaaagtactttaaaagtaacattcctgtgtgacctgaatctcatgatactgatagccagctcaaaaactaatcacattgggaggatgtggggtaaaatgacatcacaggaaagctttaaaaacataggacaaggagagaaggaagctttaaagcctatgaggtcagaggtcagcagttggtggtacaatgttgattaattaaattcatagtcacacatcaaataaattcacatgtcccggaggggaaaaaaaaaaaa

SEQ ID NO: 939928 - DNA, 660 bp, Homo sapiens
taataatgcttcagtaactgatctggacccaattggaagattaattacattcatcgcctccctcatcccaatccttattttttcccccctcagaattgcttgccttcatctttctgaagccttctcagagttaagaaatcctgtcttcttcctcaaagccctattctgagtcatcactgctttgggtatctcctgtccttctcaatcagatttgtagctatctagcacatactgtctcctacaacctgcctaaactttgtatamatttctttctagacctcttcttgatcatctcgtgtgtctgacttagcaatgtattagctgcagttccctcactcatcctcttacttcttctgccgcttagcaaagaggaaacagaagcttttatagaatctgtgagctgtaaagtactttaaaagtaacattcctgtgtgacctgaatctcatgatactgatagccagctcaaaaactaatcacattgggaggatgtggggtaaaatgacatcacaggaaagctttaaaaacataggacaaggagagaaggaagctttaaagcctatgaggtcagaggtcagcagttggtggtacaatgttgattaattaaattcatagtcacacatcaaataaattcacatgtcccggaggggaaaaaaaaaaaa

SEQ ID NO: 939929 - DNA, 660 bp, Homo sapiens
taataatgcttcagtaactgatctggacccaattggaagattaattacattcatcgcctccctcatcccaatccttattttttcccccctcagaattgcttgccttcatctttctgaagccttctcagagttaagaaatcctgtcttcttcctcaaagccctattctgagtcatcactgctttgggtatctcctgtccttctcaatcagatttgtagctatctagcacatactgtctcctacaacctgcctaaactttgtataaatttctttmtagacctcttcttgatcatctcgtgtgtctgacttagcaatgtattagctgcagttccctcactcatcctcttacttcttctgccgcttagcaaagaggaaacagaagcttttatagaatctgtgagctgtaaagtactttaaaagtaacattcctgtgtgacctgaatctcatgatactgatagccagctcaaaaactaatcacattgggaggatgtggggtaaaatgacatcacaggaaagctttaaaaacataggacaaggagagaaggaagctttaaagcctatgaggtcagaggtcagcagttggtggtacaatgttgattaattaaattcatagtcacacatcaaataaattcacatgtcccggaggggaaaaaaaaaaaa

SEQ ID NO: 939930 - DNA, 600 bp, Homo sapiens
tttccttgtagttgtgtggtttcaggtgaacttcttaatcttgagttctagtttgattgtgctgtggtctgagagactgttaagatttaagttcttttgcatttgctgaggagtattttaattctcattatgtgatcaattttagagtaagtgccagagttctgtagatatctatcaggtccmcttgatccagagcttagttcaggccctaaatatctttgttaattttctgtctcagtgatctgtctaataatgtaagtggggtgttaaagtctcccactattattatgtgggagttgaagtctctttgcagatctctaagaacttgctttatgaatttaggtgttcctgtattgggtatatatatataatagttagctcttcttgttgaattgaactctttaccattatgcaatacccttcttgtcttttttgatatttgttgctttaaagtctattttgtcagaaattaggagtgcaacccctgcttttttctgtcttctatttgcttggtaaattttcctccactctgttattttgagcctatctgtatctttgcatgtgagatgggtctcttgcagagagcatgcaaatgggcct

SEQ ID NO: 939931 - DNA, 606 bp, Homo sapiens
taaaaagtttttttgtagagatgggggtctcactatgttgcccagtatttctgaggattttaaaaactgtgataaaatatataacataaaacatagcatcttaactatttgaactgtgcagttcagtagtgttaagtacattcacgttgttgtgcaaccaatctccagaacactttcatcttgcccaactgaaattttatagccattaaacaataactcctaactttttcctcctcctcctgtcccctgtcaaccatcattctactttttgtctattgcttgaataatctgggtacctcatataagtggaatcataaagtattcatccttttgtgattggcttattgtgacttagcataatgttctcaaggttcaaccaggttgaagcatgtgtcagaatttcattcctttgtagggctaaataatattycattgtatggatataccacattttgattttccattcatctgttgatggacatttcagttgtttccacctttgggctactgtgactattgctgctatgaacgtaggtttcaaatatctgtccaaggccctgttttccacagcagctatcatcttacattcccagcaacagtggacaa

SEQ ID NO: 939932 - DNA, 576 bp, Homo sapiens
ctgtttatttctatggtataaattgtcaggtcttctctttcatttctgattttatttgtgtcttttttcttcttttttagtaggtctagctaaaggtttgtcaattttgtttatcattaaaaaaaagtctagttttggccaggtgtggtggcccaagcctgtaatcccagcactttaggaagcggaggttggtgggtcacgagatcaggagatcgagaccattctggctgacacggtgaaaccccgtctctactaaaaaaatacaaaaaaattasccgggcgtggtggcgggcgcctgtagtcccagctactcaggaggctgaggtgggagaatggcgtgaacccaggaggcggagcttgcagtgagccgagatcgcgccactgcacttcagcctgggtgacaaagcaagactccatctcaaaaaaaaaaaaaaaaaaaaaaaaaaaaaagtctagttttgttgattttttttactattgtttttctgtagtctatttgttctgttctaaactttatttcctttttttttctgctaacttggggcttaatttgttctttatttctactttcttgag

SEQ ID NO: 939933 - DNA, 650 bp, Homo sapiens
cattgtttgtcagctcatccatagcacaataggacaatagatagactgctaacattttgactccagtccctggttcgtggctagcacctcatgaataacctggggcctgggggaaataactgcccaggtagccaggtagttgtttcagcaggtgttgggcaagatcctggcttcaggtatgacccagcacagtcccagtgaccacaggggtgcttgtgtcacctcatccccagttgcaggtggctcagaaagagagagaaacatttttttgtgagaaagtaagggaagagaataagagtgtctgcctggcaatctatagatttcttctggatcttattcaagacgatcaaggtggtacctctatgactgtgcaagaaccacaggataactgggcttggggtggcccccaayagaaacacaacttataacacaacaccttattccttttgaatatttggaaagctttcccaagaaggacaggtacaaacaagcccagactgtgaagaccacagtaaataccaaacccttcaatgctcaggcatagatggacatacacaataatcaagatcatccaggaagatatgaactcaccaaatgaaccaaataaagtaccagggaccaatcctagagaacagacatatgtgaccttt

SEQ ID NO: 939934 - DNA, 707 bp, Homo sapiens
attacaacaacattgcccctccctgggtctgcagctccacgaccctcagactagtacaagacctctcccggggtcgccagcttccagaccctcaaactacaacaaaattgctcctccctgggtctgcagctccacgaccctcacaccagaagaagacctctcctccctgggtcgccagcttcctgaccctsgaactacaacaaaattgctcctccctgcgtcagcagctccacgaccctcagaccacaacaagacctctcctccctgggtcgccagctttctgaccctcgaactataacaacaatgctcctgcctcagtctgcagctccatgaccctgaaactagaacaacacgtctcctccctaagtctgcagcttccagatcctcgaattgcaacaactttgctcctgcctgggtcttcagctccacaaaaatcaatctagaacaagacctctcctccctgggtcgccagcttccagaccctcgaactacaacaaaattgctcctccctgggtcagcagctccacgaccctcagaccacaacaagacctctcctccctgggtcgccagctttctgaccctccaactataacaataatgctcctgcctcagtctgcagctccacgaccctgaaactagaacaagacgtctcctccctaagtctccagcttcccgatcctcaaattgcaacaaccttgctcctgcct

SEQ ID NO: 939935 - DNA, 697 bp, Homo sapiens
agtccaagggtcctgagaagtagtagcaggagcaccacaaagaagtgtcccgtggtcaggtacactggggaaatggggctggttttgtttaaccgcaagtcttttcaggatgttggaagtgggcatacccatgggaatgagcaaggctgtttggtgtttctcaggtgtacctgatcacacagccctcggaggaccagcactctgaggaatgtatttttggggaagtgtaggtatcaggtccaggattttggatctcagtccatgttcatcctcaaagcccagtgatggtggtcatttcaggtgagctgggctggacctctgaaggaagcaaagattgtgagggttgctctcaagggtcttctgggcatgtttggaaaagtggacaagatggcggtgtcagcgaaaaagagcagggggcaggtgggcccctgggcaggagagggtggggggaaagggagccaggtkaggcacctgagaagttgtggcagcctcttagggacaaagctgaatttccctgagactagaaacctcttcttccgaaaactctgatactttttgtactgggcctatctcttgtcacttaggcaaattccttttcagttaatgggaccaaagagagatgtttttgcctccccctaagctggaggtagttggcttaaagtggaagaatcccgaggaggcggggacctggtaaggc

SEQ ID NO: 939936 - DNA, 811 bp, Homo sapiens
ctgatgacatcaccaccagtgtgacacctgatggcctcaccatcacctgcttaaaaccattccatgctttcccatgggcttaaagatagattttaaaacaacagcttcactgaatatcttcattaatatataattcaaatatcacagagtccactcttgaaaagtacaattcaggccgggtatggtggctcacgcctgtaatcccagcactttgggaagcctaggtgggtggattgcgtgagtccaggaattcgagaccagccttggcaacatggggaaaccccgtctctacaaaaaatacaaaagttagccgggcgtggtcatgcacgcatgtagtcccagctactcaggtggctgaggtgggaggatggcatgaacttgggagtctaggccattgtaagctgagatcacaccactgtactccagcctgggtgacagagagagagagaccctgtctcaaaaagaaaagtatacaattctgttgtctttagtgtagtcacttggttgtataatcgtcatcactagctaactccacgttttcaccacgtcaaaaaagaaacccttcatccattagcactcactccccaatctgccttccccccagccccagacaaccacgaatctacttctccctctacgggtttgcytattctgcatattttatattagtggaatcacacaatatgcagtcttttgtgtctggtttctttcatttagcacaatgttttcaaggctggtctgggctataacatgtatccgtattttattccttttcatggctaattggcatttgatggtgttgctatgccac

SEQ ID NO: 939937 - DNA, 717 bp, Homo sapiens
tagagacggggtttcaccatgttggccaggctggtctcgaactacctcaggtgatccacctgcctcagcctcccaaagtgctgggattacaggcgtgagccagcacacctgtcctcaataaagctgttttttaaaaggcagccaggaggatgaacattggatgactgcactgataggaggtccctagagtagtcagatttatagaaacagacaaaatagtggctgcagggaccaggaggaggggctggggagctggtgtttaatggttgtagagtttcagtttgacaagatgaagttttgtggatggatgacaatgatggttgcacaacagygtgaatatactttttttttttttttttttttttttgagacagagtcttgctctgtcgcccaggctggagtgtagtggcatgatctcggctcactgcaacctctgcctcctggattcaagcgattctcctgcctcagcctcccgagtagctgggattacgggcacgtgccaccacacccggctaattttttttatttttagtagagacggggtttcaccaagttggccaggctggtcttgaactccttacctcaggtgacccgcctgcctcagcctcccaaagtgctgggatgacaggcatgagccaccatgcccagccaggtgaatgtacttaattccatggaactgtactgttaaaatagttaaaatagtaaatgttatatgtt

SEQ ID NO: 939938 - DNA, 623 bp, Homo sapiens
acttatactttaaagtggcttttgaaagtagaaggaaactaaattagattttaattgaaattgatacagacaggaggccaggaaatgtggggtagaagagtgcagggtccctggtgaggtctctgctctcaagctggggcccacggccctaaatgagaatttcacatccctgttttcccacccaaatattgcttttggcctgccctgcccctctatcctgtgcccatataaaccccagacctcagctggcagagggccaagaggctgaatgtcgagtggggaagaggcaactgagtgtcagagactgtggatagacttggcttaatttcagatggcatgactttggagaggagccaactggagatggtttggcttcaggggatgattatcttcccacttcatcccctttccagctcctcatccaactgagagccacyttcatcactcaataaaacctccacattcatcatccctcaagtccatctgatttgattcttcctggatgtcagacaaggaccagggtaccaagagggcagggtgtaaaacgctgtcacccagctcaccactgagctggtgaacacttaagtcatttgcatatggctactgctaaaagagcattagtt

SEQ ID NO: 939939 - DNA, 623 bp, Homo sapiens
acttatactttaaagtggcttttgaaagtagaaggaaactaaattagattttaattgaaattgatacagacaggaggccaggaaatgtggggtagaagagtgcagggtccctggtgaggtctctgctctcaagctggggcccacggccctaaatgagaatttcacatccctgttttcccacccaaatattgcttttggcctgccctgcccctctatcctgtgcccatataaaccccagacctcagctggcagagggccaagaggctgaatgtcgagtggggaagaggcaactgagtgtcagagactgtggatagacttggcttaatttcagatggcatgactttggagaggagccaactggagatggtttggcttcaggggatgattatcttcccacttcatcccctttccagctcctcatccaactgagagccaccttcatcactcaataaaacctccacattcatcatccytcaagtccatctgatttgattcttcctggatgtcagacaaggaccagggtaccaagagggcagggtgtaaaacgctgtcacccagctcaccactgagctggtgaacacttaagtcatttgcatatggctactgctaaaagagcattagtt

SEQ ID NO: 939940 - DNA, 653 bp, Homo sapiens
gacctcggccccccaccgctgtggaccctgatgcagagcccaccctgctgcgtgagccccaggtgagggccatagtctctagagggacgggggtgtcagggcaggactccgggtcccaacccagggcaggttgtccagggggcrgcaggggctcatagctcagcctgctcactagggcctatccctgcaggccaccgtggtcttcaccacccatgtgcccacgctgggccgctatgccttcctgctgcacggctaccagccagcccaccccaccttccccgtggaagtcctcatcaacgccggccgcgtgtggcagggtgagtgtctggtgtggggggtggagaggctaccacacacgatgaggctggaatgccggcgccacagcgtggcctgtgctacctgctatgagcgacaggcaacatgactctgtcctgccatcagttctcaaactagctgcccttgcagcccgcagcccctacccgcccgctcccgttcccagaaaagcctgggtctcgcctctgtctcgtgcgttgggaagccccgttgtgctccatggcacgtggcgaattgagggcttgccccaggatgccgctggcagcacatgtggccctgtgtgtttgtctggttcctggctcggccaagcctggggtccc

SEQ ID NO: 939941 - DNA, 585 bp, Homo sapiens
tttcttctcagaaaatgggtttttcttttctactgcaccatcaggctgcaattttttgaatcttttatgctctgcttctctttttaacataagttccaattccaaaccatatctttgtgaatacataaggctgaatgcttttaacagcaccygaatcacctctgtaagataccctaaatcatttctttcaatgtcaaagtttcacagatctctatggcaggggcaaaatgcagctagtctctttgctaaaacatagcaagggtcacctttattccagtgcccagcgtgtttctcatccccatctgagatgagcagcatttggtcaaagccatttagcaagtctctaggaagttccagtctttctcacataatcctgtcttcttctgagccctccaaactgttccaacctctgcctgttacccagttgcaacatcgcttccacatttttgggtatctttacagcagcaccccattctactggaacaaatttactgttagtctgtttggacactgctagtaaagacacactggagactggggagtttataaagaaatggggattaattgactcacagttccacatgg

SEQ ID NO: 939942 - DNA, 585 bp, Homo sapiens
tttcttctcagaaaatgggtttttcttttctactgcaccatcaggctgcaattttttgaatcttttatgctctgcttctctttttaacataagttccaattccaaaccatatctttgtgaatacataaggctgaatgcttttaacagcacccgaatcacctctgtaagataccctaaatcatttctttcaatgtcaaagtttcacagatctctatggcaggggcaaaatgcagctagtctctttgytaaaacatagcaagggtcacctttattccagtgcccagcgtgtttctcatccccatctgagatgagcagcatttggtcaaagccatttagcaagtctctaggaagttccagtctttctcacataatcctgtcttcttctgagccctccaaactgttccaacctctgcctgttacccagttgcaacatcgcttccacatttttgggtatctttacagcagcaccccattctactggaacaaatttactgttagtctgtttggacactgctagtaaagacacactggagactggggagtttataaagaaatggggattaattgactcacagttccacatgg

SEQ ID NO: 939943 - DNA, 594 bp, Homo sapiens
cttctcagaaaatgggtttttcttttctactgcaccatcaggctgcaattttttgaatcttttatgctctgcttctctttttaacataagttccaattccaaaccatatctttgtgaatacataaggctgaatgcttttaacagcacccgaatcacctctgtaagataccctaaatcatttctttcaatgtcaaagtttcacagatctctatggcaggggcaaaatgcagctagtctctttgctaaaacatagcaagggtcacctttattccagtgcccagcrtgtttctcatccccatctgagatgagcagcatttggtcaaagccatttagcaagtctctaggaagttccagtctttctcacataatcctgtcttcttctgagccctccaaactgttccaacctctgcctgttacccagttgcaacatcgcttccacatttttgggtatctttacagcagcaccccattctactggaacaaatttactgttagtctgtttggacactgctagtaaagacacactggagactggggagtttataaagaaatggggattaattgactcacagttccacatggctgaggaggtct

SEQ ID NO: 939944 - DNA, 623 bp, Homo sapiens
gtgatagatttagctggtgtgcccagagggggcatggaagctccacactcctgactccataacttagcctattcctctcttccatttggctgcttttaggtgatattctttaataaaaacaaacaaacaaacagtcacagtaagtaaaacactttcctgagttctgttagtcattctagaaaattattaaacctgaggagggagttgtgggaacccccaaatttgtaaccaagacagatagaaatgcaggtagcctggtgtattagtcagctctcatgctgctaataaagacatacccaattctgggtaatttaaaaaggaaagaggtttaattgactcacagttccgcaaggcttgggaggccycaggaaacttacaatcatggcataaggagaaacaaacatgtccttcttcacatggcagcagcaagaagtgcagagataagtggtggagggagccccttaaaaatccatcagatcttatgagaactcactcactatcacgagaacaacacggaggtaactgcccccattattcaattacctcctaccaggtccctcccacgagaattatgggaactacagttcaagatgagatttgggtggggacacacccaaaccata

SEQ ID NO: 939945 - DNA, 560 bp, Homo sapiens
tttggagcttctagagataaactacatttcttggcttgtggccatatttctccatttttaattttttttttaaattttactttaagttctgggatacatatgctgaacgtgcagggttgtcatataggtatacatgtgccatggtggtttgctgcacctattaacctgtcatctaggttttaagccccacatgcattaggtatttgtcctaatgctctccctcccctttccccaaaccctccaacacaccctggtgggtgatgtttccctccctgtgtccatgtgttctcattgttcaactccacttactagtgagaaaatgcagtgtttggttttccattcctgtgttatgttgctgagaatgatggtttccagcttcatccatgtscctgcaaaggacatgaactcattattttttatggctgcatagtattccatggtgtatatgtgccatattttcttaatccattctatcattgatgggcatttggattggttccaagtctctgctattgtaaatagttctgcaataaacatacatgtgcatgtgtctttacagt

SEQ ID NO: 939946 - DNA, 751 bp, Homo sapiens
ataatagcttcagacaattttatcctcttcttgagagagttctcaaaagtgtatccaattattcaagaggaaatcaatgatccagaaatccaccatttcttccagaaaaatacagaagtgggaaccccaggcagacctgtaaattgttgagaagaaagacagaatagagttgtgaagccgggcgtggtcgttcmtacctataatcccagcactttggtagtccgaggtgggcagatcacgaggtcaggagattgagtccatcccagctgacacggtgaaaccccgtctctactaaaaatactaaaaattagccgggcatgatggtgggcgcctgtagtcccaactacttgggaggctgagcgggagaatggcatgaacccaggaggcgaaacttgcagtgagccgagatcacgccgctgtcctccagcctgggcaacagagcgagactccatcgcaagaaaaaataataataaaaaataataataagagttgtgagacaacacataggttgttccgctgtttctggctttgttttttgtgagcagtcgttgggtagcagtggattaagtgcttgtatcaacacaatccctatactttcagagatgttattggtgtctcctagatcgggactgtaatgtcatagttattattcattagttgatatgataaattactcgccaacattccacccatggaataaatgcgtataaagtgtttgtggccagaacggtgaaacaaagtcaggtaatag

SEQ ID NO: 939947 - DNA, 566 bp, Homo sapiens
ttttaccagcggtacgaagaagaggtggtaccatttttttctgaaactattccaaacaattgaaaagggggaattcttccctaactcattttatgaggccagcttcatcctgataccaaaacctggtagagatataacaaaaaagaaaatgtcaggccaatatccctaatgaacattgatgcaaaaattgtcaataaaataccagcaaactgaattcagcagcacatcaaaaagcttatccaccacgatcaagttggcttcatccccaggattcaaggctggttcaacatacacaaatcaataaacatawttcatcacataaacagaactaaacacaaaaaccacatgattatctcaatagatgcagaaaaggccttcctatgttgaataaaattcaacaaccctttatgttaaaaactctcaataaactacatattgatgaaacttacctcaaaataataagaaccttttatgacaaacccacagccaacatcatactgaatgggcaaaagctggaagcatttcccctgaaaactggcacaagacaaggatgcccctctctcacc

SEQ ID NO: 939948 - DNA, 645 bp, Homo sapiens
ttcagaaaacatggaggccaaaatggagatgaatgacatattaaaaaatgctgaaataagaagaccttcaatgaaaaattatgtttccaaaagctatttttcaaaattaaaggtaaattaatattcccaaataaacaaaactgagatatcacactgctggcaaacaagaatactttgggaataaacaatgctggccaaaaagaatactttgggaataagcaaaaggataataagcaataactcaaataaagaaagaaaaaaagaaaggaagaaagaccagcaaaggtaattgcatatgtatatgtaaaagacaacaggaaagcacttctacttgtaactccttttcttctgattctaagacaactgcatttggtgataattataaacctgtgcttatgggtttattatgtacgcataaatatgtaatttcttagacaataaataaagaacrggagaaaacagctatatttgaacaaaagctgttacactattgaaattaagttggtattaatttgaactaggattttaaattgttaattataattctcatggataaccattaagaatataactcaaaaatcttgtgaaataaattcagattaaatatttttttaacacatacagaaataaagcactaatggagga

SEQ ID NO: 939949 - DNA, 753 bp, Homo sapiens
gctatagactggagctgttcctatttggccatcttggaaccgccagccaataaatctattgttaaagaaaacaataatgaggaatctctacatattcttattgaatgagtagactaggatatattaagtgaagaaagcaagttatataaaagtgtacaggaggtccttgaatgtcagtttgcttaatgtcggtttgttataaggttgttataaggttgataaggaaaaaaatctattctcagcaggagccacagtttatatggagtttgcatgttctccccatgtctgcctgtgttttatcctggtagtccattttccgcccacatcctaaagctgtgcatgtcaggtaaattggtttgtctatattgttctagtgtgagtgtgggtgtgtgggagggtgctcagcaatgggatggcatcctgtccagggtgggttccaccttgtgtcctgaccttctggaataggcttcaggcacctgcaacactgracttgaataagtaaggaaataattgtcttacttgtttttattattctttcttaaatgtatatctagcttacatttattaccatgtttaatattagatatatgtgggatttttatctaaaagtttgatgatgtttttatgacaagaaatatgccataggaacttaactctttttaatatcaattagcctatggtaaaactggttttgttaaatgttgtttttgcttaaagtcagttttcaagaacctattgatgatgtaaagtgag

SEQ ID NO: 939950 - DNA, 565 bp, Homo sapiens
atattaatgctcaacttttagcaaaacttacagttcattttaaacttagccagcttgatcatattaacatttttcctaagaaccctgttctgcaaacgttttacagctgtcttaaatccattcatttttcatcctatagttttttctttctcatttggaaaccaccagtcattctactttatgagaaaaattactctatttttccttgacaaaagaaaatctcctcatactgtctagcctttccctaccaaaaacacatcttgctttccttgtatatatgtataaattgtttatcttatattaattttagcaattttaattatatatattaattagaattcttaatccttagtgaccttaattttcagtgaacaccaagaagyaagcaattgtgaaatgtctgtcatactagcaatctgtggattggaaaatgtgtgaatcataatttcttgaagcgtatgctttctcatagtataatttgttgatatggcatagtacatgtttagtaagaatcccaaatatatttttagtctgtctgtaataaaaactatggaggagacaaaat

SEQ ID NO: 939951 - DNA, 751 bp, Homo sapiens
gctgccaggccgttggccccacccagagtggagcttctcacccactccctccccttcctttctgccgtcagtcccccaatagtgtcacaatagtcccctaacagtgtcccactggccatctttgatgaccaggtgtgtagcaggttcgagcccggcttggaagttgtttctactatgagccaggcactgcctgagcacctgggtcccaccagtgaacaaatagacgacagtccccgccccgggggactagccttttcctagcaggacacagaaccccaaacactcacagaataaagaggtgaggctatgctgcgtccgaaagggatatgggcttaaaaaaaaaaaaagaaggctgggcgtggtggctcacacctgtgatcccagcactttgggaggccaaagcgagcagattgcctgggctcaggagtttgagaccagcctgggcaacatgacgaaaccccatctctactaaaaatacaaaaaattagccaggcgtggtgrtgcacacctgtagtctcagctactcgggaggctgaggcaggagaatcgcttgaacctgggaggcggaggttacagtgagctgagatcacgccacttaattccagcctgggtgaaagagcgagaccctgtctcaaaaaaacaaacaagaaaacagcagagagcagaagagggaagagggcaaggggtggggggtgagatttgacttggggctccctgctggttcatgcagtggcctggctagatccctcaa

SEQ ID NO: 939952 - DNA, 454 bp, Homo sapiens
tcaggaggtcgtaggaggtggcaggcaccttgcatgaaaggggaaggtgggaactcatatgtggggggactggctgaaggctgcaagtgcaacagctagacacctacggccccttccctcccccactggatacattaaacaagagaagtctagacttgagaacaccagggtcagagggggaaggggtggggaaagragaccccccaaaaaagtgaagagagaacctgagtggcaaacctcagaagcttcaggccccccacttctgctgctcctcacaggagggcagcagacaaacaccacaccaccctccactcctcaggcaaagacaagggagtcttctcttgaaaaaccagccgcagagaaagaaaacctatatacaccaacatgggattcaagacatgaaaaggccagcctcccatccaggcacccactctgaagagtccatgcagtttcc

SEQ ID NO: 939953 - DNA, 645 bp, Homo sapiens
atatggctagccagttatctcagcaccatctattgaatagagccttttccccattgcttgtttttgtcagctttgtcaaagagcagacggttataggtgtgtggccttctttctgggctctctattctgttccattggtctatgtgtctgtttttgtaccatgctcttttggttactatagccctgtagtatagtttgaagtcaggtaccttgatgacttcagctttgttctttttgctaaggattgccttggctgtttgggctcttttttggtttcrtatcaattttaaaatagccttttctagttctgtgaagaatattgttggtagtttgataggaatagcccttgaatctgtagattgctttgggcagtatgatcattttaataatattgattctttctatcaatgagcatgggctgtttttccaattgtttgtttcttctctgatttctttgagtagtgttttgtaactctcattgtagagatctttcacctccctggttagctgtattcctaggtaatttattctttctgtggcagttgtaaagggggttgccttcctgatttggttcttgtctcggctgttgttgttgtataggaactagtaatttttgcacattgattttgaatctgaaactttgct

SEQ ID NO: 939954 - DNA, 649 bp, Homo sapiens
gcccatgtggcaaggaactgagggcagcctctgaccaacagtcggagagaagctgaggggtcctcagttctataactggagaggaactgaaacctcccaatagccatgtaagtgaaggagtgcagggaatttcaccccaaaatatggctccctggtataatgagtattttgaattaaagttcttaagagatcaacagatgctgggaatgactttttccttatccacatgaagactagacagacccaccaagaagaacaattagtttttcttcctctccctgttatcacactagctattgcagagaaaaagaccaagaagtaaccagacctgattataccccttcacgaaatatctmtccctcaggctcattccatttccaaagagaatcatttataagttaatctctgttcccctatccattcatcctcccaagtattctttcattctcccttataatcatttattgccccttaacagaattacctatattcccatcactctcctcccctctaaaataaggctatataaatatttgaaccccattgggatgttgagtaatcattcttgattctccctcatggtatgtgaataaatttgtgtgccatttctcctattaatctgcctttgtcaattgatttttttcagcaa

SEQ ID NO: 939955 - DNA, 609 bp, Homo sapiens
aagaagcacttcactgtcctacttcgggggtctatacagccctccagctctatggcataattaagttcacaaggatcttgatcatctttcccttccataagataccacactggtccattacattgatgacattatgttaatcggacctaatgagctagatgtagcagcttctctacactaactgataagacatttgcatgtcagagaatggtaaataaatttagaatccttctacctcggtgaaatttctagggccccagttatgtggaacatattgagatattccttctaagataaaatataaattgttgcatctggtccctcttacaaccaagaatgaggcacaacatctactgggcctattgggattttgaagaaatcatatttctcaattgggtgtgtgacttcaacccatttactgagtgacctgaaaagcttttagtttkgattggtgctcagaaaaagagaaaagctctgcaacaagtccagtctgctgtacatgttgctctgctacttgagccatacagtccagcagatccagtggtatttgaagtgttagtagcagataagtatgcagtttggagcctctgacaggctcttttaggtgac

SEQ ID NO: 939956 - DNA, 704 bp, Homo sapiens
tagtagggctgcaggaagagggatgacaacaggtagccaaaggactggaactgcctggctcagggatccccaaggctggcctgtggccagttggcagcacaggttagtgattatgtccagagagcttagatgcaaactctgtgatacaaattctagcatttcctggcatcaaaacatcaggcaagttattcattcaccctgtacttctgtttcctcatctgtaaaatggggaccacccttacctcatgggagcactgagagaattaaatgagataatacatgaaacgtgcttagcacaggttgtgacgtatcataagagtttaaaattactggttcagatccttaaacttatccaagccacatgttttatgctcatgaaaactgaggcccagagaggtggcaagacctcctgggaggcagtgacctgctgccactggagtccttgaatattcacagatcatgacgggccctaagaaggtccttgtggtggtttcactggggtggaaggatcctgctctccaatcctcaccttccyatcccatttccgttagtcttcacttctggccccttaatatttcatccatccctactagatctgcatccctggtgccttcctgtcatttcccttgtttctttcccaccacaccacagagaataattaaaggtccttggttaggagtgatgaagcttgggggaggaggagg

SEQ ID NO: 939957 - DNA, 782 bp, Homo sapiens
aaaatgaaatgacattagcacagagcctggcatatttacttttcatttagcaaattggttaagctcctactatgtgccagtaagtgctgaagatgcaacagtgaacaaaacagacaaaagtctctgcccctatggagtttatatgtccatgtgcattagcctgcatttcccagaaagcagaacatgaagctaaggcttatgtattgctcttttacaagtgggggtactcagatgcctccagcatctacagctaagaacactttcaggcaaatacagttctgctgatcatccctaggaggacaatcatgttatagaaccaacaggtttgtatgtccactgtgcagtaacagaccaattacactgagacagcaaggtttgcaacagagaaaaagatccatgatcatagtgcactgagtgaggagatgggaggagaccctcaaatccgtctccccaaggagttatgggctgggttttttaaggggatcatggagggtgagggacttcagaattggggctgttgattgatcagggaaagggggctgaaatcatcaggatgtgaaaactgcattcttcrgcagtcagattctcattgggtccttcagactggctagtgttatagtcttattagtatgcaggacctgaaggactatctcaaaaagaaaacttactgttttgtagtgttcagtttgttatctatagagcagttaaggggagctataatcttgtaacagagtctacgtgattgtaggacaataggcaccacacaaatatgaggaagcagg

SEQ ID NO: 939958 - DNA, 782 bp, Homo sapiens
aaaatgaaatgacattagcacagagcctggcatatttacttttcatttagcaaattggttaagctcctactatgtgccagtaagtgctgaagatgcaacagtgaacaaaacagacaaaagtctctgcccctatggagtttatatgtccatgtgcattagcctgcatttcccagaaagcagaacatgaagctaaggcttatgtattgctcttttacaagtgggggtactcagatgcctccagcatctacagctaagaacactttcaggcaaatacagttctgctgatcatccctaggaggacaatcatgttatagaaccaacaggtttgtatgtccactgtgcagtaacagaccaattacactgagacagcaaggtttgcaacagagaaaaagatccatgatcatagtgcactgagtgaggagatgggaggagaccctcaaatccgtctccccaaggagttatgggctgggttttttaaggggatcatggagggtgagggacttcagaattggggctgttgattgatcagggaaagggggctgaaatcatcaggatgtgaaaactgcattcttcagcagtcagattctcattgggtccttcagaytggctagtgttatagtcttattagtatgcaggacctgaaggactatctcaaaaagaaaacttactgttttgtagtgttcagtttgttatctatagagcagttaaggggagctataatcttgtaacagagtctacgtgattgtaggacaataggcaccacacaaatatgaggaagcagg

SEQ ID NO: 939959 - DNA, 652 bp, Homo sapiens
atgcggcagaatggaaggaatttttgggtggtgagcagggtggcagagcacgtggtatggcagacaggttctagggtctctgagatgatccctcagcgtgcttttatgggggcccatgtgcacctgccatatccctgttgagagaaggggcgctgaggtcactcctgtgcctttgctcacacccatcttccagcatgcccttcctccctctgccctccagccctggttgcagctcccaggcctgtctgaggttgccactgcccccaggccacctttgctgacatggaatccccagtatcccctgcccctcattttcttcacagagggtcttttctgcagcctgagctctggactgggcagggacaagtactcccaggggaccccagtgccacagtccccttctgccacggtgcatgakcaggcacacttcaggtctcacctggggctgggctaggccgatcctgccttgcctgggacatcaggagctgagggtctatataggtcaggccccaggaagcctcagggggcttgtggaagggtgggggtgtgtgtgtatggacagatatatggatggacagactgatggaaaaacggataagtaactgtccagtctgaagtcctgcccatgaaggagagaccctggaaggcctct

SEQ ID NO: 939960 - DNA, 845 bp, Homo sapiens
ggtgctggaggcagcggggacaccagcacgggcagaggctctgcccttgaagaactctcattctaacaggagataaatgaaccagatgactagaaaataaatgaaccagatactgtgagtctgtaaaagtgctgtgaaggaactaaacagtaatttgtaaagagtgtcaaagaaggaagattttctttcrcaggtgatcagggaaggcctctctggggagaacctaaggtagattccaggagaagaagtcagcacaagtgcattttaggcaaagagaatagcaggtgcaaaggtcctggggcagaaatgagctcagaggatttaacgttcggtgagttgtggggtgggtgggagtgtagctgataaggtcagatgggtggagagcggtcagttataaaacctgtaaagagcaatgggaaccatggaggggtttgcccatgtgtgggaaggcctgtatttcttttatggaatattcatcatctttttgcccaaagtctccaaacaattagactttccttgactatcaagataaacagatattcctatgtgtagatcactgtaaacactttaagtgctaggaattcatactaggcctcgtaaactctaaattttagaattagaagtgatccctgaagatcatttattttgatattgttctgcattctctgaataacattgtcttacttgattagaaaagtgataaaggctgaatccactgaaaatagttcgcatgtgagtaatgaagactcaactaattcacttaaactatataggctacttattgacctttgaacaagaattcattagcttcaggcaaggcctgatccaactgtctgatatgatgt

SEQ ID NO: 939961 - DNA, 829 bp, Homo sapiens
gtaagcttctgccatccttagtataagcttcctccttaggctggctgtttgtataattacaggatagctgtctgcacctacctaccatgactatctatcatcttccctagtaatgtctagtaaaagcactcagggtttcaacttagctagccaacatcttaagattaaatttggaccaacttaggtcacatgcccacccctgcacccctgaaccaatcactgtggctggaggaacacaaggacctcatggctcrgctcgggttacatattctactcctagattccagaaagtggggtcaccttccttagaatcacatcagctaagattagagagaggatgatttccctaaagcaaaatcagtcatattgtcaaagttgggaatggtaggtggatgtctgaagtaaaccttcaggtcacttgtcaaaaatgaacactcagatacataattcttataaaagttacagttaacagagctaactgaaagaagtcaacaggtgtcactagtgaccaccaggaaggtgggttatattagtcacgatatgcaaactgctataacaaactattcctaaatctcagtgacttgacacaacaacggtttgtcaaagaagtccaagatagcatgggttggaaaccacggtgctccacacagtcattcagggacccaggctctttccatcaaatagctctctcctatacccaaggtccttggggatcttcatgagatttttttacatccaatgagcagatgaggaaagagagcacacagaaaaggcacagccacccttaattgtcttgaaccagaggtaacacacgacacttttggtctct

SEQ ID NO: 939962 - DNA, 829 bp, Homo sapiens
gtaagcttctgccatccttagtataagcttcctccttaggctggctgtttgtataattacaggatagctgtctgcacctacctaccatgactatctatcatcttccctagtaatgtctagtaaaagcactcagggtttcaacttagctagccaacatcttaagattaaatttggaccaacttaggtcacatgcccacccctgcacccctgaaccaatcactgtggctggaggaacacaaggacctcatggctcggctcgggttacatattctactcctagattccagaaagtggggtcaccttccttagaatcacatcagctaagattagagagaggatgatttccctaaagcaaaatcagtcatattgtcaaagttgggaatggtaggtggatgtctgaagtaaaccttcaggtcacttgtcaaaaatgaacactcagatacataattcttataaargttacagttaacagagctaactgaaagaagtcaacaggtgtcactagtgaccaccaggaaggtgggttatattagtcacgatatgcaaactgctataacaaactattcctaaatctcagtgacttgacacaacaacggtttgtcaaagaagtccaagatagcatgggttggaaaccacggtgctccacacagtcattcagggacccaggctctttccatcaaatagctctctcctatacccaaggtccttggggatcttcatgagatttttttacatccaatgagcagatgaggaaagagagcacacagaaaaggcacagccacccttaattgtcttgaaccagaggtaacacacgacacttttggtctct

SEQ ID NO: 939963 - DNA, 644 bp, Homo sapiens
tgctggattctaccatagttctactttgggatttttgagacaatcccttaatgtttttcataatggctgtactaatttgtattccaacaacgtatatattagttccgttttctctacatcctctccagcatttggtattgtctttttcatagtagccatcctaacaggtgtgaggtgatatcgcaacttgcttttggtttgcatttctctgataattagtgatgttgaacaccttttcctatayctgttgccatttttatgtcatatttgaataaagatctatttagatcctttgaccttttttccatcagatcatatgttttcttgctattgaattgtatgagctctttataaatcttggatctgtaaattttttttcccaattggtagggtcttttcattttggtgattgtttcctttgctgtgcagaagctttttggttttatgtagtctcatttacttatttttcttttgtagcttgagatttcagtgtgatagtcaagatattactcccaaggccaatgtcaagatttcctcctatgatttcttctaggagttttatggtttcaggtcttacatcaggtcttttatccattttgattttgtttttctgtatggtgaaaggtaaggatccattttcattc

SEQ ID NO: 939964 - DNA, 644 bp, Homo sapiens
tgctggattctaccatagttctactttgggatttttgagacaatcccttaatgtttttcataatggctgtactaatttgtattccaacaacgtatatattagttccgttttctctacatcctctccagcatttggtattgtctttttcatagtagccatcctaacaggtgtgaggtgatatcgcaacttgcttttggtttgcatttctctgataattagtgatgttgaacaccttttcctatatctgttgccatttttatgtcatatttgaataaagatctatttagatcctttgaccttttttccatcagatcatatgttttcttgctattgaattgtatgagctctttataaatcttggatctgtaaattttttttcccaattggtagggtcttttcattttggtgattgtttcctttgctgtgcagaagctttttggttttatgyagtctcatttacttatttttcttttgtagcttgagatttcagtgtgatagtcaagatattactcccaaggccaatgtcaagatttcctcctatgatttcttctaggagttttatggtttcaggtcttacatcaggtcttttatccattttgattttgtttttctgtatggtgaaaggtaaggatccattttcattc

SEQ ID NO: 939965 - DNA, 659 bp, Homo sapiens
aactacttttggttgacatggtcttagagtctataacacgttggccaacaagcccatggcactagactccagggcttcaggactggtcagccccggatactgaggccctcccaagatttccttcaggtaggaaccttgtggaggcctctgtgggcccctgcacacmctaaggtgagcaaattcagcctctttcatcaggaaaccacagtttcctccgctcctctgtgggttttgaagcctcacctcagagttccagtaagagcaatggtttctaaacctggatgtgtaaacaaagggccttgaattcaacataattttaaaatgcaaatataggccttacacatgtccttgagggtttaaggctagacttgggttgcgaggccttgggcacgtcacttaacttctggactctcccatatccatcttccaaatggaccctaatgccagcccactcactcaaaaggctttatccataaccaaataatgtcagcaaaagaatttataatttttttaatcacataaataaaattttcttttctgacaaaaggttctacacaggcccctctttggtcctttccatctctaacttgctgtaattgctggatggaggggccgcgccattgcaactgagactcgtgggaactcaccatgttatgtgc

SEQ ID NO: 939966 - DNA, 597 bp, Homo sapiens
tgacccttgccatccctaggttttgcaggacatctcttcctttctgcatcttctgactcttcctgcatcttccctgcccgcagcccacagacacctccctgacccctgtcctgctgccaccagctcagcctcctttctacacagccacctgtcagaaggaggacctcccacctgtctctgtccatcacctcctttccactcttcagttaggcttctgtctcccaccactccacgaagcagctctcaccaaggtaatcgatgccctccacatcttcaaatttaacratgtccattcagttcttttttgtttgtttgttggagtctcactctttccttcaggctggagtgcagcggcatgattttggctcactgcaacctctggctcccaggttcaagcgaatctcctgcctcagcttcccaagtagctgggactaccggtgtgcaccaccatgcctggctaattttttgtattttcagtagagatggagtttcatcatgttggtcaggctggtctcgaattcctgatgtcaagtgatccgcccgcttcttggccttccaaagtgctgggattataggcgtgagccactgcacctggtc

SEQ ID NO: 939967 - DNA, 597 bp, Homo sapiens
tgacccttgccatccctaggttttgcaggacatctcttcctttctgcatcttctgactcttcctgcatcttccctgcccgcagcccacagacacctccctgacccctgtcctgctgccaccagctcagcctcctttctacacagccacctgtcagaaggaggacctcccacctgtctctgtccatcacctcctttccactcttcagttaggcttctgtctcccaccactccacgaagcagctctcaccaaggtaatcgatgccctccacatcttcaaatttaacgatgtccattcagttcttttttgtttgtttgttggagtctcactctttccttcaggctggagtgcagcggcatgattttggctcactgcaacctctggctcccaggttcaagcgaatctcctgcctcagcytcccaagtagctgggactaccggtgtgcaccaccatgcctggctaattttttgtattttcagtagagatggagtttcatcatgttggtcaggctggtctcgaattcctgatgtcaagtgatccgcccgcttcttggccttccaaagtgctgggattataggcgtgagccactgcacctggtc

SEQ ID NO: 939968 - DNA, 668 bp, Homo sapiens
cagacaccaagctagctgcaggagtttatgtttgtaccccgtggtgcctggaatcccgatgagatagaaccattcactcccctggaaagggggctgaagccagaaagccaagtgttcttgttcaatgggtcccacctcctcagagtctagcaagctaagatccacagactagaaattctcgctgcaaccacagcagtctgaagtcgacctgagatgcttgagcttggtggggggaatggcatctgccaatactgaagattgagtaggtggttttcccctcacagtgtaaacaaagatgctsaaaatttggattcggtgaagcctgccacagtatggcaaagccactgtagccagacttcctctccagattcctcctctctgggcaggacgtctcttaaagaaaggcagcagcccagtcaggggcttatagataaaattctcatctccatggaagaaccacgtgggggaaggagcggctgtggacacagcttcagcagacttaaatgttcctgcctgctggatctgaagagaacagcagatctcccagcacagcactcgagctctgctatgggaaagactgcctcctcaagtgggtgtctgacacccatgcctcctgatggggagacacatcccagcaggggtcaacagccacttcatataggaaagct

SEQ ID NO: 939969 - DNA, 771 bp, Homo sapiens
tgcactcgcagtgagcaaagctccgtgggcatgggacccaccaagacaggcatgggatagtatctcctggtccgcagtttactaagactattgaaaaagcatagtatatggggtggagtgtcccatttttcccaggtacagtctgtcatggcttcccttggccaggaaaaggaaatcccccaaccccttgcacttcctgggtgaggcgactccctaccctgcttcggctagccctccgtgggctgcacccactgtccaaccagtcccagtgagacgaaccaggtacctcagttggaaatgcagaaatcacccatyttctgcatcaattccgctgggagctgcagactggagctgtttctatttggccatcttagaaccctgaatcagatatgcctttatagtagtgtgagaacagactaacacaaaaaatttgtaccagagaaatggggcatggctatcatgaaatcaactctggaactggggaacaagcagaatttggaaaaatttgaaggcctcagaagaatacgggaagatatgggaaagtttgaaacttcctagagagttgataaataattttgaccaaaatgttgacagtgatatggacagagatggccaggctgaggacatctgagatagagatgagaaacttattggaaattggagttaagtttactttatgtcttagtaaaaagacttgtgtcattccccgctctagagatctaatgttttcatgggccaggcccatggccccactactctgtgcagcctcag

SEQ ID NO: 939970 - DNA, 479 bp, Homo sapiens
actgtagcttgacactcctgtgctgtccaccatagctctggggcaatctcagggtttcaattccctgcccaactggtaggaagaagaagaaggtatcttagcagtggttgtagccaagagtcattcgcttgtctcctgaggcttcacctcagagagttgcagagcagcgaytgctcagggcagtcaggtcaagatgggggtgtcactgatgtgggctgaaaacaaggcggccctgcctggtgatgagcagaaaaggtgggtggaacccatgggagacagaatggcctcctctgtttgggtatactgcagcttgttggagatgtgaacaaggcaattagagtctttgctccttcaccagtctgaggatagcaagggtagtaccactgcagaggcagtggcagaagggcttttggttgcccttgggggttccatctccaagaaacgtggagctgctgctactgtaagtgttcagccaggtg

SEQ ID NO: 939971 - DNA, 558 bp, Homo sapiens
aaggaaggctgatcagcagggaggcagaggaagggttgacagggtaggaccttggagggaagcagttaggcttggaagggacacaaaggaaaggatggcaaagaactgaccagagcaactaaaagcacaacatagtagaaccgaggacacatctgagactagagaccacaaatgtatggcagacactataggaacaactaaggcaggcactggcttgaagaaaggtcatgaggccaaaggccagaagtgtaacaaggrgctgttggcataaaacagtatgccatggagagagaggaagcaaaaccgtgtgtccaggagaaaaggaaggggcaagagaccaaagtcacgatcaggtcaaaacattgatgtgaagaataaatgagcaagagaggccgggggcggtggctcacgcctgtaatcccagcactttgggagaccgaggtgggcagatcatgaggtcaggagatggagaccatcctggctaacacggtgaaaccccgtctctactaaaagtacaaaaaacttagccaggcgtggtggcgggcgcctgtagtccca

SEQ ID NO: 939972 - DNA, 645 bp, Homo sapiens
aaacaagagcagggcatgtatgagtagttgaaaacagtcaatagaagtatgactagagagaagacagtagggatgacaagttttttgggggcacagtctaagttggtctggtgtctggaatgagactggggcctaataaaaaggagtgtctatactggagctcaaatgggctctgccttgtagcattctgaggacaggtatgacttctgagaagggaaagtggtagaagtattgtccagtcctttgtaagttggtgrctgagcttggtgacgtgtgtttttaaaagacctttagtccattctacttttcttgaagactgaggactgtaagggatataaaggtttcactgaatactaagaacctgaaaaaatgcttggctgatttgactaataaaggctggtctgttatcagactgtatagaggtaggaaggctaacctgaggaattatgtctgacagaagggaagaaatgactgcggtggccttctcagaccctgtaggaaaggcctctacttatccagtgaaagtgtctacctagactaagaggtattttagttatctgactcggggcatgttgagtaaagctaatttgccagtcctgggtgggggcaaatcttcgagcttgatgtgtagggaagggagggggc

SEQ ID NO: 939973 - DNA, 651 bp, Homo sapiens
agctatgcgcaaccaaaaatgcagatgtctgctcaaatcagtgagtagaactcaagtccattctcactgttctgcccactattcccctcaataaactatgttaaattttgaccggcttttggactaggaccaatggtctaattgtttggtctgccacttgaaaactgtaggctggcagattaaagatacccttattttgcttcatgaaatgaaaaaaaaaaaattactgctgctaatgaaatcttctgggttactcacacaggagtccagggtaaaggcctattctgtgatggaactagctggagtcaaattgctgattgagtctgtaccacctggactgccactggtgccgtctggctctgtccttatacygaatacggcaacacatgccccagcatagactaagtaagaagtaaaggactatatgttttttgatgctgagttatcatgacaagccagacttctgactcttgccaagtcaacccatttattttacagtgagtgaggcaacataacacagggtatggctcccatccactcctggaaaatagagcacatcagacttttaatcccttctcagagctatcagtggtacctcactgctactgacattttggggggattatggtgttacttttccagtctgatcag

SEQ ID NO: 939974 - DNA, 651 bp, Homo sapiens
agctatgcgcaaccaaaaatgcagatgtctgctcaaatcagtgagtagaactcaagtccattctcactgttctgcccactattcccctcaataaactatgttaaattttgaccggcttttggactaggaccaatggtctaattgtttggtctgccacttgaaaactgtaggctggcagattaaagatacccttattttgcttcatgaaatgaaaaaaaaaaaattactgctgctaatgaaatcttctgggttactcacacaggagtccagggtaaaggcctattctgtgatggaactagctggagtcaaattgctgattgagtctgtaccacctggactgccactggtgccgtctggctctgtccttataccgaatacggcaacacatgccccagcatagactaagtaaraagtaaaggactatatgttttttgatgctgagttatcatgacaagccagacttctgactcttgccaagtcaacccatttattttacagtgagtgaggcaacataacacagggtatggctcccatccactcctggaaaatagagcacatcagacttttaatcccttctcagagctatcagtggtacctcactgctactgacattttggggggattatggtgttacttttccagtctgatcag

SEQ ID NO: 939975 - DNA, 578 bp, Homo sapiens
ttggttgcagaattatggtcttgcctcttttgaaggcattcagaatcttgaggaaagtgaaatctgagcacagtcaggatttagagagaaaatggacattggaggaagatgaggtaggattaaaaaaaatcagcatgtctggccaggagcagtggctcacgcctgtaatcccagcactttgggaggccgaggtgggtggatcacctgaggtcagaacttcaagaccagtgtagtcaacatggcgaaaccccrtctctactgaaactacaaaaattagccgggcgtggtggcgggcgcctgtaatcccagctacttgggaggctaaggcaggagaatcgcttgaacctgggaagcggaggttgcagtgaggcgagattgcaccattgcactccagcctgggcgacagaacaagactttgtctcaaaaaaaaaaaaaaaagaaaagaaaagaaaagaaaaaagaaaaaaagaaaaggaaagaaaagaaatggtttgcacaattgcaccactgaaggaatgtagagtataccttccaaagcaaccactgcataggaaacaatatcatttggatgcgtaaga

SEQ ID NO: 939976 - DNA, 729 bp, Homo sapiens
cttagtgacagctatgcgcaaccaaaaatgcagatgtctgctcaaatcagtgagtagaactcaagtccattctcactgttctgcccactattcccctcaataaactatgttaaattttgaccggcttttggactaggaccaatggtctaattgtttggtctgccacttgaaaactgtaggctggcagattaaagatacccttattttgcttcatgaaatgaaaaaaaaaaattactgctgctaatgaaatcttctgggttactcacacaggagtccagggtaaaggcctattctgtgatggaactagctggagtcaaattgctgattgagtctgtaccacctggactgccactggtgccgtctggctctgtccttatacygaatacggcaacacatgccccagcatagactaagtaaaaagtaaaggactatatgttttttgatgctgagttatcatgacaagccagacttctgactcttgccaagtcaacccatttattttacagtgagtgaggcaacataacacagggtatggctcccatccactcctggaaaatagagcacatcagacttttaatcccttctcagagctatcagtggtacctcactgctactgacattttggggggattatggtgttacttttccagtctgatcagcagaatctagccataatattgtggctcttaaaactaaaaggagtcacagtgtttttggttctctggagca

SEQ ID NO: 939977 - DNA, 729 bp, Homo sapiens
cttagtgacagctatgcgcaaccaaaaatgcagatgtctgctcaaatcagtgagtagaactcaagtccattctcactgttctgcccactattcccctcaataaactatgttaaattttgaccggcttttggactaggaccaatggtctaattgtttggtctgccacttgaaaactgtaggctggcagattaaagatacccttattttgcttcatgaaatgaaaaaaaaaaattactgctgctaatgaaatcttctgggttactcacacaggagtccagggtaaaggcctattctgtgatggaactagctggagtcaaattgctgattgagtctgtaccacctggactgccactggtgccgtctggctctgtccttatactgaatacggcaacacatgccccagcatagactaagtaaraagtaaaggactatatgttttttgatgctgagttatcatgacaagccagacttctgactcttgccaagtcaacccatttattttacagtgagtgaggcaacataacacagggtatggctcccatccactcctggaaaatagagcacatcagacttttaatcccttctcagagctatcagtggtacctcactgctactgacattttggggggattatggtgttacttttccagtctgatcagcagaatctagccataatattgtggctcttaaaactaaaaggagtcacagtgtttttggttctctggagca

SEQ ID NO: 939978 - DNA, 618 bp, Homo sapiens
caccatcagcactcctggttctcaggcctttggacttggactggaattatattaataccgccaggttttctgcatccccagattgcagacagcagatcgtgggacttctcagtctccataattgcatgagccaattccttgtaaacctcatgtgatggatagatagatagatagatagatagatagatagatmgatagatctatagagcatatcctatttgttctgtttctctgcagaatcatgataaatataccttttctttgccttttttcctctgctaatgttctgatcactaacaaaacacaactcttgtcatgggtatttgtttaatagcaggcatttgtggtttactgcccactatccacacctgttccttctggttacagagccgagttttcagttcagaagtttggatggtgttgtcccagttccaaccaatagaccatgatagtcttactttagtccagattggccatctgcctggcaagatgatttcttcaaggataacataaacccagccaaagaaaagttaccactcttcttttggacttggtagtgggaggacaagaggcagaggggtgtaggttgcttcagccttcttggcctatgaaaggagt

SEQ ID NO: 939979 - DNA, 618 bp, Homo sapiens
caccatcagcactcctggttctcaggcctttggacttggactggaattatattaataccgccaggttttctgcatccccagattgcagacagcagatcgtgggacttctcagtctccataattgcatgagccaattccttgtaaacctcatgtgatggatagatagatagatagatagatagatagatagatagatagatctatagagcatatcctattkgttctgtttctctgcagaatcatgataaatataccttttctttgccttttttcctctgctaatgttctgatcactaacaaaacacaactcttgtcatgggtatttgtttaatagcaggcatttgtggtttactgcccactatccacacctgttccttctggttacagagccgagttttcagttcagaagtttggatggtgttgtcccagttccaaccaatagaccatgatagtcttactttagtccagattggccatctgcctggcaagatgatttcttcaaggataacataaacccagccaaagaaaagttaccactcttcttttggacttggtagtgggaggacaagaggcagaggggtgtaggttgcttcagccttcttggcctatgaaaggagt

SEQ ID NO: 939980 - DNA, 569 bp, Homo sapiens
tatatattgtatgtattatatgctgtattcttacagtaaagtaaactcaaggacaaaaggataagaaaatcataagagaaaatgtatttactattcatgaagtggaagtggaagttgatcaccataaagatctccatcctcgttatcttcacgttgagtaggctgakgaggagcaggcagaggaggggttggtcttgctgtctcaggagtagcagaggtagaagaaaacccacgcaccagtggactctcacagttcacactagtgttgttcaagggttaactgtactttgatactggtaaacagcatattcccaataactgaaatgtatcatgtgtacatttccactctggaaggtgtcaggaccaagggtatctcttggagaatttagaattttcatctttgtcagccttccaagccgccccccctaaataaatatacatccaagtcaagtcaacatgatttctacatgaaagctacttcaagacaagtcctccaattctcactcccttttctaattaagttgccatcccactctccttcaacatagagaccctggagtcatctgtgc

SEQ ID NO: 939981 - DNA, 569 bp, Homo sapiens
tatatattgtatgtattatatgctgtattcttacagtaaagtaaactcaaggacaaaaggataagaaaatcataagagaaaatgtatttactattcatgaagtggaagtggaagttgatcaccataaagatctccatcctcgttatcttcacgttgagtaggctgaggaggagcaggcagaggaggggttggtcttgctgtctcaggagtagcagaggtagaagaaaacccacgcaccagtggacyctcacagttcacactagtgttgttcaagggttaactgtactttgatactggtaaacagcatattcccaataactgaaatgtatcatgtgtacatttccactctggaaggtgtcaggaccaagggtatctcttggagaatttagaattttcatctttgtcagccttccaagccgccccccctaaataaatatacatccaagtcaagtcaacatgatttctacatgaaagctacttcaagacaagtcctccaattctcactcccttttctaattaagttgccatcccactctccttcaacatagagaccctggagtcatctgtgc

SEQ ID NO: 939982 - DNA, 608 bp, Homo sapiens
tgaaaggtgatggaaactgttaaactaagagattgcttgggaatgacagaatctaccccacattttaaaaagtcatcccatcaatatctattgcaaagtacaatataagtggatgataaaaatataagaaaaatgaaagtagaaaaaataaagcaagccagatgatatggtttggctctgtgtccccacccaaatctcatctcaaattgtaatctctatgtgttgagggagggagatgattgggtgcagggagtggttttctccatgctgttttcatgatagcaagagagttcttatgcaatctgttgtttttataagggttcttcctcctccgttcatctgtctctctcctgctgccytgtaaagaaggtgcccttctactatgactgtaagtttcctgaggcctccctggccatttggaactgtgagtcaattaaacctctgtattggtctgttctcatgctgctaataagaacatactcaaggctgggtaatttataatggaaagaggcttaatggcctcacagttccacatggctggggagggctcacaatcatggtgaaaggtgaaggaagagcaacagcatgccttacatagaggcaggcaa

SEQ ID NO: 939983 - DNA, 574 bp, Homo sapiens
agtttggagggctcagaagacaggaagattgggaaagtttggaacttcctagacacttgttgagtggctttgacctaaattctgatagtgatatggataacaaagtccaggctgcggtgctgtcagatggagatgaggaacttgttgggaacagcagtaaagatcagtcttgccatgcaaaaagactgkcaacattttgcccctgccctagagacttgtggaactttgaacttgagagagataattcaggatatctggtggaagaaatttctaagtagcaaaacgttcaaaaggaagcagaatataaaaatttggaaaacttgcagcctgatgatgcagtaggaaagaaaaacccattttctggagagaaattcaagccagcagcagaaatttgcctaagtatctgggagtcaaatggtaatcacaaagtcaatggggaaaattcagaagcatgtcagaggtcttcacggcagcccctcccatcacaggcctggaagcctaggaggaaaaaatggttttgtgggccaggcccaaggtccccctgcagtgtgcagccttgggacttggtgccctg

SEQ ID NO: 939984 - DNA, 566 bp, Homo sapiens
aaaatattaattcaaatgaaataattaatttgttgactataatgagtaagtattgatactataatacaaaaggttttgttgaaatgtggttggttgatttccatgttctttgatgtcttctttttaactaatttaaatgttttacwtttgttatgttaaacagattaatttaaaattcactaaaatagttatttggaagacctagaaattttgcttctaaaataattattaaaagtttgcttccacatatttgaaagatggagatcagaaaaactgtgtatgtatttacaaaatcaaattctcaaatatttgatggaaatgtttctaaatattcattaaaaattatcattactttgtacaagttacatacaaaaaggaggtatttgtcaaatatcaaagaacatttttgctataaaaggatagattaagtaactatgttctaaaatgttaatctaaacagcatatgactgagaaactactgtcagcccagaaaatgtcagcaaatttggaacacttgtttgttgttgtttttaaaaaaggtgttacttatctttgagtttagcaac

SEQ ID NO: 939985 - DNA, 657 bp, Homo sapiens
gagttttgctcttgttgcccaggctggagtacaatggcacagtctcggctcactgcatcctctgtctccctggttcaagcgattctcctgcttcaccctctggagtagctgggattataggcgcccgccaccatgcccatagtttttgtatttttagtagagatggggttttaccattctggccaggctggtctcaaactcctgacctcaagtgatcgaccagcctcggcctgccagtgttgggattacaggcttgagccaccgcacctggccaaaattattcttctttaatgascaggttgtcgaatgaatttagaaattttattaaccttcacaattttggcgtaagagcctgttcaaacacagctgcactaagctaaattacacaatctaaatcattaaagtagttggataagtgtcaaaacttctggagggattccacattgacttcattttacttaaagcacatttcaaagcgaacaggcgttggtaacaaagatctctactagaactgaacagcaatacccccaaggtatgcctgtatgtagtgtttcactaacatttctggccacagagccatttgttcattacaaacttttctagggacacagtttggggtggttttctattaaatatgtcttatatggccggctttct

SEQ ID NO: 939986 - DNA, 567 bp, Homo sapiens
caccaccactcctagctaactttttttatttttttgtagatacagggtcttgctatgttccccaggctggtctcaaactcctgggctcaagtgatcctcccacgttggtctccattctttcttatcacggaattatcttagccccattgtcaaaaatccatttctgtctcagcactgtccagtagaactttctgcaatggtggatatattctgtatctgtgctaatacagtgccactagacaattgaaatgtgttcacttaaagtatagcaggaactaaagttttaattttatttgcatttgataaatttayatttacatttacatagccacataaggctagaagccactatactgaacagcacagttttggaatctttctcctattgcattgatttctattgttatatcattactaacctgttttaattactgtcatttataataaatcttcaaatcagatagtaaaatcctccaatttttttttaattccccaaattgttttgcttattttaggttatttgcatagccacatacattttagaagcagcttgtgagttgctacaaa

SEQ ID NO: 939987 - DNA, 620 bp, Homo sapiens
gagaaacccatagacggttcacatcacaagactctgcagacaacccccagtaccagtccagagttgggtagacttgctgggtggctagacccagaagagagacaaaaatcactgcagttcagctcacaggatgccacatccataggaaaagagggagagtactacatcaagggaacagcttgtgggacaaaagaatatgaacaacagccttcagccctggaccttccctcagacagagcctacccaaatgagaaggaaccagaaaaccaaccctggtaatacgacaaaacaaggctcttcaacacccccgcaraatcacactagttcaccagcaatggatccaaaccaagaagaaatccctgatttacctgaaaaagaattcaggaggttagttattaagctaatcagggagggaccagagaaaggcaaagcccaatgcaaggaaatccaaaaaatgatacaagaagtgaagggagaaatagtcaatgaaatagatagcttaaagaaaaaacaataaaaaattcaggaaacttcagacacacttttagaaatgcaaaatgctctggaaagtctcagcaatagaattgaacaagtagaagaaagaaattcagaactctaag

SEQ ID NO: 939988 - DNA, 454 bp, Homo sapiens
ctgtagtcccagctacttgagagggtgaggcaggagaattacttgaacccaggaggtggaggttgcagtgagctgagatcacgccactgcactccagcctgggcgacacggtgagactccatctcaaaaaagaaaaaaaaaagttggcgtatcatctgtcataaagtggcaatttggatgatgaattaataatgaactaataatattaaagtccttggatggaaatgagwtccactgcaggtgtgcagagaaggctgggcaggtgaattaatctatgatctatgatctcacacagaattctgcatagtaaatttgattcccatggttccaacaaaacgaaacacctaaccactatatcaaagatgccttaaaaatgtgacagatgcagtacagtcattgtagattgcctccagatgatcatattttgcaaaaagagagatgcaagcacagaaca

SEQ ID NO: 939989 - DNA, 598 bp, Homo sapiens
tagaagtcagccaaattctcatatctgcctctgcattaatctatggcaatatgctagtttcattgaaattgtgaagctgtgcagtaggaaaagaaaggattattttagtagctttttcatttttgagaatattcttctttgataccatatagaaacttgagaagtggtagtttcttaaaggttagttgcaatgtggaatctgaaaccatattaatgaaccttttatattgttactgaaaatttactattgtagcttgaaatktgcgtggatctttcacccatgagttattttataacatcatgtattggtagattgggaaacagtagttcactcaactatgcagatcttccaaatatgttatatctcactagtctcaaaaaagacatttttttttcttttcaagtatttggaaactgtcatgctcatgatcatggaaataagttttataaaattctaatttttagtcgacgactttaattttatcactggcaacaaatactgtcagttgttttccttgaagtccctggctcactttgcttattttcaagaaaatgtctgtcaaatatccaagtctgaaaaaccatggttcttgtgttg

SEQ ID NO: 939990 - DNA, 589 bp, Homo sapiens
tttgtttttttatggcaagagcagttaaaatttattcatttaacaggaatcccaaatacagtacaattttatgacctataatccttatgttgtacattagatctctagactttttcatcttacatatttgcaactttgaatcctctgaactgcatcttcccatttcctctcctcactcccgcttccctgaacctagtagccactgtttattctccatctgtgtatatttgactttcttttttttagattccacatatcagtgagatcatgcaatatatttctttccatgtctgstttatttcacttagcataatgtcctccagattcatccatgatgtggcaaatggtaggatcaccttctttttttaaggctgagtaatatttctctgtgtgtgtaacattatctttatccattcatccatcaatgaacacttaggttgtttccatatcttggcttttaatgggatatactcccaaacatatcccattaaaaaattgtaaataacactgcaataaacatgagcgtgcagatatctttatgaggtggtgatttcatttcgtttgggtatgtgcccagaagagggattgt

SEQ ID NO: 939991 - DNA, 609 bp, Homo sapiens
attccctctaacaaaagccatattcctgtgcctttttataatcttttaacaaaaacacgttttacacaccttgcatgtaaaactgtttctccagttgtcttaattgtatgttataatgttaacttttagcaacttttattttkagtgaaaaacttgataagtaagtgatttttaactatataccggggtggatcctaggacgtcagacagaaatgaagataaggtttgactgttttcagcatagctagcgggcatagctcttcgtatgtccccaggccttatttataatctaatgctccaaagtaggtaaatcaaacaattttcaaaagttaaagaaacactttgaccttaaagcatttagcaaatcggatatctgaccttcatttagaccaaatgtttacattttcaagacattttattttactaataatttttaaaactgtccttatttccaaaagatgaccgaggtcatgtgaacaaaacggcattaaagtttttatttttctgacaaaatatttgacttaagtgctttttttaagccaattaatcagagcttttttatatataaacatcacccacacacacaacacatatacatacaggcagaca

SEQ ID NO: 939992 - DNA, 688 bp, Homo sapiens
aaactgacaagaaatggcacggcagctatgtgaatgaaaccacccttgcaaaagttgtatcagtgagaaacttagtaagctaagctaacccaacccctatcttgcctttcccttaattattcctgggctactgggccaagctaacttcggaagacatttagggtaccgtttaaatgataatgttgtaggagttattaagaaattattttaggcagacagagaggaaaaggggtccttgggaagtttcatttttaaagctgctccagaaacgttttttgtaaagccctggctcttagagccaggctggcaacctttgatatgcaaatgcaggccattagaaactgggtccacccaaacattgcgattactgctgccttcttgcccttgccgcacgtggccgcccccacatttccccagagtgtagaacatcctgkcgcccttcatttgcatattaaaaggccagggtgggacggccagctttttcacggactatgtgaatgacatgcctattcaaaccaatcccctgagccctatgcaaatcagacaccgcctcctccagcctctgtgtatatacctggctggtaaccctggcaggtatggttccctctctcggctttggagccccccttcctaagtctctgtacagaggaggttcttctttctttcttcccccttccttcttgcttgt

SEQ ID NO: 939993 - DNA, 571 bp, Homo sapiens
ggggttctagttccaaagagaggcatgctcccagaagaggcacaacaatgatccaattgacctggaagttaagaatgtcacctggccacactgacacttctcatgcctctgaatcaacaggcaaagaaggcagttactgtgctggccagggtgattgatcctaactaaccaagggagaactttgactactactccccaaaagaggtaaggaagactatgtgtggaacacaggagatcccttagggaatattgtagtattaccatgccctatgattaaggtcaatgaaaaactataacaacctaatttaactgaactactaatggcccagacccttcaggaatgaaagtttgggttctttaacactagcaaaagaggattctgataatcaaatggataraatgacccattctgtggatactagtcagtctctttccccagataaccctgccattgtccagtggattcatggataaattcaccatggtggcagggatggagcgtatgcatgggcccagcaacatgcacttcaactcaccaaggctgatctggttatggcaactgctgaatgtc

SEQ ID NO: 939994 - DNA, 448 bp, Homo sapiens
gtggaagatgtccacatcctaatccccagaacctgtgactgtcattttaaatgacaaaagggaccttgcagatgtgactaaattaatgatctagagatgaggagattattttaggttatccaggggcccagtgtaatcayaggggtcctccacaacagtgagtaggaggaaggcaacatgacggcagacacagagatccaagtgatgtggctataagccgaggaatgcaggccacctggaaaagctggagggcggggagtggactctcccccagagcctccagaggaactgaccccgccgacagcttaagtttagtgcacaaaattcgtttcagatttctgatcaccacacctgtaagaacgatcctaaatttgtgttgtgttaagccataaagtttgtggttaagagttgtccctcactatctgtgggggattgtttccaggacccc

SEQ ID NO: 939995 - DNA, 620 bp, Homo sapiens
aattccatgaacgtgagcctactgcaacacttctttggccataaagtgagtgccttagtcagaggcaatgctgtgtggaataccatgatggtgtttaaggtattccgtgagtgcacagatggtggtcttggcagaagcattacatgcaggataggtaaacccatatccagagtaagtgtctattccagtgaggacaaacctctgccctttccatgatggaaraggtccaatataatcaacctgccaccaggtagctagctgatcaccgtgaggaatggtgccatatcaagggctcagtgttggtctctgctgctgggaaattgggcacttagcagtggctgtagccaggtcagccttggtgagtggaaatccatgttgctgagaccatgtgtaacttccatccctgccaccatggccactttgttcatgggcttattgggcgacgatgggtggcttggaaaagaggctgagtggtgtcctcagaacaggtcatcttatccactcaataattaaactcctcctctgctgaggtcacccgttggtgagcactcacatgggatacaaatgtcttcacagattttggccactcagagaggtccatccacatacctcttctccaa

SEQ ID NO: 939996 - DNA, 620 bp, Homo sapiens
aattccatgaacgtgagcctactgcaacacttctttggccataaagtgagtgccttagtcagaggcaatgctgtgtggaataccatgatggtgtttaaggtattccgtgagtgcacagatggtggtcttggcagaagcattacatgcaggataggtaaacccatatccagagtaagtgtctattccagtgaggacaaacctctgccctttccatgatggaaaaggtccaatataatcaacctgccaccaggtagctagctgatcaccgygaggaatggtgccatatcaagggctcagtgttggtctctgctgctgggaaattgggcacttagcagtggctgtagccaggtcagccttggtgagtggaaatccatgttgctgagaccatgtgtaacttccatccctgccaccatggccactttgttcatgggcttattgggcgacgatgggtggcttggaaaagaggctgagtggtgtcctcagaacaggtcatcttatccactcaataattaaactcctcctctgctgaggtcacccgttggtgagcactcacatgggatacaaatgtcttcacagattttggccactcagagaggtccatccacatacctcttctccaa

SEQ ID NO: 939997 - DNA, 620 bp, Homo sapiens
aattccatgaacgtgagcctactgcaacacttctttggccataaagtgagtgccttagtcagaggcaatgctgtgtggaataccatgatggtgtttaaggtattccgtgagtgcacagatggtggtcttggcagaagcattacatgcaggataggtaaacccatatccagagtaagtgtctattccagtgaggacaaacctctgccctttccatgatggaaaaggtccaatataatcaacctgccaccaggtagctagctgatcaccgtgaggaatggtgccatatcaagggctcagtgttggtctctgctgctgggaaattgggcacttagcagtggctgtagccaggtcagccttggtgagtggaartccatgttgctgagaccatgtgtaacttccatccctgccaccatggccactttgttcatgggcttattgggcgacgatgggtggcttggaaaagaggctgagtggtgtcctcagaacaggtcatcttatccactcaataattaaactcctcctctgctgaggtcacccgttggtgagcactcacatgggatacaaatgtcttcacagattttggccactcagagaggtccatccacatacctcttctccaa

SEQ ID NO: 939998 - DNA, 655 bp, Homo sapiens
caggtagctagctgatcaccgtgaggaatggtgccatatcaagggctcagtgttggtctctgctgctgggaaattgggcacttagcagtggctgtagccaggtcagccttggtgagtggaaatccatgttgctgagaccatgtgtaacttccatccctgccaccatggccactttgttcatgggcttattgggcgacgatgggtggcttggaaaagaggctgagtggtgtcctcagaacaggtcatcytatccactcaataattaaactcctcctctgctgaggtcacccgttggtgagcactcacatgggatacaaatgtcttcacagattttggccactcagagaggtccatccacatacctcttctccaaatttctttgtcaccaattttctaatcatgcttctttgaagtccctgaccatccagccaaaccattggctacagcccatgaatcattatataatcacacatctggccatttctacttccatgcagagtgcacaaccaagtgctctgctcgaagttctgcccactgggaagatttaccttcaccgctgtccttcagggatgtcctagaaaggggctgtagtgctgtggctgtccactttcaggtggtgcctgcatatcgtgcagaaccatctgtgaaccaggcc

SEQ ID NO: 939999 - DNA, 605 bp, Homo sapiens
agcaggaattgcagtttcagataaggtggccatgaaggtgtcccttcaaggaaaatgtagtagttgggaaggggcaagtcacatggctctctggggaagagtgtgcagggcatcgggagcagcccttgcaaaggccttgagaaggaagcatgccccatgctctcctcctcatatgaggaggccaacaggtcttgratgaagctatggagaaagagaaagggaatacgattggaaaggtaacaaggaatggatcacgtagagccttccagggcaacgtaatgaccttggctattccttttaaatgagatggaaagcccgtggagcattttgagtagaggcgagacaaaactgatcaggacaactctgcttgctgggcagagaatagaatcaagggaagcaatgacagaagagactgtcctaagagtccaggcgagagatggcagtggcttggacaaaggtggtagcagtggaggtcacagaagatgctgaatatagtgttcatgtttactttatgggatttactaagagattggctgtgtgttaaaaggaaaagatcattctaaagcttctggcctcagtgattagatagacttgccattaacttc

SEQ ID NO: 940000 - DNA, 597 bp, Homo sapiens
attggttcgttcccaatattttgaactattaagtccctttatttctttgttttttaaatttctcctctcacctttattattttctctttttcatttatctctttggtcatcttaaacttctttgaaaattcttactggggttctctgggtggaatataaatcattctattataaagatacatgcatgcatatgttcatcgcagcactgttcacaatagcaaagacatggaatcaacccaaatgtccatcagggatagactggataaagaaaatgtggtacgtatacactatggaatactaggcagcrataaaaaggaacgagatcacatcctttgcagggacatggatagatcgggaagccatcatcctcagcaaactaacacaggaacagaaaaccgaacactgcatgttctcacttataagtgggagctggataatgagaacactgaatagctgaacatggacacagggagaacaacaacacacactggggcctatcaggaggtggggggaggggtagcatcaggataaatagctaatgcatgtggggcttaatacctaggtcatgggtttataggtgcagcaaaccgccatggc

SEQ ID NO: 940001 - DNA, 560 bp, Homo sapiens
taaccccttgctgttatctctttctcatacacttctagtaaatgtctactacaatggatgtctaatatactcatctgagatgactttttgcctcgtactgccgtaacaaaataccatagactgggtagtttaaataataggaatttattttctcataattctgtagaccagaagttcaagatcaaggttctggttgattcagtttctggtgaggcctctcttcttggcatgcatactgacgccttctctctgtgctcacctggcctcacatggcctttcttcattgcatgtgtgtatgtgtgcacacacgcatgtgtgcatgtttacagagagctttctgtatctcttcttataaggaccctmatcctatcagatcagggcctcacctgtgttacctcctttaacctaatcacttccttagaggccccatcttctaatgcagtcacactagggtttcaacatataaattggagtgggggagaatacattcagtccataacacatattataaaaataatgtatttttgtagttgcctattgattagaaattcaaaatcctc

SEQ ID NO: 940002 - DNA, 584 bp, Homo sapiens
aaaatcccctttctttcagggtcatttggttgaggcattaaggaaatacactaacacagaccctgactctgcagaagggcaagctcacctgggtatacattattcaatctgtccctgacattagaaggaagctcccaaaagcaaccatgagacttcatacacctatgagacaacttttaaatgtagtagttaaagttcacaacagtagggacaaggcaaaagagaaaaaaacaaaaagaccaaaagaaatagccaaaaagtataattgataacagttgttttatgcaccttccccactgaaggttacccatcttaagaaaatgtcatgaaagtggtgtctgggatgcccagacaagagccaccaactcactgacccccagatcaaaattagtgtgcctactgtgagcaagatggccattgwcaatgagaatgtcctaactgtctctggtgagagagaggaaaaatagtgtcccatcagtactagagctaaccttcttccactagccccaacaagctgccttgaacaagtaagcttactgagagtcttagaccgttgacccagcagacagcttcctacagtggca

SEQ ID NO: 940003 - DNA, 625 bp, Homo sapiens
cacttttcttggccaaactcttcctttctctctctcataacctgtcttgccgctaaatctgttgtataaggatccaagctcccatttattctgtaacctcaagatggtatgtaaacttctgttactcattgaaaaatggggtgttcattctggaggctcctatgtatacaccttaaataaatctgtatgcattttctcttattgatcaatcatgtcaataatttttaggtgaacctttaggggcccaagagcctatgacccttgtrttagggttctctagagggatagaactaacaggataaaatgaaagggagtttattaaggagtattgattcacacaatcacaaggtgaagtcccacaataggccatctgcaagttgaagagcaaggaagccagcaggagtcccaaaacctcagaagtaggcgagttgatagtgtaatcttcagtctgtggctaaaagactgagagttcctagcaaaccactggtgtaagtctaagagtccaaaagctcttagagtttgatgtttgaggtcaggaagcatctagcatgagagaaaaatgaaggccagaagactcagaaagtctgctttttccaaattcttctgcctgatttattctagccat

SEQ ID NO: 940004 - DNA, 549 bp, Homo sapiens
ctgctgagatacaacaaaagtagtgcaaagagtgaagtttacagccttaaatgcttacataagaagtagaaagattaaaaataaacaatgaaacatcacaactcaatgaactagaaaagcaagaataaaccaaacccaaaatttgctaaagaaaataaatcagaaacataaaagatataaagwtataaagaaaaaattacaaaggattaaagaaataaacagttggttcatcaaaaagatgaaaacaattgataaactcctagctagtctaaccaagaaaataagaataaagatctaaataaacaaaatcaaatataacaaaagacattacaactgataccacataaatacaaagatcatcagagactattaccaactctatgctcacaaactggaaaacctagaggaaacagaaaaattccccaaacataccactttttaagatttatcaaaaagaaatagaaaacctgaatagaccaataataatgagtggtgagactgtatcagtttttaaaaatctccatacaaagaaaagcccaggaagagatg

SEQ ID NO: 940005 - DNA, 556 bp, Homo sapiens
ggtctcactatgttgcccaggctgctctcaaactcctgggctgaggtaatcttcctgcctctgaagtgctgaaattacaaacatgagccactgcagccagtggaaactctttcttgtcttccctgaacccacctgatcctggttttcctcctgcctctctggccttgcctcttcagcctccttcgatagtgattcctcttctgcctgacttccaagtgtttggctccacaggctctgtttaaaataagtctcttggccgggcgtggtggctcatgcctgtaatcccagcattttggaaggccaaggcgggtggatcacgaggtcaagagatcgagaccatyttggccaacatggtgaaaccccatctctactaaaaatacaaaaaaattagctgggcatggtggcgcacaccttgtagtcccagctactcgggacctgggagatggaggctgcagtgagctaagatcgcaccactgcactccagtctggtgacagagcaagactccatctcaaaaaaataaaataaataaggtaaaatgagtctcttaacctcccc

SEQ ID NO: 940006 - DNA, 609 bp, Homo sapiens
cccgcctaattttttgtatctttagttgagatgaggtttcaccatgttggctaggctggtctcaaactcctggcctcaagtgatctgcctgcctcagcctcccaaagtgttgggattacaggtgtgagccactgcgttcagcccatgtacctcattttgtttatccatttgtctcttgatggaaaattgagttgtttccaccttttggctattgtgaatgaacattggcatacaagtatctctgagtctctgttttcaattttttagatctatacctagaagtgtaattgctgggcaattctgtttagctttaagaggaactgccaaactgttttccayaggggctgcaccatttcacatttctatcagcaatatacaagggttccaatttctctacttctctgccaacacttgttttccatttttcccttggtttggatcatagccaccctagtaagtggtagctcattgtgattttgatttgcatttcccaaatgacttgtgatgttaaacatctttttgtgtgcttgttggccgtttatatagcttctttggagaaatgtctattcaagtcatttgctcatttaaaaaactatgttgtctttttta

SEQ ID NO: 940007 - DNA, 640 bp, Homo sapiens
ccatagagaatgagattttcttttctatcacattgtcaggctgcaaattttccaaatttttatgctctgtttcccttttaaaactgaatgcctttatcagcacccaagtcatctcttgaatgctctgctacttagaaatttcttctaccagwtaccttaaatcatctctctcaagttcaaagttcgacaaatctctaggatgggcaaaatgccaccaatctctttgctgaaacataacaagagtcacctttgctccagttcccaacaagttccttatctttatctgagaccacctcaccctgtatttcattttctctataattgtcagcattttggtcaaagtcattcaacaaatctctatggagttgcaaactttcccacatttccctgtctttttctgagccctccaaactgttccaatgtctccctatttcccagttccaaagttgcttccacattttcaggtatcttttcagcagtgccccactcctggtaccaatttattgtatcagtctgctgctgataaagacatatccaagactgggcaatttacaaaggaaagaggtttaatggaaaactcacagtttcacatggctggggaagcctcaccatcattgcagaatacaaggaggagcaagtc

SEQ ID NO: 940008 - DNA, 593 bp, Homo sapiens
gtcttttcttgccattgccttaaagtattcagtgtcctaaagggagttgtcataactgaaagtgcatagaaagaggtcatttacatattggattacagtggagtcttctgggaattttaagtccatcaaataggttcatgagaaatatgtagggccatagtaaatcgttggggcataacagtccaggtgtattgtttattttcccaggtgaaggcaaagtagtgagattctttatgaggggaatattataaaaggcagaacacagccgagagcggtggctcatgcctgtaatttcagcactttgggaggctgaggcaggctgatcacaaggtcaggagatsgagaccatcttggctaacatggtgaaaccccgtctctactaaaaatacaaaaaattagctgggcgtggtggtggatgcctgtagtcccagctacttgggaggctgaggtaggagaatggcgtgaacctgggaggcagagctttcagtgagctgagatcaagccactgtactccagcctgggcgacagagtgagactctgtctcaaaaaaaaaaaaaaaggcagaacacaaatgaatcaccatgaaatattgc

SEQ ID NO: 940009 - DNA, 641 bp, Homo sapiens
tgaggcccaccacccacacatcaagggtaatttttttttttgagacagagtctcactctgtcacccagactggagtgaagtggtgtgatcttggcttacaacaacctccgcctcctgggttcaagtgattcttgtgcctgtctcctgagtagctaggattacaggcatgcactaccatgcccagctaattttttgtatttttaataaagacagggtttcactgtgttgcccagactggtctcaaactcctgaactcaggtgatccgctcrtcttggcctctcaaagggctagaattacaggagtgagccaccaggcctggcccccccccttttttttttcaagacggagtttcactctattgcccaggctggagtgaaatggtatgatctcggtttactgcaacctccgtctcccaggttcaagcgattctcgtgcctcagcctcctaagtagctgggactacaggcgtgcactgccacatctggctaatttttttgtatttttagcagagacagatgtttcaccatgttggccaggctgttctcgaactcctgacctcaagtgatccacccacctcgggctcccaaagtgttggaattacaggtgtgagccaccaagcccagccaagggtaatctttact

SEQ ID NO: 940010 - DNA, 641 bp, Homo sapiens
tgaggcccaccacccacacatcaagggtaatttttttttttgagacagagtctcactctgtcacccagactggagtgaagtggtgtgatcttggcttacaacaacctccgcctcctgggttcaagtgattcttgtgcctgtctcctgagtagctaggattacaggcatgcactaccatgcccagctaattttttgtatttttaataaagacagggtttcactgtgttgcccagactggtctcaaactcctgaactcaggtgatccgctcatcttggcctctcaaagggctagaattacaggagtgagccaccaggcctggccccccccyttttttttttcaagacggagtttcactctattgcccaggctggagtgaaatggtatgatctcggtttactgcaacctccgtctcccaggttcaagcgattctcgtgcctcagcctcctaagtagctgggactacaggcgtgcactgccacatctggctaatttttttgtatttttagcagagacagatgtttcaccatgttggccaggctgttctcgaactcctgacctcaagtgatccacccacctcgggctcccaaagtgttggaattacaggtgtgagccaccaagcccagccaagggtaatctttact

SEQ ID NO: 940011 - DNA, 638 bp, Homo sapiens
cctaacatggcaactggtattcaaacatacagacatccagggagctggcattgggacagaatgaaggcagcaagggccagggggcaggtgaggatgagcagtaaatgtccttcacaggtgctggggtgccttcccaggtagggcagcctccatgtgcggagaataaaggatacagacagaacccttctggaaggagatcggctgtgcccagctcccagtgtgacactgagctgctctctaaacttttctgagcctcttttctctttcatgaaacagggagttgggctagaaaatttctttccagctctaaaaatactgtctaaaaaagcagaagaggggcaggcttgaaggcctcgtcctctgggctrtgtgggtctgaggctctggggagccaccagtggccccgggcaaggtggcccccgtgcatcctcaacccaagtcctgggtcgagccaggaaaagtccagtctgcagaccctcagttcttccctccccgttcccaccctctggttctctcctgcaaccagaagaaggcctgatgcctcccctggacccaactactcacaccatgtcttctgcagcccccaggctgctgggccagcctgcccagtgaccaggtcagggctggcaaggaagagg

SEQ ID NO: 940012 - DNA, 694 bp, Homo sapiens
tgggcccattggattttggaagcaacacattctgcatttcgatgtgttactctggcccattaatcaagtgacccaaaaggctgacggtttgaagtggggtccagaagaggagaaggctctgcaataactccaggctgcagtgcaaactgctctgccacttgggccatatgactcagtagatccaatggtccttgaggtatcagtggcagatagaaatgctgtttgcagcctttggcagrcccccataggtgaatctcagcggacacctccaggattttggagcaaggccctgccatcttctgaagacaactaccctccttttgagagacagctcttggcctgttactggcctttggtggaaaatgaacattgaatatgggtcatcaaatcaccatgcaatctgaactgcctatcatgaactggatgctttctgactcatctagccataaaatgggtcaagcacagcatcattccattatcaaatgaaagtgatatatacgtgattaggctcgagcaggtcctgaaggcacaagtaagttacatgaggaagtggctcaaatgcccatggtctttactcctgccaccctgccctctcttctaatgggctcatggggcattccttatgatcagttgacagaggaagagaagacttagggcctggttcacagatgattctgaacaatatagagtcacc

SEQ ID NO: 940013 - DNA, 694 bp, Homo sapiens
tgggcccattggattttggaagcaacacattctgcatttcgatgtgttactctggcccattaatcaagtgacccaaaaggctgacggtttgaagtggggtccagaagaggagaaggctctgcaataactccaggctgcagtgcaaactgctctgccacttgggccatatgactcagtagatccaatggtccttgaggtatcagtggcagatagaaatgctgtttgcagcctttggcagacccccataggtgaatctcagcggacacctccaggattttggagcaaggccctgccatcttctgaagacaactacyctccttttgagagacagctcttggcctgttactggcctttggtggaaaatgaacattgaatatgggtcatcaaatcaccatgcaatctgaactgcctatcatgaactggatgctttctgactcatctagccataaaatgggtcaagcacagcatcattccattatcaaatgaaagtgatatatacgtgattaggctcgagcaggtcctgaaggcacaagtaagttacatgaggaagtggctcaaatgcccatggtctttactcctgccaccctgccctctcttctaatgggctcatggggcattccttatgatcagttgacagaggaagagaagacttagggcctggttcacagatgattctgaacaatatagagtcacc

SEQ ID NO: 940014 - DNA, 601 bp, Homo sapiens
tggggggaagtttgtggtgatatcccccctgccccagacattggagtgggcccaacaaggacctgaaggctgggacccgggcttcccatcctgtgaaccagagtggggacttgtggtgccttttccaggcccgccaatggctgcccatgggtcctccarggcccataaaagccccacgttcagttagagctcagcagatgttaggacgaccaactgcagagaggagctacccactccagggactcttcactgctgagagctgggaagatgagggggtgaccttcctgcagtaagttcccacttcatggtctcctgtctgctaggagctgaacaatcataaggataccctggctgcagaaaggagctacccagtgcggctctcctctgagctgttctatcacttaatgaaactccttgaagtcttgctcaccctccacttgtctgcgtaactcattcttcctgggtgcaggacaagaagttgggacccactgaatagggctaaaagagctgtaacaaaagacttgggagcttctaaagccagggctttgattcccttttggggcttgcagttcctggcatctccaagtttccaggtacccac

SEQ ID NO: 940015 - DNA, 576 bp, Homo sapiens
agctggaaggagccatctatgagccaaaaaaatggaccctcactagacacagaatctatcaataccttgatattgacttcacagcctccagagctatgagacataaatgactgttgcttataaatcaccagtctatgtatggtattttgttatagccactcgaatggactaagacactgggcctcagtttccttgtagggtaactggagccaatgattcctaatataatggcttatatctggaamatatggtggcctatgtctgtagtcccagctccaaagtaagcattttacaatgtggttgctggatgctcaggagccccccatgatacctggcgttcactccctcatgtgggttccctccctttgcatgcaggcagggcctgttacttgcttttagccaacaggacaaagatgatgggatgtaatttctgcgatttgttccatgagattgtaacatcagtcttgccagaagactctcccccttgctgcctttgataaaacaagtggccatgttgggaggcccgtgtggcaagacaccagtcagcagccagcaaaaaactgtcctctgtatcac

SEQ ID NO: 940016 - DNA, 788 bp, Homo sapiens
caaagccacaggagcagagcttcccaaggacatgggagcccacttcttgcatcagagtgatatgtggatgtgagacacggaatcaaaggaaatcattttgaagctttaaggtttaatgactgccctattggattgtgagttgcatggcgcctgtagcctcttygttttggccaatttctcccacttgaaatgggtgtatttacccaatgcctgtacccccattgcatctaagaagtaaccagcttgatttggttttacaggctcatatgtcaaagggacttgcccttgtctcagatgacattttagacttggacttctgggttaatgctggaatgagttaagacttgggggaactgttgggaaggcatggttgtgttttgaaatgtgaggacatgagatttggaagggaccagggacagaatgatatagtttggctttgtgtccccaccgaaatttcattttgaattgtaatcccataattcccatgtgttgtagtatggacctggtggtacgtaattgaatcatggggtggttcccccatacttctctcgtgatagtgagtgaattactacgagatctgatggttttataacggcctttttcctctttgcttggcactttttcctgctgccatgtgaagaaggacatgtttgcttccccttctgccatgattgtatgtttcataaggctcctcatccctgcaaactgtgagtcaattaaacctctttcctttataaattacccagtcttgggtatgtctttattagcagtgtgagaacaggctaaca

SEQ ID NO: 940017 - DNA, 788 bp, Homo sapiens
caaagccacaggagcagagcttcccaaggacatgggagcccacttcttgcatcagagtgatatgtggatgtgagacacggaatcaaaggaaatcattttgaagctttaaggtttaatgactgccctattggattgtgagttgcatggcgcctgtagcctctttgttttggccaatttctcccacttgaaatgggtgtatttacccaatgcctgtacccccattgcatctaagaagtaaccagcttgatttggttttacaggctcatatgtcaaagggacttgcccttgtctcagatgacattttagacttggacttytgggttaatgctggaatgagttaagacttgggggaactgttgggaaggcatggttgtgttttgaaatgtgaggacatgagatttggaagggaccagggacagaatgatatagtttggctttgtgtccccaccgaaatttcattttgaattgtaatcccataattcccatgtgttgtagtatggacctggtggtacgtaattgaatcatggggtggttcccccatacttctctcgtgatagtgagtgaattactacgagatctgatggttttataacggcctttttcctctttgcttggcactttttcctgctgccatgtgaagaaggacatgtttgcttccccttctgccatgattgtatgtttcataaggctcctcatccctgcaaactgtgagtcaattaaacctctttcctttataaattacccagtcttgggtatgtctttattagcagtgtgagaacaggctaaca

SEQ ID NO: 940018 - DNA, 788 bp, Homo sapiens
caaagccacaggagcagagcttcccaaggacatgggagcccacttcttgcatcagagtgatatgtggatgtgagacacggaatcaaaggaaatcattttgaagctttaaggtttaatgactgccctattggattgtgagttgcatggcgcctgtagcctctttgttttggccaatttctcccacttgaaatgggtgtatttacccaatgcctgtacccccattgcatctaagaagtaaccagcttgatttggttttacaggctcatatgtcaaagggacttgcccttgtctcagatgacattttagacttggacttctgggttaatgctggaatgagttaagacttgggggaactgttgggaaggcatggttgtgttttgaaatgtgaggacatgagatttggaagggaccagggacagaatgatatagtttggctttgtgtccccaccgaaatttcrttttgaattgtaatcccataattcccatgtgttgtagtatggacctggtggtacgtaattgaatcatggggtggttcccccatacttctctcgtgatagtgagtgaattactacgagatctgatggttttataacggcctttttcctctttgcttggcactttttcctgctgccatgtgaagaaggacatgtttgcttccccttctgccatgattgtatgtttcataaggctcctcatccctgcaaactgtgagtcaattaaacctctttcctttataaattacccagtcttgggtatgtctttattagcagtgtgagaacaggctaaca

SEQ ID NO: 940019 - DNA, 620 bp, Homo sapiens
ctgtggagaaatccatgtggcaaggaattgagacctctgtctggtcaccagcataaacctgcctaccatgtgtgtcagccatcttaaaatcagattttctagcctcagtcaagtcttcagatgactgcagccctggctgacatctaactgcaaccttgtatgagactctgaggcagaacaacccaactaagccactcccaaattcttaactcacaaaaaagtatgtgagataataaatgattgttgttgtttcaagctgcgaagttttacataattatgcagtgattgataactaatattgaggaagtgataaacacataataaataaaataatttcagatgycaatagtgttatgaagaagataaaggagaacaatatgatagaggaatgggggaaaagctgctttgctaagactgggaacctctctgaggaagtaacacttgagttgagacaagactgagcataaagaagcaatcatggctgggtgcggtggctcattcctgtaatcctagcactttgggagaccgaggtgggagaattgcttgaggccaggagttcaagacctcaagaacaacttggccaacatagcgagaccctgtctcttaaaaaaaatcaatca

SEQ ID NO: 940020 - DNA, 559 bp, Homo sapiens
tgtggcctggggtgccagggcatgaggccctgcttcaagctgagggcccagggaggagccggtacctctccacctcctttagcttccattcctctggctcctagtcagaattgtgttccagctcccagatgatagggcctgggcctgccaccccgtagatcatgaacccacagtgaggaatggcaacacagacattcaagtccagctagagactcagagtaaccaccacrtcaatgcgtactagccttcagcatcctacaacatggcagcagcctgacatctcctcttattattgtattgtagtctctttagatctactaatatttgctttatatatttgggtgcactgatgttgggtgcataaatatttatgattgttatatcctcttgctgaaccaattcctttatcattatataatgatgaatattttgtttctacagttttggatttaaagttaattttatttgatataagtgtagcttatattcatcccttcactttcagtctatgtgtggtcttacaggtgaggtgagttcttgtaagcagcatatagttaag

SEQ ID NO: 940021 - DNA, 603 bp, Homo sapiens
aaattcaagtatgctgcagaaatttgcataagtaatgaggagccaaatgttaatcaccaagacaatggggaaaatgtttccacggcatatcagggactttcacagcagcccctcccatcacaggccaggaggcctaggagataaaaatggtttcatgggatggtcccatggtcccctgctgtgtgcagcctagggacttcgtgccctgtgtcctaggtgctccagccatggctaaaaggggccaagatacagttcyggccatggtttcagagagtgcaagccccaaaccttggcagcttccatgtggtattgagcctgtgggcacacagaagtcaagaattgaggtttgggaatctgcacctagatgtcagaggatgtatggaaattccaggatgtccagacagaagtttgctgcagggaaggagccctcatggagaacctttgctagggcagtgcagaggaaatgtagggttgaagctcccacactgaagcactgcctagtggagctgtgagacgagggccaccatcctccagaccccagaatcgtagatccaccgactgcttgcactgtgtgctggaaaagtcacactcagtgccagccca

SEQ ID NO: 940022 - DNA, 603 bp, Homo sapiens
aaattcaagtatgctgcagaaatttgcataagtaatgaggagccaaatgttaatcaccaagacaatggggaaaatgtttccacggcatatcagggactttcacagcagcccctcccatcacaggccaggaggcctaggagataaaaatggtttcatgggatggtcccatggtcccctgctgtgtgcagcctagggacttcgtgccctgtgtcctaggtgctccagccatggctaaaaggggccaagatacagttccggccatggtttcagagagtgcaagccccaaaccttggcagcttccatgtggtattgagcctgtgggcacacagaagtcaagaattgaggtttgggaatctscacctagatgtcagaggatgtatggaaattccaggatgtccagacagaagtttgctgcagggaaggagccctcatggagaacctttgctagggcagtgcagaggaaatgtagggttgaagctcccacactgaagcactgcctagtggagctgtgagacgagggccaccatcctccagaccccagaatcgtagatccaccgactgcttgcactgtgtgctggaaaagtcacactcagtgccagccca

SEQ ID NO: 940023 - DNA, 543 bp, Homo sapiens
atgggttatctcaaaatatctgtctttaaattcaaaaattcctttttttttgcttgatccagtctgctgttgtaggtggtagttgtattgagttgtattgttcctttcatttattgaattcttcagctctaagaattctgtttagttccttataataatatctgtccctttgttgactgtctcattcagattatgaattgttttcctcatttcatttcccgtattctcttgtgtctcattgaatttccttaaaattattattttaaactccctttcaggcatttcctaaattttcttttgctttttgaggtcagttatcagagaattattgtgcttctttgagggtgttatgttttcttgctkttttgtttcttgtgtccctatcttgatatctgcacatctggtgagagagttgtttcttgcatttttatggggtagcttttttagagaaagttatttttttttccttgcagatgtgtcctaggatgtcagttgagtagtgtgcattggctttggttctaggtaggtgcagagtatgcttat

SEQ ID NO: 940024 - DNA, 753 bp, Homo sapiens
cagctcccctcagagcaatgatcatctgcgtcctcattatttgtttgctgagctcttgtccctatcagtctaaaagcccttcaggagctggaatcatgcctggaccaggggcctagcatagggtctgtcacagagcaggcatcaatgcctgtttgttgaaatggaaccagtacagaagcacaacagggcagcactcccctcaacttcagctccccaaaggagtgatgagcagagtctgtaattccaacagtcacccttccctctggattcgacctcagcagcatgaccccaccctagatggtctgggtctttccctccctcctttcttcctggtcccacattcaggccaacaggatacacagggcaggatgtgcagtggccaggcatgtccaaccaagtaggccaacctaggaagtgaggatgaagtccaggggaaggagaaatgcytaagaaaagtttgcatctcttaaagcagtaagcaaaggagcttaaggaatttagaattgggactaagtgttcagagaatcggcttaaaaagcaggaggctgaaaaagcgtgcgtctgtctgttgttggcgtctgagtggctgcctcccttccttgtcaaagccctgtacatgttgcccatttgcttgggtcctagcaggccctgaggccaagggagcctgggaaggagctaccctgggaaggagctctccttggggagtgactgacaggttgtcaggcagcagactcttggatgggaacttggctc

SEQ ID NO: 940025 - DNA, 781 bp, Homo sapiens
gccttcagtggaagcggacttgccgtgtgcaaaaaattccacagctagagcagagtgaatgaggaggggagtgtttggagatgagctcagagaaacagtaagacaccaagtcacgtaaggcctgatccaaatacaaaaaaaaccatttaagaattgatctgaaaaggaacatgatctggctcatattgtaaaaggctcactctggctttggcatgcgtaatggactgcaaagggaaagaaagagatgcgatcaattaggaagttttacaacaatccagacaagaagtgatggtgatttggccaggatgttaatggtcaatgtggggaaacagattcatatatcagataggattcaaagtaagaattgaaataaatttgtaatggattagatgtggaatgtgaaagaaaagagggttcaaggataactcaaagatttttcagcaactggaaaaaaaagatgctttttgtgcagatgggatagacttacggaaaaggagaggttttttccccccgagaaggtggaaacagagaggaaaggaattaagagttgtgttttgaatatttagaatttgaggtgtcttttaaatattcagatggaaatrttgaataggcaattggatgtttaaggttgaaatttaggggagaattgccaaaaaaatttttttttaatgtgtgaattaacagattagtgatgatgtttaaattcttgcatttggagatcatctgggaataaagaagagatagaaaagagttttgagagaagagccctggtctttgcaat

SEQ ID NO: 940026 - DNA, 575 bp, Homo sapiens
agagagaatgagagtcaagctaaaggggtttccccttataaaaccatcagatcttgtgagacttattcactaccatgaaaacagtatgagggaaaccacccccatgattcaattgtctcccatcaggtccctcccacaacacwtgggaatcatgggagctacaattcaagatgagatctgggtggggacacagcgaaactctatcgagtgctcacacatgcagaagaattgcatagacttgccataagtagaatctcaagctcaattttgtttataaatgtattaacttaaacaatctttgctattcactcaacatgatatgtttttggtaaggcttagtgtgtctcaaagctattaatatagtgatatagccaattccattgagcaagcattgccttgcagtgcctaaaaatatactcagaattggtagtgagaggacattctgatactgaatcttgccaaacacactatattgcagaaaatgttactatattatccaaaaggtaaatgatcccttgccaatttattgtttccattataattttatattttaattacttaatattatatattgc

SEQ ID NO: 940027 - DNA, 578 bp, Homo sapiens
tatatatataatctatatatataatcatatatatactcatatataatcatatatatataatcatatatatatactcatatataatcatatatataatcatatatatatataatcatatatatatatatatatatatatatatatatatatacacccaaagattccaccaaaaatctcctagatctgataataaattcagtaaagttgcaggatacaaaatcaacatgcaaacatcagcagtgtttcyattcaccaataataaactaactgagaaagaaatcaagaaggtaatccatttacaatagctacaaaaataaataaataaaatctagagataaatttaaccaaggaggtgaaacacctctacaaagaaaactacataacactgatttaaaaaattaaagaggacacaaacaaaggtcacccatgctcatggattggaataattaatattgttaaaatgaccttattacccaaagcaatctacaaattgaatgaaatccctatcaaaataccaatgtcatttttcacagaaagaaaatataattataaaatgtgtatggaactgaaaaagagcc

SEQ ID NO: 940028 - DNA, 575 bp, Homo sapiens
ttcctcaagtataaactgcagagagggccaggtgtggtggctcacgcctgtaatcccaacactttgggagaccaaggtgggctgatcacctgaggtcaagagttcaagaccagcctggccaacatggtgaaaccccatctccaccaaaaatacaaaaattagctgggcayggtggcacatgtctgtgatcccacctacctgggaggctgaggtacaggagtcgcttgaaccggccgggcgcgatggctcacgcctgtaatccaaacattttgggaggctgaggccagcggatcaagaggtcagaagttcaagaccagcctggccagcatggtgaaaccccatctcaactaaaaatacaaaaattagctaggcatggtggcacgtgcctgtaatcccagctacttgggaggccgaggcaggagaaacacttgaacctgggaggtggaggttgcagtgagctgagattgtgccactgcattccagcctgggcgacagagcgagactccatctcaaaaaaaaaaaaaagaattgcttttacctgggaggcagaggttgcagtaagccgagatcgcata

SEQ ID NO: 940029 - DNA, 633 bp, Homo sapiens
ggccccactccagaggatctgactcaggaggtctgaggggcaatgggaggacttgcacttttttttcttttttttttttgaggtagagtttcactcttgttgcccaggctggagtgcaatggcacaatctccactcattgcaacctccgccttctgggttccagcaattcccctgcctcagtcgcccgagtagctgggattacaggcatgcgccaccacgcccggctaattttgtatttttaccggctaattttgtatttttactagagacggggtttctcyacactggtcagaatggtctcaaactcccgatcttaggtgatctgcccgccttggcctcccaaagtggccagacttgcactttttaaagaaaaataatttccacttttattttaggttcagggattgcatgtacaggtatgttacgagggtatattgcatgatgctgaggtttgggacatgaatgatcctgtcacccaggtagtgcgcatggcacccaacagttttgttttcagccctttcccccttttttcctccccccagaatctgtacaagttccctgtgaatgagcatcacctgggaggcctttcttctttaatctcaccagaggtgaaacctttacctttagtgaac

SEQ ID NO: 940030 - DNA, 710 bp, Homo sapiens
gagaccccttctgcttgagaaaatgagtgggaagtgtacagaggactttgtcatgcagcttgggtaccaccgttcaacacagtgggagagagcaccaagcaagcttctggtgctccagaccttggctcgtggatggcatttttggacctgcccggggccacaggggagcccatttccctgaaaggggagacccaggactagcagcattcaccacaagctgactgaagagccctggggccttgagtgaacatcagcagtagccaggagtacttggctgcaagctggggcagtggtggccacagagagattcctctgcttgaggaaagtggaagaaagagtggcaagaattttttcttgcaacttgagggctagcttagtcacaggagaacaaagcaccagtagattcctgagtttcctgactccaggccgtggcacccggatgccatctccaaacccacctggggctgagggaaatcaataccctgaagggaaggayacaaacctggctgaattttccacctgctgattgtagatcccttgggctttgagtgaacataggcagtagccaggcagtggtcactgggtcttgggagagacacagtgctgtgctagctttggatctggcccagtgcagtcccagtggttgtagccacaggggttcttgtgtcaccctttccccagctctaggcagctcagcacagagagggaga

SEQ ID NO: 940031 - DNA, 586 bp, Homo sapiens
agctccaaaatctcattttagggcctgctctctccatttctggcaagaagactctgaggcagatatttgcattcaggaaattactggggaggcctcttggggtcaatgcctttaggagagtgagggaagagggactgcacagagaaacaaagtgaggagggatgaagttgtaacaaagacctcagcaaattctagaggagctctggagctaggatagcccttcacaattgttccaagttttggaggaggagctgtgtcttttacactctttaattgaccaatgtaggrtaccgccaaagctataaggcatgcactggtgagaggttcaccagcattaaagataagtcaattatggcagtactttgtaggccaacatgaacagtagaagatgctgtatcagaatgatacagtgaagacaataggatgccaaaatgatagaagccaggtggtagcacttagccatcagaaataaggtgagtgtagttattagaatgatcaacgagtgcagactggcagccagaggaggccaacatgcagagagatatgaagagggttaataaaacacagtgttcctagtcagaagata

SEQ ID NO: 940032 - DNA, 717 bp, Homo sapiens
actgctgtcttcaaagctgtcagacagggacatttaagtctgcagcggttactgctgtctttttgtttgtctgtgccctgcccccagaggtggagcctatagaggcaggcaggcctccttgagctgtggtgggctccgcccatttcgagcttcctggctgctttgtttacctaatcaagcctgggcaatggygggctcccctcccgcagcctcgctgccgccttgcagattgatctcagactgctgtgctagcaatcagcgagactccgtgggcgtaggaccctccaagccaggtgtgggatataatctcgtggtgcgccgttttttaagcccgtcggaaaagcgcagtattcgggtgggagtgacccgattttccaggtgccgtccgtcaccccttttttgactcggaaagggaactccctgaccccttgcgcttcccaagtgaggcaatggctcgccctgcttcggctcgcgcacggtgtgcgcacccactgacctgcgcccactgtctggcactccctagtgagatgaacctggtacctcagatggaaatgcagaaatcaccgtcttctgcgtcactcacgttgggagctgtagaccggagctgttcttattcggccatcttggctcctccccctaggtaacattcttgccttgttcctaatcttaagttgaatgtatcaaatattttaccattaagtatgtaattttctctca

SEQ ID NO: 940033 - DNA, 717 bp, Homo sapiens
actgctgtcttcaaagctgtcagacagggacatttaagtctgcagcggttactgctgtctttttgtttgtctgtgccctgcccccagaggtggagcctatagaggcaggcaggcctccttgagctgtggtgggctccgcccatttcgagcttcctggctgctttgtttacctaatcaagcctgggcaatggtgggctcccctcccgcagcctcgctgccgccttgcagattgatctcagactgctgtgctagcaatcagcgagactccgtgggcgtaggaccctccaagccaggtgtgggatataatctcgtggtgcgccgttttttaagcccgtcggaaaagcgcagtattcgggtgggagtgacccgattttccaggtgccgtccgtcaccccttttttgactcggaaagggaactccctgaccccttgcgcttcccaagtgaggcaatggctcgccctgcttyggctcgcgcacggtgtgcgcacccactgacctgcgcccactgtctggcactccctagtgagatgaacctggtacctcagatggaaatgcagaaatcaccgtcttctgcgtcactcacgttgggagctgtagaccggagctgttcttattcggccatcttggctcctccccctaggtaacattcttgccttgttcctaatcttaagttgaatgtatcaaatattttaccattaagtatgtaattttctctca

SEQ ID NO: 940034 - DNA, 691 bp, Homo sapiens
gcttcggctcgcgcacggtgtgcgcacccactgacctgcgcccactgtctggcactccctagtgagatgaacctggtacctcagatggaaatgcagaaatcaccgtcttctgcgtcactcacgttgggagctgtagaccggagctgttcttattcggccatcttggctcctccccctaggtaacattcttgccttgttcctaatcttaagttgaatgtatcaaatattttaccattaagtatgtaattttctctcagtttttgtggatgttctttattagggaaaataagttttcatctgttactagtttgstaaaatttaatttttaattatgaatctctgttgagctttatcaaacaatttttctgcatcaattgagatggcccaatggattttctacttaatctgttaatgcagtaaattacattaattgattttctaatattaaccaatcattgtcatatctcatttttttccatacattttttatttggttggcaatgtcttttataggattttttcatctatgtttatgagtgaaactgtactgttattttcatttcttatagtatccttaggttgttttgttacctagacaatgctagcctcatgttaagagttgggaatgttttctcttttttattttctgaaagaagttgcttatgatgtatgttctagcactattgcttgc

SEQ ID NO: 940035 - DNA, 691 bp, Homo sapiens
gcttcggctcgcgcacggtgtgcgcacccactgacctgcgcccactgtctggcactccctagtgagatgaacctggtacctcagatggaaatgcagaaatcaccgtcttctgcgtcactcacgttgggagctgtagaccggagctgttcttattcggccatcttggctcctccccctaggtaacattcttgccttgttcctaatcttaagttgaatgtatcaaatattttaccattaagtatgtaattttctctcagtttttgtggatgttctttattagggaaaataagttttcatctgttactagtttggtaaaatttaatttttaattatgaatctctgttgagytttatcaaacaatttttctgcatcaattgagatggcccaatggattttctacttaatctgttaatgcagtaaattacattaattgattttctaatattaaccaatcattgtcatatctcatttttttccatacattttttatttggttggcaatgtcttttataggattttttcatctatgtttatgagtgaaactgtactgttattttcatttcttatagtatccttaggttgttttgttacctagacaatgctagcctcatgttaagagttgggaatgttttctcttttttattttctgaaagaagttgcttatgatgtatgttctagcactattgcttgc

SEQ ID NO: 940036 - DNA, 691 bp, Homo sapiens
gcttcggctcgcgcacggtgtgcgcacccactgacctgcgcccactgtctggcactccctagtgagatgaacctggtacctcagatggaaatgcagaaatcaccgtcttctgcgtcactcacgttgggagctgtagaccggagctgttcttattcggccatcttggctcctccccctaggtaacattcttgccttgttcctaatcttaagttgaatgtatcaaatattttaccattaagtatgtaattttctctcagtttttgtggatgttctttattagggaaaataagttttcatctgttactagtttggtaaaatttaatttttaattatgaatctctgttgagctttatcaaacaatttttctgcatcaattgagatggcccaatggattttctacttaatctgttaatgcagtaaattacattaattgattttctaatattaaccaatcattgtcatatctcatttttttccatacmttttttatttggttggcaatgtcttttataggattttttcatctatgtttatgagtgaaactgtactgttattttcatttcttatagtatccttaggttgttttgttacctagacaatgctagcctcatgttaagagttgggaatgttttctcttttttattttctgaaagaagttgcttatgatgtatgttctagcactattgcttgc

SEQ ID NO: 940037 - DNA, 586 bp, Homo sapiens
tttggatctatgcccccatccaaatttaatgttcagttgtaatccacaatgttggaagtggagtctggtgggaggcaactggatcatgggcgtgttttctcatgaatggtttagtaccatctcctcagtgctgttcttgtgatagtgagaaagtgagttatgatgagatctggttgtttaaaaaaagtgtgtggcacctccctgcctctctcttcctcctgctccggccatgtgaagatgcctgctctggctttgccttctgccatgagtaaaagctccctgaagtrtccccagaagcagatcctgccaagcttcctgtacagcctttaactgtgagccaattaaacctcttttcttatgaattacccagtctcaggtatttatttatagcagtgcaagaatggactgacacagaaaattggtttcaaatggggactctgtgtggtggctccaatcccacatttcttctctgcactgctctccatgtcccagtctctccagttccagccatggctccaaggggcccgaatatagctcatgctgctgtttcagagggtgcaagccataggttttggcagcttccatg

SEQ ID NO: 940038 - DNA, 462 bp, Homo sapiens
taaatagttcttattatttagagatatgttccataaaaacctagtttattgagagtttttaacataaagggatgttgatgttgaattttatcaaaggccttttctgcatctattcagataatcgtgtgatttttgtctttggttctgtttatgtgatggattacatttattgatttgcatatgttgaatcagccttgcatcccagggatgaagccgacttgttcgtggtggatatgttttttgatgtgctgctggattcagtttgccagtattttattgaggatttttacatcaatgttcatcaggtatattggcccraagtttgttgttgtgtctcttcccagttttggtatcaggatgatgctggcttcataaaatgagttaggaaggaattcctccttttccattgtttggaacagtttcagaaggaatggtaccagctcctctttgtatttctggtag

SEQ ID NO: 940039 - DNA, 606 bp, Homo sapiens
cctactggagccagcttggagcttctggacttgctggtacatcactccaatctctgcctctgttgttacatggtgtgcggagcgtgattcccaaagacacaattctgaaagccataatcttaaaggttgaaatccctaaagtgtaaatccctaagctctcaaatcccaaaaattgtgatcacgggatagtcgcatcrtgttaggtggactgtaagcttggcttctaaaagtgaatttcaaagtgttaccaataacatttgttttccctgtttagcccagtgcatttggcagcaaatccaggtgagtgaattggccttgtgacacagcaacaatgaaaactttaggttaacaatgcattatttcctgcattggcatgtcttccagctgatgatattccaggagctgttaatgaattaaagccacattgacctgaggaagccagtgaaactcctgactggtttgaaaatttgtgcacagtaggacaagaagacacttaagtaatggtgctgctgttcgataaccaggattgtttccatcaaattggcctgtaaatgaatgcatgcaaaatggatgtctgcatgccccaaacaacacagaagcacagca

SEQ ID NO: 940040 - DNA, 552 bp, Homo sapiens
ttttagtagagatggggttttgccatgttgaccaggctggtctcgaaacccttacctcaggtgatccacccaccttggcctcccaaagtgctgggattacaggtgtgagccaccatgcctggcttaatttttgaatttttagtagagacagggtttcaccatgttggccaggctggtctcaaacttctggcctaaagctatccacmcaccttggcctcccaaagtgctaggattacaggcatgagccactgcgcctggccagtcatggacatttgagctgtcctttttagtatgtaaaaagccattactaggtggagctgcagggacaagagaatcttgaagaggcattataaatactcacaagcaaaagcagaggattcccccttcctcccaggagtttagaatattctaggacaaacaattctaaaccacttgagcaacagtgtttcttctcttagggtctgtttgagcctatattgttcaaaaactccattattaatatatttttctttaaataaattattttctgataatttaaataattcatttcta

SEQ ID NO: 940041 - DNA, 679 bp, Homo sapiens
attatcctaagcaaattaatgctggaacagaaaatcaaacacagtaggatttgtaggagtctatcattccacttacactgtaatttgttcattatattgagccagtggttctcaaccagcagcaactttgccccctagaaaacatttggcaatgaccggagatatttttggtggtcaggaggsggggagatcctggcctctagtgattaggggacaggggtgccgctaaacatcctagaatgcacaggacagcccccactataaattatctggttcaaaatgtcaacaataattagactactgggtttcttagaagctagtgtaaataagaaaacgcatgctcacacagaaacaaagacatcttttaaagctctagtaactgaaactgtgtggtattggtaagggaatagacaagacaaatagattaatggagcagaaaagaaagtcttaccactgacgttttcaaacaacggggaatgatgtaagggtaattgtctatccatgtgggaaaaagataaagctgtacctttacatcatggcgtttgcaaaaataaattctagatagattagaaaatgtaaaagtaaaagcaagattatgtttattaggagaaaacataaacatgtttctatgatcaaaagtaaaaaaagaaaaaaaaatttaagaaaaatatgcataatt

SEQ ID NO: 940042 - DNA, 679 bp, Homo sapiens
attatcctaagcaaattaatgctggaacagaaaatcaaacacagtaggatttgtaggagtctatcattccacttacactgtaatttgttcattatattgagccagtggttctcaaccagcagcaactttgccccctagaaaacatttggcaatgaccggagatatttttggtggtcaggaggcggggagatcctggcctctagtgattaggggacaggggtgccgctaaacatcctagaatgcacaggacagcccccactataaattatctggttcaaaatgtcaacaataattagactactgggtttcttagaagctagtgtaaataagaaaacrcatgctcacacagaaacaaagacatcttttaaagctctagtaactgaaactgtgtggtattggtaagggaatagacaagacaaatagattaatggagcagaaaagaaagtcttaccactgacgttttcaaacaacggggaatgatgtaagggtaattgtctatccatgtgggaaaaagataaagctgtacctttacatcatggcgtttgcaaaaataaattctagatagattagaaaatgtaaaagtaaaagcaagattatgtttattaggagaaaacataaacatgtttctatgatcaaaagtaaaaaaagaaaaaaaaatttaagaaaaatatgcataatt

SEQ ID NO: 940043 - DNA, 637 bp, Homo sapiens
tagactctcattagggcacacctggcagccactaccagtggataagagttggcattgaagataaaacctatgagccacatatgacttaaaagtttgatacctttgtatggatagatctacatacacatacatgcacatgtacatacacacacaaatgcctcattggagtgcagttcagtcattgtagcttaacctgtaatactcacaccatcatctctattatgaattattccattatttcctaaatgggccccatgttactgtgcttgccctcatacactctattcctaacttttaaaatataacttatatkatgtcattcctttcctcagagctctccagatgttccccctttcacttagagtaaaacagtctacaaaaccctacatggtctcataccgtcatatttctgccttcattttctattttttttttctgtttgccactcttcttcaatcaaactgggctttgtgctattcctagaaaatgcaatgcctggtggactctgtcttgttgccttaaatatactggctgtttccctgtctgcaacataacttcccccaaatatccacatggcctctcactgacttctccaagtctttgcaaagatgtccccaatgggtgtgccctatcctga

SEQ ID NO: 940044 - DNA, 802 bp, Homo sapiens
gagtggcaggtgagcaaatggagcttcatctgtatttacaaatgctccccatcgctggcattactgtctgagctccacctcccatcagatcaacagcagcattagattttcgtaggagtgtgaacgctattgtgaactgcacatgcaagggatctaaggtgcacactccttatgacaatctaatgcctgatgatctgaggtggagctgaggcagtgttgctagcactggggagtggctgcaaatacagactaatgttaacagagaattatacacataggccataataaatcaattgcttgcagactcatatcaaaaccctatcagtgagtggcaagcaacaattaagctgcatctggtggcaggctttatagtggcaaataagttgaggtacttcaattgcacaactgcatctggtggcaggctttaagtcagaatctgacactttagtctgcatgtggcccacacattattttatttaccacttctgtcygtacctttttcctacactgcgcacttgtctcagtcacagttttggtaagcccacaagctaaccctagccaaaatgagtaaaaaccaaacatcactggagagcttctttgaaaaggggaaaagacccaacaactctaagactgccaacaaaagaaagctgcatttaaaagaaaataacaagagtgctacttaaattacaagttctttgtaacaggtgattcacattctccaagcccactttgtataatgtgtggtgactggctatccaacaaggccatgaaaacttcaaaactgctgtaccacatggagacc

SEQ ID NO: 940045 - DNA, 772 bp, Homo sapiens
gaaccaatcattatggccagagggagggattgacctgctttgggtcccagagcctgttaggtgtttggataagactgctttgaaccccttgggctgaaatggagagggtacattctcaaaaggaaaaccaaggttcccatcaaaaggagggatggattctgggtagacaaagacaacrttgcttacttcccaaccttagaacttgttccagtttacccttgtctcatccactaggtgtgattgagcatcttgttccttgttttgccccatgctgaacgctacacatgtgtgattcccatgaactgggggttgcaggggggtgaggtattcagaaccctgccagaatttcttggaaaaagagggagaaggccttttctagtgctaccataaccatcttatacaaagattgaaagtgctctgcatgcttcttgccccttacccactttgtggctcatcatgaagttgagaaggtgtaggtcgaagaagttctgggaagggtaggagcactgagctggatgttgggaggctggaacgctggttctagctctgtcagcagttagctgtgaggccttgagccagtcatttgatctttgtttcttggtttcctggtctagaggagggaattgagttggatagtccctgaggtatattcttctagttcttaatatttaatgataattgtgctttgacagagaacttaagaattttatctgtccaaacaagtgaaaggtggatagatcttggactctgcggagaccaagatacgacaaga

SEQ ID NO: 940046 - DNA, 631 bp, Homo sapiens
agctgtaggctaaacttaatttaacaaacatcactttctgagagcccgaggaacctcaaaatatttagggaactttgaaaagacaggaactcacccaatttgtacaagtactacaagcacagtctgatggtaaattctggcttggtttcctwgtcttaggaggtttttaaagtcgaatctgaaatttatgaaaaaatttagcaaagtcaacttaaaaatatcctatatggccaatcactatgcttgctgaactttatacaaataatcaggcccaagtataataagactaaaacttattttgccaataaattagttctgctatgatttatctttggtaaaaaaaaatggttggctggaaaggaaaaaaatatatttcagaagataactaagcacacttgctattagactctagccctgtccattgttttgtgagattttatgattttcctacaataattggactgaaacctgaattctttcctggctacaagctccaaactaatgtttccatttttttttttcatttttcttatttggacttaatgaagcctttttcctgagactctgcaagctgaagttcatgtaaaaaccatcttctgacatacaaacttacagacccgaaaagtctgtc

SEQ ID NO: 940047 - DNA, 571 bp, Homo sapiens
ttcaccatgttagccaggatggtctcgatctcctgacctcgtgatccacctgtctcggcctcccaaagtgctgggattacaggtgtgagccaccacgcttggcccgggtccagtcttttcaaagggaaactcagacttaatgttgaaataatatcagtttccaatatttttatagtgttctgtagcttgggaactaatttcacataaatcagctcatttattatatgtgaaaacagcattattagtgaacgtgaattccaggaagactcatacactctccaaaccaaatgaatgattccttcgtggttttgaaatagatggggatggaaaattcagggaaataaaaatctagtctcttttttagttattcttttaagttatattcactagtatgaatgaactattttcagcctatgrctttttcaagacatcaggatatgcctgagtgccctgacaaaataatgtacattcaatactataagagaatttctaaagagaatccatcctgtgaatgcggaggtggttgtctctaaacacaaagccctgtacaacattaaaaaactaaaaccta

SEQ ID NO: 940048 - DNA, 758 bp, Homo sapiens
gtccacttgcaggtggtgtctgcatatcatgcagaaccatctgtgaaccaggccctagtcttctcttcctctgtcagctcatcatagagaactccccatgaggctatcggtgcagactggggaagagaaggcagggtggcaggaatggacaccaaggacatttgaactacttcctcacgtaacttacttgtgtcttcacaacttgcttgagcctgatcacgtatataccacttccattagatgatggaatgctgctgcgcacgacccactttacggctagatgggtcagaaagctcccagttcatgataggcagttcaggtcacatggtgacttgatgacccatagtcaaatgttcagtttccaccaaagyccagtaacaggccaagagctgcctctcaaaaggagagtagttatctgcagaagatggcagggcctttctccaaaatcctagaggcctctgctgtgattcacctatggcagcctgccaaaggctccaaagagcatccctatctgccactgacacctcaagcaccattggatctgctgggtcatatggcagaagtggcagagaagcatgcacagcagcctggatttgttggagagccttctcctgttctggaccccactcaaaactggcagccttttgggtcactcagtaaatgggccggagtaacacaccacaatgaggaatctgttgtctccaaaatcccgataggcccactaagcattgtgcgtctttcttgattgtaggaggggt

SEQ ID NO: 940049 - DNA, 607 bp, Homo sapiens
taagagattaaagtaaagacaggcataggaaatcacaagggtattgattggggaagtgataagtgtccatgaaatctccataatttatgtttagagattgcggtaaagacaggcataagaaattataaaagtattaatttggggtactaataaatatccatgaaatcttcacaatccacattcttctgccatggcttcagtgggtccctccatttggggtccctgactcccgcaacagtgattaaaatattaartgcttccaaatggtacaatttgagattctgtgtataaaattgagtatgaatgattaaaatagtgaagtagtttccatcgacttctgaaaacaaagaagctttctgtttgttcagtttcttttttaattttaaaaatttatgactatttttattacataatattcaatcttataattgacattgaatgtatttttttcaaaataaaatttttcttcaccttcaaaaaagacttctattttactaaaatgatgtagaaaccagttagccttaagtttaaatggagaccaatatattaattttcaagttacagaattcctaccaaagaggggatagctatagctatctaacaccct

SEQ ID NO: 940050 - DNA, 555 bp, Homo sapiens
gcaagactccgtctcaaaaaaaaaaaaaaaaaaagaaaaagaaagaaaattcccagagtaaatgaaaatcagcactttgtaaacgtttgaaaatctagagtgtctgaactacctaagaaaatattgttgcatgaaaatttcaaataaaaacaagtagcccattgttttcaataaaaatgctggctaataaccacactacaactgcattcttctttattgccaacttacacaggaacacgcccatttaagaaacctttgaatatgtgtgtataaaaatacttgttacatgaacaactaatggactctaattaggcatatatcaaataattgctgtttgattttttatttgagatacaaaacatttgtgtttgctttgttagtatgtttttractaaaaatatgggaccaaactaggtattatgctacacccagatgatcagcacatttgattttattggcaatacctgaaggaatgaaaattacaaaatatttttgagatatttgtatcgttggcttagtgaatttagaaatacagaaataaaacttccattttga

SEQ ID NO: 940051 - DNA, 555 bp, Homo sapiens
gcaagactccgtctcaaaaaaaaaaaaaaaaaaagaaaaagaaagaaaattcccagagtaaatgaaaatcagcactttgtaaacgtttgaaaatctagagtgtctgaactacctaagaaaatattgttgcatgaaaatttcaaataaaaacaagtagcccattgttttcaataaaaatgctggctaataaccacactacaactgcattcttctttattgccaacttacacaggaacacgcccatttaagaaacctttgaatatgtgtgtataaaaatacttgttacatgaacaactaatggactctaattaggcatatatcaaataattgctgtttgattttttatttgagatacaaaacatttgtgtttgctttgttagtatgtttttarctaaaaatatgggaccaaactaggtattatgctacacccagatgatcagcacatttgattttattggcaatacctgaaggaatgaaaattacaaaatatttttgagatatttgtatcgttggcttagtgaatttagaaatacagaaataaaacttccattttga

SEQ ID NO: 940052 - DNA, 622 bp, Homo sapiens
ccatctgcccctggcctggacctctactcaccctgaggaacaacaccactgtataaattctgaacatcttgttttatttacatgtagattcattattctagtaattagtaagtcattataactgttatttcttttaaaaaaaaaaaaaaacatgtctatatcatagacgtaaaattcggatggcatttgaataaaaagcatggatttcccaccccaacctccagggcatctgggagaaccgtgctggataagctcaagcaggggktaggcagggaagaggagggaggagccagggcagaaagcctggcctcagtttcctgggctgcccagcccccagctccatcctcacctcccgtggctcaagggagggtgggagagggatgtatcaggcaagccctggctgggaatcaggaggccgcaggccagccctgctctggtagcaaccgggccaggcttggccgctgcctcacctgcagcatctgggatttctgttgcacaggagctcaaaacacaagctccgccatctgcccaccttcctctactcacctccctctgtccccagaaccatctctacccaccccacccctgccttcactgcctccttgcccctcataaacatcta

SEQ ID NO: 940053 - DNA, 613 bp, Homo sapiens
gcacatgcctgtaatcccagctactcaggaggctgaggcatgagaatcgcttgaatctggcaggcggaagttgcggtgagccaagatcgcgttactgcgctccagcctgggcaacaaaagtgaaactccatctcaaaaaaaaaaaaaaaaaatcctcaggaagattatttacttataatctcctccttccttaattagcagtctcagcatttctgcaataaccaagtctcagcatccagtgaagcagcctgcaacatgcgggagctcagggcattgccactgcacatggggcacctggtgggactttggcaaggattttgtcattaacactgagcaaaactctacgaagacagaggcattcttttagattaaaaactaacaacataaggcgggacatggtggctcacrcttgtaatcccaacacttcgggaggtcaagggggacagatcacttgagctgaggagctcaacaccatcctggacaacatggcgaaacccgtctctactaaaaatacaaaaattagctgagcgtcatggtgcacacctataatcccagctattcaggaggctgaggtgggagaatcgcttgaacccaagagcagaggtagcagtga

SEQ ID NO: 940054 - DNA, 746 bp, Homo sapiens
gagcagctgggattacaggtgcccaccagcatgcctggctaaattctgtatttgtagtagagatggggattcaccatgttgcccaggctggtctcgaactcctgtgctcaagaatctgcccacctcaccctcccaaagtgctaggattacaggtgtacaccactatgcctggcctgtctgtgcttttttttttttttttttttttttttgagatggagtctcrctgtgttgccaggctggagtgcattggcttcaacttggctcactgcaatctctgcctcctgggttcaagcaattctcctgcctcagcctcccaagtagctgggattacaagtgtgcaccaccacacccagctaatttgtgtgtgtgtgtgtatttttagtagagatgggttttcaccatgttggcctcaatctcctgaccttgtgatccacccaccttggcctcccaaagtactaggagtgcatcaccatgcctggccctgtctgtgctttctaagtcttagtcataaaacttttgcctaggccaatgccctgaagagtttgctctaggttttcttctagtatgtttacagttttggtcttatgtttaagtctttaatccattttgagttgatttttgtatacggtgacaggtagggatcaagttttgtccttctgcatatggatatccagttttcccagcacaatttattgaacaggtggccctttacacaatgtacgttcttggcattttaattaaacgtt

SEQ ID NO: 940055 - DNA, 746 bp, Homo sapiens
gagcagctgggattacaggtgcccaccagcatgcctggctaaattctgtatttgtagtagagatggggattcaccatgttgcccaggctggtctcgaactcctgtgctcaagaatctgcccacctcaccctcccaaagtgctaggattacaggtgtacaccactatgcctggcctgtctgtgcttttttttttttttttttttttttttgagatggagtctcgctgtgttgccaggctggagtgcattggcttcaacytggctcactgcaatctctgcctcctgggttcaagcaattctcctgcctcagcctcccaagtagctgggattacaagtgtgcaccaccacacccagctaatttgtgtgtgtgtgtgtatttttagtagagatgggttttcaccatgttggcctcaatctcctgaccttgtgatccacccaccttggcctcccaaagtactaggagtgcatcaccatgcctggccctgtctgtgctttctaagtcttagtcataaaacttttgcctaggccaatgccctgaagagtttgctctaggttttcttctagtatgtttacagttttggtcttatgtttaagtctttaatccattttgagttgatttttgtatacggtgacaggtagggatcaagttttgtccttctgcatatggatatccagttttcccagcacaatttattgaacaggtggccctttacacaatgtacgttcttggcattttaattaaacgtt

SEQ ID NO: 940056 - DNA, 653 bp, Homo sapiens
tatttctgatagtgtttcttttaattagtatagctagtggtctatctattttattaattttttgaaaaaacaagctcctgggtttgttggttttttgaagggtttttcatgtcatctccttcagttcagctctgatcttggtaatttcttgtctactgttagctgtgggagttgtttcctcttggttctctggttctgttagttgtgatgttaagttgtcaacttgagatctttctatcttttcgatgtgggcatttagtgctataaatttccctcttaatgctgctttagctgcatcccaggaattctaatatgttatctctttgttctcattagtttcaaagaactttttgatttctgccttaatttcattatttacccaagarccattctagagcaggctgttcaatttccatgtagttgtgtggttttgaatgaattccttttttttctttttttttttttgagacaaactctcactctgtcacccaggctggagtgcagtgtcatgatcatagctcactgtaacctccgcctcccaggttcaagcaattctcctgcctcagcttcctgagtagctgggactacaggcgtgtgccaccgcacccgggtaattttttgtattttattagtagagatggggtttcaccata

SEQ ID NO: 940057 - DNA, 788 bp, Homo sapiens
gagggggcatggtggggtcaaatggtggggagacatgaggggtaaggctggcgagaaatggggcaggagggagtgtggggggcagacagagtggggtcctcaaagctgttgtaaagagctcagacttggccaggtgtggtggctcacgcctgtaatcccagcactttgggaggccgaggcgggtggattacctaaggtcaggagttcgagaccagcctgaccaatatggtgaaaccctgtctctactaaatacaaaaaattagctgggtgtggtggcacatgcctgtagtcccagctacttgggaggctgaggaaggagaatygcttgaacccaggagttggaggttgcagtgagccgaaattgtgccattgcactccagcctgggcaataagagtgaaaactctgtctcaaaaaaaaaaaaaaaaaaaaaagagctcagattttgtcccaggggtagttgggagccatgcagggcgtcaggcaggtgctggtgttcttgggttcgcatttggaaagatgcctttgggtggtaaggagtgggtagaaggaaatgggatggagaaggcagtgcagaggctacagagaaagatcaggctgggcctggagacctgggaggctttggggtctgtcttggagaatgggggtggtggtatcatctcagttggtgcctggacaccagggggaccagtcaggctcttggactccagctttcagccctgggaggctggaaggccccaaggaattccaggcccccacctgtgtcctcccgcctgggccgcagcacaga

SEQ ID NO: 940058 - DNA, 604 bp, Homo sapiens
tctcatagtcatttgatatctcctggttaggtgcttgcttggtctctgctagagtccagaaggatgccaggagctgattttctaagggtgagcatttctctacatcagaagtcatgaacttgcctctaaccctaggggtctgtgctacgaatcttctgttagggtgtggcagacacacaaccttgtctacatggatacttcttttgcaccgttgggtttgtgattgggtaaggcccaagcagcaaggtacttacaccactgactagatctctcgtgctctgatccccacttgaaactgatcattttgactgrgtacagtggcttatgcctgtaatcctagaggtttgggaggccaaggcaggaggatcacttgaggccaggagtttgagacccgcctgggcaacatagtgagactccatctctacaaaaataaatttttttaattagccaagctgggtgcggtggctcacacctgtaatcccagcactttgggaggccaaggtgggtggattgcttcaggtcaggagttcaagaccagcctggccaacatggtgaaacctcatctctactaaaaatgcaaaaattaggtaggcgtggtggcagg

SEQ ID NO: 940059 - DNA, 604 bp, Homo sapiens
tctcatagtcatttgatatctcctggttaggtgcttgcttggtctctgctagagtccagaaggatgccaggagctgattttctaagggtgagcatttctctacatcagaagtcatgaacttgcctctaaccctaggggtctgtgctacgaatcttctgttagggtgtggcagacacacaaccttgtctacatggatacttcttttgcaccgttgggtttgtgattgggtaaggcccaagcagcaaggtacttacaccactgactagatctctcgtgctctgatccccacttgaaactgatcattttgactggrtacagtggcttatgcctgtaatcctagaggtttgggaggccaaggcaggaggatcacttgaggccaggagtttgagacccgcctgggcaacatagtgagactccatctctacaaaaataaatttttttaattagccaagctgggtgcggtggctcacacctgtaatcccagcactttgggaggccaaggtgggtggattgcttcaggtcaggagttcaagaccagcctggccaacatggtgaaacctcatctctactaaaaatgcaaaaattaggtaggcgtggtggcagg

SEQ ID NO: 940060 - DNA, 544 bp, Homo sapiens
tggtagtgcgtgcctgtggacccagctactcgggaggctgaggtgggaggatcacctgagcgtgggaggttgaggctgcagtgagctgtgactgttatcactgcactggcctgggcaatagagtgagaccctgtctcagaaaaaaaaaataaaacaaaaaaccaaaaaccaaaccaaccaaccaaccaaccaaaaaacctaaaaaagaaaaaaaacaacctcccccaacaaaaaaccagtgtaataactatttacatggcatttacatcayttatatcgcatccagtattataaggattctagagctgatttaaaatatataggaagatatgcgtagattatacacaaatactacaccattttatatgaaggacttgaacatctgtagattttggcatccatgggggtcctggaagcaatcctccacggatactggagatgactgcacatgcaatctggaacgttgaccttcggccttggcatggctcctagtatgagctggggattcttttagctgatttgagctactatggctgactcagtt

SEQ ID NO: 940061 - DNA, 606 bp, Homo sapiens
aaatcaatatttttttttctctaatacagtcccaagtaccaggaaactgtggtaaaaagtttgctctgcccacaaagataaacagataacatcaaatgtttacagtacaggaagaagaggacttctcgttacttctcaaggacttcatcttcatagaaaagaaaagttctatgggaccgcctgactccctggasagaccccaggtcagagaaggcacatacctgacatagagtgaaatgggcacaacggtgttgaggatgatgatgtaggaccagaaggagaggaagccagagaagaaggcactgtccactgcctcatcccacggcaggtagacctggaaacgcatccccacctcgtgctcccagatggcattgccaatggccaggatcacccccatgcaaaccaggaatccaaaaatctggggaggaatgagaagcacaggcgaggctgacatgtaggaagccctcaaaaccaagtgcatctgtgatgtattcatcccttgagccctcaaaagctcagatgctctagtgcaagcttgtccaacccatggtctctgggccacatgtggcccaacacagattcataaactttcttaaaacactatga

SEQ ID NO: 940062 - DNA, 418 bp, Homo sapiens
tgggtacccgatgtggaaagaacgtcgatgagtgtctcagtcagccatgcaaaaatggagctacctgtaaagacggtgccaatagcttcaggtaaaaggctaagtctgattcttttcactgtttttattttttaaactattcagtgattctgcagcctttatggagtattgctttgagtctcaagtcagtcattctcaaatgctggcccgaggataggctacagytgaatattcccaccgccatttctgcttcactaagcctgaagtagagcctatcattttaaaataggcaacctgttatggcttaagtttcccaatgattctgatgcacagccatgtttgggaactaacgttctatacttgggaagtcataaaagatgaaatataattactcagaagcaaatacagtagtactaga

SEQ ID NO: 940063 - DNA, 605 bp, Homo sapiens
taaaaagtttttttgtagagatgggggtctcactatgttgcccagtatttctgaggattttaaaaactgtgataaaatatataacataaaacatagcatcttaactatttgaactgtgcagttcagtagtgttaagtacattcacgttgttgtgcaaccaatctccagaacactttcatcttgcccaactgaaattttatagccattaaacaataactcctaactttttcctcctcctcctgtcccctgtcaaccatcattctactttttgtctattgcttgaataatctgggtacctcatataagtggaatcataaagtattcatccttttgtgattggcttattgtgacttagcataatgttctcaaggttcaaccaggttgaagcatgtgtcagaatttcattcctttgtagggctaaataatattycattgtatggatataccacattttgattttccattcatctgttgatggacatttcagttgtttccacctttgggctactgtgactattgctgctatgaacgtaggtttcaaatatctgtccaaggccctgttttccacagcagctatcatcttacattcccagcaacagtggaca

SEQ ID NO: 940064 - DNA, 660 bp, Homo sapiens
acagaggagaccgacagtggatagctcctctccacaggcagggtctcctgaacgagtgtccaactctcagcagagaggagactcacagtgggtagcttctctccacaggcagggcgtcctgacatctcttctagtctgactgagtctgggcttttatgggtttcagaagggaggaagtgcatactaatttgtccatgggtggccatgggtgagtctgagaaatgcaccaaaagttctcattccagtccacagaactggcagcccagccccaagtcttcaccggggacccacccctttccacccagaagactgtctgcctccaccaccatcaacctgccatccacagtgcccatggtgcccaagctgctcatgcagaggggtgcccgcaggctggcattgagctgccctaagctcccccttggcctccccttgrcacccaacgtccagagggggctgagggcagcagggggctggtgtgtcagcactgcccccaagcacgtgcacacccagctaggtcgcaacagcacctgggctcagcctcaattttcctcagggagcagggagaggccaggcaatgggagcaggtatttctgagcctacggggggagagggacttcctggtcccctgaaaatgcagagatgcctgagtccacagctgca

SEQ ID NO: 940065 - DNA, 706 bp, Homo sapiens
gaaagagttacctgctgcaacatggacaaaccttgaggacattaggctaagcaaaataagccactcatgaaaggacagacgggataattctgcttggaggaggcacctaaagtggccggagtcacagagacgggaagtagaatggaggttgccaagggcttgggggagggggaacggggaggtattcaagccaggccaaatttcaattcgtggtgatgaaaacgttctactaggccaggaacagtggctcacgcctataatcccagcactgcgggaagccgaggagggcaaaacacctaaaggtcaggagtttgagaccagcctggccaacatggtgaaacgccatctctactaaaaatacaaaaattagccaggcgtagtggtgggcacctgtaatcccagctactagggaggctgaggcaggagaattgcttraggccaggagatggatggtgcagtgagctgacatggcaccactgcactccagcctgggtgacaagagcaaaagtccgtctcaacaacaacaaaaaactcttctgatggaaggcagtgacagttgtacaacaatgtgaatgatgtgaatgtacttagtgaccctaagccatatgtaaaatcctgtgcgtattttaccacaattttttaaataaaccttccccaaatctacaaacatgacatctttgagatttgcacaaagcttccatctaca

SEQ ID NO: 940066 - DNA, 812 bp, Homo sapiens
tgggtttctggattgggtggggacttggagaacttttgtgtctacctaaagcactgtaaacgcaccaatcagcactctgtaaaaacacaccaatcagcactctgtgcttagctaaaggattgtaaacgcaccaatcagcactctgtaaaatggaccaatcaccagaatgtgggcagggccaaactaagggaataaaagctggccacccgagaaagcagccgtaacctgctggggtccccttccacgctgtggttggtttgttcttgcactctgtggaagctttgttcttttgctcttcacaataaatcttgctgctgctcttctttgggtcygcactaactttgtgatctgtaacactcaccgcgagggtctgaggcttcattcctgaagtcagcgggaccacaaacccaccaggaggagcaaacaactccggaagcaccacctttaagagctgtaacactcactgcgaaggtctgtggcttcactcctgaagccagcaagaccacgaacccaccagaatgaagaaactctggacacatctgaaggaacaaactctggacacaccatctttaagagctgtaacactcaccacgagcgctggtggcttcatttttgaagtcagtgagaccaagaacccaccagaaggaataaattccggacacactaagaccaagctgctagccttcacacaggtgagcatagaactggaatcatgtcctttacaatatattctcttagtcaaagccttcatagtccagccaaggtccagggaaggagagatggtcttggacttttctcgacgagaatgccaa

SEQ ID NO: 940067 - DNA, 812 bp, Homo sapiens
tgggtttctggattgggtggggacttggagaacttttgtgtctacctaaagcactgtaaacgcaccaatcagcactctgtaaaaacacaccaatcagcactctgtgcttagctaaaggattgtaaacgcaccaatcagcactctgtaaaatggaccaatcaccagaatgtgggcagggccaaactaagggaataaaagctggccacccgagaaagcagccgtaacctgctggggtccccttccacgctgtggttggtttgttcttgcactctgtggaagctttgttcttttgctcttcacaataaatcttgctgctgctcttctttgggtccgcactaactttgtgatctgtaacactcaccgcgagggtctgaggcttcattcctgaagtcagcgggaccacaaacccaccmggaggagcaaacaactccggaagcaccacctttaagagctgtaacactcactgcgaaggtctgtggcttcactcctgaagccagcaagaccacgaacccaccagaatgaagaaactctggacacatctgaaggaacaaactctggacacaccatctttaagagctgtaacactcaccacgagcgctggtggcttcatttttgaagtcagtgagaccaagaacccaccagaaggaataaattccggacacactaagaccaagctgctagccttcacacaggtgagcatagaactggaatcatgtcctttacaatatattctcttagtcaaagccttcatagtccagccaaggtccagggaaggagagatggtcttggacttttctcgacgagaatgccaa

SEQ ID NO: 940068 - DNA, 587 bp, Homo sapiens
gagcagctgggattacaggcgcccaccactacacccggctagtttttgtatttttattagagatggggtttcaccatgctggccatgctggtcttgaacccctgacctcaggtgatctgccggcttcagcctcccaaagtgctactgcgtgagccactgcrccagccccaaggagatttctaaaatggcatgcaaagctttgagaccagttcactgtagttttctcaggggaaaaaaagtaaaactttcaagaaaactggattgtcagtatcttaaccgtagagttagttcatgattccttttaagagacaaacttagaatcaaatcattgattattgtagctgggaggaagcttagacatggactagtcttatcaatttatttcaaagctaagcctgactgcagagtataccttagtcgttagagcatggaatttttcatccaataaaatttgggttggggttttaattctatgatgaattgtaggatggccagggttaaaggtactaactttccattgcctttatctataaaatatggatgatagtatctatcatatgaatgtgccatgaagattaggccagata

SEQ ID NO: 940069 - DNA, 705 bp, Homo sapiens
gacccagggatccctgcactctcatggacctgggaaaacccctgcccccacaggcctagaagtacctgctcctgctgcctggcctctccctgctgtctgtgcccactccagtgcagagccaagttgtggccaagcccaggcactgtcgtgacccagctaggtgtgcatacacttggggtggcactgacacaccatccacctgctgcctcagctccctctggactttggacaccaatcagcatggaaaggaagctatggggcagagggaggctcagcacgggtttgagggttccactcagtgcaaasagactgggcactgtggacagaatgttgatggtggcaggaggcagacagattcctaggcaggaaggggcaggtccctgtgaaacctcaccttcaggccagggatggcctgaaacctggggtccaggctgccagttccaggttgagtctgacccagagtaagaatttcactgatgccttttggccaatcagatggtgctttttccaggcccacccgtggttgcccatggatcaatcacacacttcctccattttgagcacataaaaaccccagactcagccaaacttagaaactcatcaggatgacctgcctgtggaaaggagctacccattttgggtctcttgagagctgttctcttgcttaataaaattcctctcttccttgctcaccctccagtcgtc

SEQ ID NO: 940070 - DNA, 779 bp, Homo sapiens
aagctcataaatttggtaagtaggttgctggcactgatgtgtaagctagaagttccagggacagtgtggaaacagcaaacagattgagaaagataatcgtgggagtgtgagacgtgtcaagcctacattgtgcagtgcggaggtgactcctagtgggggttggacacattgaacaatagggaatgacaaggaagtgagagattccgtgaacaatgataaaaatgtagtccggccttgaaagggaaacaagtaagtgtagattcagataaaatgggagaaaataagtgagttcaacaattgaagatatgaagatcttgatattaaagactgttttatgagtaagataagaaggaggaaagaagagagaatattgaagataatatgataaaagtcagaatttccagtttttgtgactgtagggaaaaaacataatgcatttcaaattttatatttttaattaataaataatattttatgtatgtatggggtatatgtgagtatttctgacatgtgtatgtaatggtcatgtcarggcatttgaggtatctgtcaccttgagcatttatctttttttttttttctttttgagacagggtcttactctgttacccagactagagtacagtggcatgatcatagctcattgcagccttgaactcctggcctcaaatgatccccctgcctcagcctcccaagtaatttgttacttgggagtcacatgttaccactactggctaattttttatttatattttcttgtggagacaggatctcactat

SEQ ID NO: 940071 - DNA, 779 bp, Homo sapiens
aagctcataaatttggtaagtaggttgctggcactgatgtgtaagctagaagttccagggacagtgtggaaacagcaaacagattgagaaagataatcgtgggagtgtgagacgtgtcaagcctacattgtgcagtgcggaggtgactcctagtgggggttggacacattgaacaatagggaatgacaaggaagtgagagattccgtgaacaatgataaaaatgtagtccggccttgaaagggaaacaagtaagtgtagattcagataaaatgggagaaaataagtgagttcaacaattgaagatatgaagatcttgatattaaagactgttttatgagtaagataagaaggaggaaagaagagagaatattgaagataatatgataaaagtcagaatttccagtttttgtgactgtagggaaaaaacataatgcatttcaaattttatatttttaattaataaataatattttatgtatgtatggggtatatgtgagtatttctgacatgtgtatgtaatggtcatgtcagggcatttgaggtatctgtcaycttgagcatttatctttttttttttttctttttgagacagggtcttactctgttacccagactagagtacagtggcatgatcatagctcattgcagccttgaactcctggcctcaaatgatccccctgcctcagcctcccaagtaatttgttacttgggagtcacatgttaccactactggctaattttttatttatattttcttgtggagacaggatctcactat

SEQ ID NO: 940072 - DNA, 759 bp, Homo sapiens
aatgagatggtataatgccttgtaggtatttacgaaccaagatatctctggggggttctgagcagggcagtgacacgatctgactaaattttttttttttttactttttaatttgtatttattaatttatttttgaaacagggtgtcaggcccaagctggagggcaatagtgtaatcatggttcactgcagcctcagcctctccggcccaagcgatcctcccacctcagcctcccaagtagctgagaggcgcacaccaccacacctggctaattttcaaaaattgtttgtagacacgaggtctcagtatgttgcccagagtgagctcaaacttctgagctgaggcgatcctcccacattgccttcctgaagttgcaggatgacaggcatgagccaccrtgcccaggcagtcaatgaccttcagtgaaggacacgtcagaactcagcacctggaatcactatgagggctctttggaattttcttttcttttctttttgaggcagtctcactctgttgcccaggttggagagcagtagtgtgatctgggttcactgcagcctctgcctcctgggttcaagcgattctcctgcctcagcctccccagtaactgggattacaggtgcccgccaccatgcccagttaatttttgtatttttagtagagacagggtttcaccatgttgaccaggctggtcttcaaactgagctcaagtgatcctcccaccttggcctcccaaagtgctgggattacagcgtgaga

SEQ ID NO: 940073 - DNA, 573 bp, Homo sapiens
gacactatctatcaaaacctctgggatacagcaaaggtggtgctaagggaaaggttcatagccttaaatgcctacattgaaaagtctgaaagaacacaaacagacaatgtaaggtcacatctcaagaaactagagaaacaaaaacaaaacaaacccaaacccaacagaaggcaggaaataacccagatcagagcagaacaaaatgaaactgaaaaaaaaaaaaaatacaaaagataaatgaaacaaaaagctggtcctttgaaaagataaataaaactgacagaacattattagcaagattaatcaagaagagaaaagattcaaataagctcaattagaaatgaaatgsgagatactacaactgacactacagaaatacaaaagatcactcaggctactatgaacacctttacacacataaactagaaatcctagaggagatggataaattcctggatacaaccctcctagcttaaatcaggaagaatgagaaaccctgaacagaccaataacaaccagtgagactgcaatggtattttaaaaattaccaacaaaaaaagaagtccaggacca

SEQ ID NO: 940074 - DNA, 539 bp, Homo sapiens
agctgcatgcaaaggggatgttacttagtttagttcccgatagtccaccatcatccaccaagtttcatcaggctttctatctggtcatactggagaatcgtaggggttgtagatgccacacactatctgcacctcctccagcttcttaattgtctcagtcatctctgtatgcccacccggcaaatggtattgatgaatggaagtaacccattggggttgtggcaggacctgaggctggcratgcatatgtccatgcagcactggcttcaccacatgcccttggagtctgaattactttgccgtggtttgtaacaccaggccctgtaaaatgtccacccccagaatgtattccagtatgggagacacatacacaatatataagcggagagccaaacatcccatgccaaggtacgatacaggcttcactttcattgatcagccaccataactgtcaatgtaagcaggtttgcctggaaacttatccaggttcccataaacaagcctgcaatctgtgccagtatccgccagcgccggcaccc

SEQ ID NO: 940075 - DNA, 581 bp, Homo sapiens
tctggctgagacaacagacccaggcctgcattcacagcagctttttaaatttaattttattttcttgagatggggtctcactctgtcactcaagctagagtgtagtggcgtgatctcagctcactgcaccctgcacctcccaggttcaagcaattctcctacctcaatggcccaagtagctgggattacagkggagcacaccatgcccagctaatttttgcatttttagtagagaggggatttcaccatgttggccaggctggtctcaaactcctgacctcagttatccacccgccttgccctcccaaagtgctgggattacaggtgtgagccaccccgcctggcccacagcagcttctaattccttttccaagtgctgtagccaggacttcaggcaccctgcctacacctggaggtccccattcatggcagcttctaactctttttctgggctgtgtagccaggcctccagatgcgctgcctgcatctggagggtccttatctgcattgcatccctcagggactgggtgtgtacttctcgtagtgcagtcaaaaatgcccatccaactctgccagcaaag

SEQ ID NO: 940076 - DNA, 631 bp, Homo sapiens
gcatgccaggtgtcaggttccactttgagctggggcccgaggggagtgggtggacgggtggcaggtagctgaaagaacactcgagggaccgtaggcagttgggacatggctttattctctctctctcctacagagtcagcagtgcagttatatgacttatagacaatagtggctcaaagccaggtataagctcacacaaacaggttactttaaatggctacataaatatgatcacataatgcacagagttgtgtgcctgtgctctagacccgctgtgtcatgctgtactggatgtctgcctcggcctgctcctgactgaagcacagccatkctttttacactccatcctctagaccgggagaaaatgtgcccacagggaggaaccctgaacttataggtcacagtagcaatacagggagcaacaactcattactaatactcccatggtgctgcctataattattagggtccagcacaggccagagcccagagacacccaccgtgtctgtaggaggttgtcaataaggctctcaactgccttgatttcctggggaaccccctgcaaagctgctgttacgttttgttgattgtcagggatgaaagtacaacattgagttccccaaagagcaca

SEQ ID NO: 940077 - DNA, 605 bp, Homo sapiens
ctttgggaggtagaggcaggaggatcacttgtgtccaggagttcaacactggcttgggcaacatagtaagaccccatctctacaaaaaatcaaaaattaactagacatggtggcatgcacctgtagttccagctactcagtaggatgaggtaggaagatcacttgagcctgggaggtcgaggctgcagtgagccatgattgcaccactgcactccaggcaggacaacagagagagaacttgtctcaaaaaaataaagtaaaaagtaggcaagaacaataaaaagttatgcatttatacataatattaaatatataatatatgacatacttaatatgttcaagaagacagaggagagattgagcatgttaaatgaaggcatgatagatgtaaaaacaagagacttgaaaagactcaaattcaaagagcaagataaaactacaacaaaatggaataataaccaattagaygctgcagaggtaatgcacagtgaacttgaagttagacaatagacactatcaaaaatgaaacacagaccaggcacggtggctcatgcctgtaatcccagcactttgggaggccgagttgggtggatcacctgaggcca

SEQ ID NO: 940078 - DNA, 850 bp, Homo sapiens
tcctcccagttttggaaacagcagttttggaaactaaaaatactccatgatgtcttggccccacggcattctatgacagatgcccaataaacccgggcaagagaagaggcgtcagccccgggcaccctcatgcagccaggccttctctgmgcacctgaaggccagcaccctgtctcatcccatcgtctgatgtgagagggtcccacagcgcagatcaatggggctgggttccagccctgctcccacggtgtctcaaaaactgtcacccactgcacctgcagctattccggtgctctccatctagggagctctttctgactagcttttcccagggttgccgtaaagaggcaaccagaaaagccaagcaagctgacatgggggcctcgcctgagctgagaccctcatgtgacaaaagaaactcgtgggtaggccagggcatgagccagacctatgcgccgtggggaaggtggcagcagcggatggagcctctggggaggttggggccgcccgcacatgtacacgtgtctcctttgcacaccccatgtggaaactcacaagggaacaacacccaaatcagattcctaaggagccccaatccagtccctgtcacgtgtccccaagccgtatgtaacatctgactcccctcctcatatctccatgcccaccttcagggctaggaggttcactgtcaatcgcactctctctacttctaaatggctccaacctccaggaaaggtcacttttgccaaactagaatctgtctccttggagcttcccccatgagttccacactctggaaagagtatggacttggagtacaagttatatcatttgcaagttactgaagctc

SEQ ID NO: 940079 - DNA, 593 bp, Homo sapiens
tgcaaaggacataatttcactctttttgtggctgtatagtgatgcatggtgtaccaaattttctttatcccctccattgttgatggacacctaggttaattctatgtttttgctattgtgaatggcgctgggatcaacatgaaactgcatgcatgtgtctctttggtagagcaattaatttttttgatatatatccattaataagattgctgggccaaactgtaattttaagttatttaagaaatttcaaaggtggctgaactactttacatttccaccaaaataaaggttcycttttctccacagcctcaccagcatctgatatttgttaaattttagtaatagctattcttactggtgtgagatggtatctcatcatgttctggatttgcatttctctgataattagtaatgtagaacatttttttcatatgtttcttggctgcttatatgtcttcttttgaggaatgtctgtttatgtcttttgctcctttttagcagggttgtttttagcttgttcaattgtttaagttccttatagattctggatgttagacctttgctggatatagagtttgcaaatattttctctc

SEQ ID NO: 940080 - DNA, 593 bp, Homo sapiens
tgcaaaggacataatttcactctttttgtggctgtatagtgatgcatggtgtaccaaattttctttatcccctccattgttgatggacacctaggttaattctatgtttttgctattgtgaatggcgctgggatcaacatgaaactgcatgcatgtgtctctttggtagagcaattaatttttttgatatatatccattaataagattgctgggccaaactgtaattttaagttatttaagaaatttcaaaggtggctgaactactttacatttccaccaaaataaaggttcccttttctccacagcctcaccagcatctgatatttgttaaattttagtaatagctattcttactgstgtgagatggtatctcatcatgttctggatttgcatttctctgataattagtaatgtagaacatttttttcatatgtttcttggctgcttatatgtcttcttttgaggaatgtctgtttatgtcttttgctcctttttagcagggttgtttttagcttgttcaattgtttaagttccttatagattctggatgttagacctttgctggatatagagtttgcaaatattttctctc

SEQ ID NO: 940081 - DNA, 575 bp, Homo sapiens
caataggaatctcttttgtttagtaacagaacacattggaaatatcagttattttaccaaggctttcactgcaatgtcatactttcaaatgttactagactgctttgagatattgagacagattttataaaggcaatagacttagaaaaagactggcctggtaccttgtctacatggttctcttacaaggtttctgaactagaaataagtaaaatatgtgttwaaagaaaacccttagacaaattaaatttaacagactttaattgagcaaaaaagcaattcacagatcaagaagcctcataagcccaagtaggttcagagagactccaacatagccacattgtagaagaagatttatggatacaaaaggggaaatgacacacataaaatggaaatgaggtacagaaatagccagattggtgtttgccttatttgaacctgatttcagcagttgaccacctttgatttgccaaaaattcagttattggtacaagagtaggttacagcctctttacatgtccagtttgaccatagtcctctgtgcacagagaaacttttaggccaacttaaaatat

SEQ ID NO: 940082 - DNA, 575 bp, Homo sapiens
caataggaatctcttttgtttagtaacagaacacattggaaatatcagttattttaccaaggctttcactgcaatgtcatactttcaaatgttactagactgctttgagatattgagacagattttataaaggcaatagacttagaaaaagactggcctggtaccttgtctacatggttctcttacaaggtttctgaactagaaataagtaaaatatgtgtttaaagaaaacccttagacaaattaaatttaacagastttaattgagcaaaaaagcaattcacagatcaagaagcctcataagcccaagtaggttcagagagactccaacatagccacattgtagaagaagatttatggatacaaaaggggaaatgacacacataaaatggaaatgaggtacagaaatagccagattggtgtttgccttatttgaacctgatttcagcagttgaccacctttgatttgccaaaaattcagttattggtacaagagtaggttacagcctctttacatgtccagtttgaccatagtcctctgtgcacagagaaacttttaggccaacttaaaatat

SEQ ID NO: 940083 - DNA, 575 bp, Homo sapiens
caataggaatctcttttgtttagtaacagaacacattggaaatatcagttattttaccaaggctttcactgcaatgtcatactttcaaatgttactagactgctttgagatattgagacagattttataaaggcaatagacttagaaaaagactggcctggtaccttgtctacatggttctcttacaaggtttctgaactagaaataagtaaaatatgtgtttaaagaaaacccttagacaaattaaatttaacagactttaattgagcaaaaaagcaattcacagatcaagaagcctcataagcccaagtaggttcagagagactccaacatagccacattgtrgaagaagatttatggatacaaaaggggaaatgacacacataaaatggaaatgaggtacagaaatagccagattggtgtttgccttatttgaacctgatttcagcagttgaccacctttgatttgccaaaaattcagttattggtacaagagtaggttacagcctctttacatgtccagtttgaccatagtcctctgtgcacagagaaacttttaggccaacttaaaatat

SEQ ID NO: 940084 - DNA, 575 bp, Homo sapiens
caataggaatctcttttgtttagtaacagaacacattggaaatatcagttattttaccaaggctttcactgcaatgtcatactttcaaatgttactagactgctttgagatattgagacagattttataaaggcaatagacttagaaaaagactggcctggtaccttgtctacatggttctcttacaaggtttctgaactagaaataagtaaaatatgtgtttaaagaaaacccttagacaaattaaatttaacagactttaattgagcaaaaaagcaattcacagatcaagaagcctcataagcccaagtaggttcagagagactccaacatagccacattgtagaagaagatttatggayacaaaaggggaaatgacacacataaaatggaaatgaggtacagaaatagccagattggtgtttgccttatttgaacctgatttcagcagttgaccacctttgatttgccaaaaattcagttattggtacaagagtaggttacagcctctttacatgtccagtttgaccatagtcctctgtgcacagagaaacttttaggccaacttaaaatat

SEQ ID NO: 940085 - DNA, 628 bp, Homo sapiens
agctgtaggctaaacttaatttaacaaacatcactttctgagagcccgaggaacctcaaaatatttagggaactttgaaaagacaggaactcacccaatttgtacaagtactacaagcacagtctgatggtaaattctggcttggtttcctwgtcttaggaggtttttaaagtcgaatctgaaatttatgaaaaaatttagcaaagtcaacttaaaaatatcctatatggccaatcactatgcttgctgaactttatacaaataatcaggcccaagtataataagactaaaacttattttgccaataaattagttctgctatgatttatctttggtaaaaaaaaatggttggctggaaaggaaaaaaatatatttcagaagataactaagcacacttgctattagactctagccctgtccattgttttgtgagattttatgattttcctacaataattggactgaaacctgaattctttcctggctacaagctccaaactaatgtttccatttttttttttcatttttcttatttggacttaatgaagcctttttcctgagactctgcaagctgaagttcatgtaaaaaccatcttctgacatacaaacttacagacccgaaaagtct

SEQ ID NO: 940086 - DNA, 625 bp, Homo sapiens
tttccttatccagtctaccactgaggggcatttaggtggactccatgtcttcgctattgtgaatagcactgtgatgaacgtacacatgcatgtgtctttatgatagaatgattaatgttcatttgggtatgtaatgggtagtaatgggattgctgagttgaacagtagttctatttttagcactttgaggaatcaccacactgctttccacaatgattaaactaatgaggaatcaccacactgctttccacaatggttaaactaatttacactcccaccaacagygtataagcatttgcttttctctgcaacctcaccagtatctgttattttgtgactttttttttttttttttttttttgagacagagtcttgctctgtcattttttgacttttaaatcatggccattctgactggtgtgagatggcatattgtggttttgatttgtatttctctaatgattaatgattctgagcttttttaaatatgctatttggccacatgtatgtgttcttttgaaaagtgttcatgttctttgcccactttttaatgttttgtttgtttgtcttttgcttgtaaatttgtttaagctccctatggatgctagatattagacctttgtca

SEQ ID NO: 940087 - DNA, 635 bp, Homo sapiens
caagctcccttcttcctcctgctctccctcctgctagggattagaaaggaaaatgagacacagccccagcccacacgaacctctaacactgtagaggagagtttcacctactgagtggcatttataatttagttaccatgggtattatggaagaagtgagaaaaactggaagcaaaaacaactttaaactagtagaagcccttatccctatttctgactagctttttaaaaagtatttaatatattttttaaactgacaatataaacctcaccaaattttcattatgatcatctgcaattaatgttttccatggtttactgtgaacacatacagtaccatccatggtactcttcttttttttgagacggagtcttgctctgtcgcccaggctggagtgcagtggcgggatctcggctcactgcaaccwccgcctcccgggttcacgccattctcctgcctcagcctcccaagtagctgggactacaggtgcccgccaccacgcccggctaattttttgtatttttattagagatggggtttcaccgtgttagccaggatggtctcgatctcctgacctcgtgatccgcccgcctcggcctcccaaagtgctgggattacaggagtgagccaccgc

SEQ ID NO: 940088 - DNA, 499 bp, Homo sapiens
ttcctgtacaccaataacagacaaagagagagccaaatcatgagtgaacttccagtacaattgctacaaagagaataaaatacctaggaatccaacttacaagggatgggaaggacctcttcaaggagaactacaaaccactgctcaatcaaataaaagaggacayaaacaaatggaagaacattccatgctcatggataggaagaattaatattgtgaaaatggccatatttcccaaggtaatttatagattcaatgccatccccatcaagctaccaacgacttccttaacagaattggaaaaaactactttaaagttcatatgcaaccatgaaaacacctgcattgccaagacaatcctaagccaaaagaacaaagctggaggcatcacgctacctgacttcaaactatactacaaggttacagtaaccaaaacagcatagtacttgtaccaaaacagatatatagaccaatggaacagaacagaggcctcagaaat

SEQ ID NO: 940089 - DNA, 589 bp, Homo sapiens
ttacatccctaccagcagtgtaccagggttgcagtttctccacattcttgtcaacacttgttattctctgttgtagtgtacctacttcttcttcttctttttttttctttgagactgcgtcttgctctctggcccaggctggagtgcggtggcacgattttggctcactgcaacctctgcctcctgggctcaagcaattctcctgcctmagcctcgcgagtagttggggttacaggcacacaccaccacacctgtctaatttttgtatttttagtagacacggggtttcaccatgttggccaggctggtcttgaactcctggcctcaaatgatcctcctgcctcggcctcccaacgtgctaggattacaggcctgagccaccatgctcgactctccttgtggttttaatttccatttccctaatgactaatgattgcagacatcttttcatgtgttgtctatttgtgtattttctatggagaaatatttattcaagtcctttgcctggtttttgattgggtgcttttttttgtttttttttgtttgtttgtttttgctgtagagttggagtttttataaaatagatact

SEQ ID NO: 940090 - DNA, 589 bp, Homo sapiens
ttacatccctaccagcagtgtaccagggttgcagtttctccacattcttgtcaacacttgttattctctgttgtagtgtacctacttcttcttcttctttttttttctttgagactgcgtcttgctctctggcccaggctggagtgcggtggcacgattttggctcactgcaacctctgcctcctgggctcaagcaattctcctgcctaagcctcgcgagtagttggggttacaggcacrcaccaccacacctgtctaatttttgtatttttagtagacacggggtttcaccatgttggccaggctggtcttgaactcctggcctcaaatgatcctcctgcctcggcctcccaacgtgctaggattacaggcctgagccaccatgctcgactctccttgtggttttaatttccatttccctaatgactaatgattgcagacatcttttcatgtgttgtctatttgtgtattttctatggagaaatatttattcaagtcctttgcctggtttttgattgggtgcttttttttgtttttttttgtttgtttgtttttgctgtagagttggagtttttataaaatagatact

SEQ ID NO: 940091 - DNA, 659 bp, Homo sapiens
ccaggcaatgtggctcatgcctgtaatcccaacattttgggagtccaaggtgggaagatcaattggtcccaggagtttgagaccagcctgggcaacatggtagaccctttctctataacaaattataaaatcagttgcgcatggttgcacatatttgtaatctcagctactgaggaggctgaggtgggaggatgtctcgaacccaggaggtagaagctgcagagagccatgattgcaccactgcactctagcctgagcaacacagtgagaccccatctcaaaacaaacaggaaataataatatacaaatattaggcgtatatygcatatgttttctatgtatgtattatatattcacatctattgcatataataaatacttgtaatcacacagattagacagtcctaaatcaaataatgtcagagtaggcttgaaagaaagatcaaaatgagtttcaaacggagaaataatgaccgttcatggaatgaggatgtttgactcttaaaaatcagcgattgtagcactaaagcatatttgattttgcacaagagttcatgtttggaagttgtttcaaagatgatgtgttttcctttaagttaattgaaaacttggctgctttttccttgtgtaatcctctccctcactttgcttttaacagc

SEQ ID NO: 940092 - DNA, 607 bp, Homo sapiens
atagctgttggaaggaaaaagaaacaattttttaaaaccctggagaattagacttctgatctatactatatatctataaaggcctaatttttattcaaggatacctaagttgaatatcttttatttatttttattttgttcacagttaatcatgtattttataattaggtgacaaaaatattcagtaactttattatgggaaaatacacgattataaacttaacattttttaaaaactggattaaaaaattcacctgctyaatttgcgttaagatttaaaaaatggctaggtgggttccaagatggctgaataggaacagttccagtctacagctcccagtgtgagcgatgcagaagacggatgatttctgcatttccaactgaggtaccaggttcatctcactggggcttgttggacagtgggtgcagcccacggagtgtgagctgaggcagggtggggtatcccctcacctgggaagcgcaagagatcagggaattccctttcctagccaagggaagccgtcacagacggtacctggaaaatcgggacactcccaccctaatactgtgcttttccaacagtcttagcaaacagcacaccaggaga

SEQ ID NO: 940093 - DNA, 607 bp, Homo sapiens
atagctgttggaaggaaaaagaaacaattttttaaaaccctggagaattagacttctgatctatactatatatctataaaggcctaatttttattcaaggatacctaagttgaatatcttttatttatttttattttgttcacagttaatcatgtattttataattaggtgacaaaaatattcagtaactttattatgggaaaatacacgattataaacttaacattttttaaaaactggattaaaaaattcacctgcttaatttgcgttaagatttaaaaaatggctaggtgggttccaagatggcygaataggaacagttccagtctacagctcccagtgtgagcgatgcagaagacggatgatttctgcatttccaactgaggtaccaggttcatctcactggggcttgttggacagtgggtgcagcccacggagtgtgagctgaggcagggtggggtatcccctcacctgggaagcgcaagagatcagggaattccctttcctagccaagggaagccgtcacagacggtacctggaaaatcgggacactcccaccctaatactgtgcttttccaacagtcttagcaaacagcacaccaggaga

SEQ ID NO: 940094 - DNA, 607 bp, Homo sapiens
atagctgttggaaggaaaaagaaacaattttttaaaaccctggagaattagacttctgatctatactatatatctataaaggcctaatttttattcaaggatacctaagttgaatatcttttatttatttttattttgttcacagttaatcatgtattttataattaggtgacaaaaatattcagtaactttattatgggaaaatacacgattataaacttaacattttttaaaaactggattaaaaaattcacctgcttaatttgcgttaagatttaaaaaatggctaggtgggttccaagatggctgaataggaacagttccagtctacagctcccagtgtgagcgatgcagaagacggatgatttctgcatttccaactgaggtaccaggttcatctcactggggcttgttggacagtgggtgcagcccacggagtgtgagctgaggcagggtggggyatcccctcacctgggaagcgcaagagatcagggaattccctttcctagccaagggaagccgtcacagacggtacctggaaaatcgggacactcccaccctaatactgtgcttttccaacagtcttagcaaacagcacaccaggaga

SEQ ID NO: 940095 - DNA, 569 bp, Homo sapiens
aaggccagcaatatacctttactgtcctacctcaggggtatatcaactctatggctttgtgtcataatcttattcagagagaccttgattgtttttcacttccataagatatcgcactggtcattgatgacattgatgacattatgcttattggatccaatgagcaagaagtagcaaacacactggacttattggtgagacatttgtacacaaaatgatgggaaataaatctgactaaaattcagggactttctacctcaataaaatttctaggggccaagtggtacggggcctgtcaagatattccttctaaggtaaaggataagttgctgtatttggccctttctacaaccaagaaagaggcacaatgcctagtgggcctrtttggattttggaggcaacatgttcctcatttgggtgtgttactctggcccatttatcaagtgactagaaaggctgtcagttttgagtggggtccagaacagaagaagcctctgcaacagatccaggatgctgtgaaagctgctctgccacttgggccatatgacccagcagatgcaacggtgctt

SEQ ID NO: 940096 - DNA, 742 bp, Homo sapiens
attacagtaaagcaggaaagagggatgggagttttgagttttctttagggtggttggggaaggcttcactgagaaggtggcatttgagcaaacacatgaagaggtgaaaggatgaggcttgcagctatctgggggaaatgcagaggaagcaagaggtgcagcgggggcctgggatggaggaggagcagcaaggaggccatggagccaaagagactgagtgaacagtggaggggctggagaagaakttagaggtaggattggggaggggaagattggggcagctttgtgggctcttggaaagactttggttttcacaccaggtgaatgggggccaatggagagtttggggctacggggtgtgtgatctgacttgtttctgaaggatggctctggctgctgcaggctagggaaggatagctgcagagggaccattcaggagactcctacaagaattcagggaaaacagaatattttggactggagaggtagcaggaaaggtgatgagaaatggttgagttctgaatatattttggtaggtagaacaaacgggatctcttgatggatcggatgtgtcagaggaagagtacaagatgactattttattttagtcctcaacaactggaaggggaaagttgctattttttgaaaaaagaaaaactgtgggtggatcagattggaggggaaataaaggaattccattttggacctgttaatttgagaatcagtattacatagccaagtg

SEQ ID NO: 940097 - DNA, 742 bp, Homo sapiens
attacagtaaagcaggaaagagggatgggagttttgagttttctttagggtggttggggaaggcttcactgagaaggtggcatttgagcaaacacatgaagaggtgaaaggatgaggcttgcagctatctgggggaaatgcagaggaagcaagaggtgcagcgggggcctgggatggaggaggagcagcaaggaggccatggagccaaagagactgagtgaacagtggaggggctggagaagaatttagaggtaggattggggaggggaagattggggcagctttgtgggctcttggaaagactttggttttcacaccaggtgaatgggggccaatggagagtttggggctacggggtgtgtgatctgacttgtttctgaaggatggctctggctgctgcaggctagggaaggatagctgcagagggaccattcaggagactcctacaagaattcagggaaaacagaatattttggactggagaggtagcaggaaaggtgatgagaaatggttgagttctgaatatattttggtaggtagaacaaacgggatctcttgatggatcggatgtgtcagagraagagtacaagatgactattttattttagtcctcaacaactggaaggggaaagttgctattttttgaaaaaagaaaaactgtgggtggatcagattggaggggaaataaaggaattccattttggacctgttaatttgagaatcagtattacatagccaagtg

SEQ ID NO: 940098 - DNA, 620 bp, Homo sapiens
gctcacgcctgtaatcccagcactttgggaagctgaggcgggtagatcacccaaggtcacgagttcaagaccagactggccaacatgatgaaaccctgtctctactaaaaatacaaaaaaaattagctgggcatagtggcgggcacctgtaatcccagctacctgagaggctgaggcagaagaatcgcttgaacccgggagctggaggttgcagcgagctgagactgagccattgcactccaacctgggcaacaagaatcaaactccagctcaaaaaaaaaaaaaagaaccttagtamataacagagccaagactagaaaggcacattctatcctcattcttactgtccctttgggattacaaagatcagtgagagcacccctgaggtgagaagtagaaaggattcaagatatcctggcctgtcccagtccaggaatgatctaagctattctgctttaccctgagtaagaagaaacaggagtaggtgtggtgcctcatgcttgtaatctcaggactttgggaggccaagacaagaggactgcttgagcccaggaattcgagaccagcctgggcaacatagtgaaacctcatctttacaaaaaaaaaagaaaaaaaatcag

SEQ ID NO: 940099 - DNA, 620 bp, Homo sapiens
gctcacgcctgtaatcccagcactttgggaagctgaggcgggtagatcacccaaggtcacgagttcaagaccagactggccaacatgatgaaaccctgtctctactaaaaatacaaaaaaaattagctgggcatagtggcgggcacctgtaatcccagctacctgagaggctgaggcagaagaatcgcttgaacccgggagctggaggttgcagcgagctgagactgagccattgcactccaacctgggcaacaagaatcaaactccagctcaaaaaaaaaaaaaagaaccttagtaaataacagagccragactagaaaggcacattctatcctcattcttactgtccctttgggattacaaagatcagtgagagcacccctgaggtgagaagtagaaaggattcaagatatcctggcctgtcccagtccaggaatgatctaagctattctgctttaccctgagtaagaagaaacaggagtaggtgtggtgcctcatgcttgtaatctcaggactttgggaggccaagacaagaggactgcttgagcccaggaattcgagaccagcctgggcaacatagtgaaacctcatctttacaaaaaaaaaagaaaaaaaatcag

SEQ ID NO: 940100 - DNA, 620 bp, Homo sapiens
gctcacgcctgtaatcccagcactttgggaagctgaggcgggtagatcacccaaggtcacgagttcaagaccagactggccaacatgatgaaaccctgtctctactaaaaatacaaaaaaaattagctgggcatagtggcgggcacctgtaatcccagctacctgagaggctgaggcagaagaatcgcttgaacccgggagctggaggttgcagcgagctgagactgagccattgcactccaacctgggcaacaagaatcaaactccagctcaaaaaaaaaaaaaagaaccttagtaaataacagagccaagactagaaaggcacattctatcctcattcttactgtccctttgggattacaaagatcagtgagagcacccctgaggtgagaagtagaaaggattcaagatatcctggcctgtcccagtcyaggaatgatctaagctattctgctttaccctgagtaagaagaaacaggagtaggtgtggtgcctcatgcttgtaatctcaggactttgggaggccaagacaagaggactgcttgagcccaggaattcgagaccagcctgggcaacatagtgaaacctcatctttacaaaaaaaaaagaaaaaaaatcag

SEQ ID NO: 940101 - DNA, 819 bp, Homo sapiens
gtggtgcctgcacattgtgcagaactattaccaggcctgatctcttcttctgtgaactgatcattgggtattcccaacaaggtcataggtgcaggctgggagagaggaggcagtgaagcagaagtaggaattatgggcatttgggccacttcctcatgtaatttacttgttcttcaggacttgcttgagcctgaccacctatataccatttccatttgatgatggagtactgctgtgcacatccaacttcatggcttagtgggtcagatagcacccagttcatgataggcagctcaggtcacatggtaacttkgtggcccatggtcaaacattcagtctctactgaggcccagtagcagaccaagagctgtctcaaaaggagtgtagttatttgtgaatgatggcaggaacttgctccaaaatcctgaaggcctccactgtgattcacccatgagggcctgccaaaggctccagacagatccctatctgtcactgatacctcaagcaccattggatctgatgggtcatatggcccaagtgacagagcagcttgcatagcagcctggacctgttacagagccttctccttgtctagactccactcaaaaccagcagcttttcaagtcacttggtaaatggggcagagttacacacccaaatgaggaacatgttgcctccaaaatccaaagaggcctactaggcattgcacctcttttttggttgtaggaggggccagatgctacaaggtgtccttcaccttagaagagatatcttgacatgccccataccactggacccctagaagtctcattaaatgaa

SEQ ID NO: 940102 - DNA, 819 bp, Homo sapiens
gtggtgcctgcacattgtgcagaactattaccaggcctgatctcttcttctgtgaactgatcattgggtattcccaacaaggtcataggtgcaggctgggagagaggaggcagtgaagcagaagtaggaattatgggcatttgggccacttcctcatgtaatttacttgttcttcaggacttgcttgagcctgaccacctatataccatttccatttgatgatggagtactgctgtgcacatccaacttcatggcttagtgggtcagatagcacccagttcatgataggcagctcaggtcacatggtaacttggtggcccatggtcaaacattcagtytctactgaggcccagtagcagaccaagagctgtctcaaaaggagtgtagttatttgtgaatgatggcaggaacttgctccaaaatcctgaaggcctccactgtgattcacccatgagggcctgccaaaggctccagacagatccctatctgtcactgatacctcaagcaccattggatctgatgggtcatatggcccaagtgacagagcagcttgcatagcagcctggacctgttacagagccttctccttgtctagactccactcaaaaccagcagcttttcaagtcacttggtaaatggggcagagttacacacccaaatgaggaacatgttgcctccaaaatccaaagaggcctactaggcattgcacctcttttttggttgtaggaggggccagatgctacaaggtgtccttcaccttagaagagatatcttgacatgccccataccactggacccctagaagtctcattaaatgaa

SEQ ID NO: 940103 - DNA, 561 bp, Homo sapiens
gaggaaacaagacataccttggttagctacattttggtttttataaaattcacaaaggcgacgatatgtttctgtgctgccttttgtgtgctgtcttatgtgaatgttctccttttctctacaatcctgtcttacatgtggccctcgtcaggtgccccaggcataccacttctcttaggataatgcagtcccagccctgcagtcccttcttttatttatttatttatttatttatttatttgagatggagtcttgctctgtcgcccaggctggagtgcagtggcacgatctcggctcagtgcaagctccgcctcccaggttcaygccattctcttgcctcagcctcctgagtagctggaactacaggcgcccgccaccaggcccggctaattttttgtatttttagtagagacggggtttcaccgtgttagccaggatggtctcgatctcctgacctcatgatccgcccgccttggcctcccaaagtgctgggattacaggcgtgagccactgcgcccggcctgtcccttcttgagcctcacaaattctgtctcttcaggc

SEQ ID NO: 940104 - DNA, 561 bp, Homo sapiens
gaggaaacaagacataccttggttagctacattttggtttttataaaattcacaaaggcgacgatatgtttctgtgctgccttttgtgtgctgtcttatgtgaatgttctccttttctctacaatcctgtcttacatgtggccctcgtcaggtgccccaggcataccacttctcttaggataatgcagtcccagccctgcagtcccttcttttatttatttatttatttatttatttatttgagatggagtcttgctctgtcgcccaggctggagtgcagtggcacgatctcggctcagtgcaagctccgcctcccaggttcacgccattctcytgcctcagcctcctgagtagctggaactacaggcgcccgccaccaggcccggctaattttttgtatttttagtagagacggggtttcaccgtgttagccaggatggtctcgatctcctgacctcatgatccgcccgccttggcctcccaaagtgctgggattacaggcgtgagccactgcgcccggcctgtcccttcttgagcctcacaaattctgtctcttcaggc

SEQ ID NO: 940105 - DNA, 675 bp, Homo sapiens
tgagctgtatgtgtccatacagatggatatctttaagccagtggtccccaacctttttggcactggggaccagttttttggaagacaatttttccatggacagtgggggtaggggtgagggtgcaggggtgtattartccattttcacactgctataaagaactacctgaaactgggtaatttatgaagaaaagatgtgtaattgactcagagtttcatacacttaacatgaagcacgattggaaggccttgagaaacttacaataatggccaatggtaaagggtaggcaaagcatgtcttagagggcagcaggagggagcgagacagcaagaggggaagtgccccacactttaaaaccatcagatttctgccaggcatggtggctcacacctgtaatcccagcactttgggaggccgaggagggcagatcacaaggtcaggagtttgagaccagcctggccaacatggtgaaaccccttctctattaaaaatacaaaaattattcgggtgtggtggcacgcgcctgtagtcccagctactcgggaggctgaggcaggggaatcgctttcacctgggaggcagaggttgtggtgagccgagatcacaccactgcactccagcctgggcaacagagtgagattccatctcaaaaacaaacaaacaaaaatcagatt

SEQ ID NO: 940106 - DNA, 606 bp, Homo sapiens
tggccaatggtaaagggtaggcaaagcatgtcttagagggcagcaggagggagcgagacagcaagaggggaagtgccccacactttaaaaccatcagatttctgccaggcatggtggctcacacctgtaatcccagcactttgggaggccgaggagggcagatcacaaggtcaggagtttgagaccagcctggccaacatggtgaaaccccttctctattaaaaatacaaaaattattcgggtgtggtggcacgcgcctgtagtcccagctactcgggaggctgaggcaggggaatcgctttcacctgggaggcagaggttgtggtgagccgagatcacaccactgcactccagcctgggcaacagagtgagmttccatctcaaaaacaaacaaacaaaaatcagatttcatcagaattcactcactcactgtcaagagaagagcatgggggaaaccacccccattatccaatcacctcccactaggtccctccctcgacatgtggggattacaattggaggtgatatttgggaggggacacagaaccaaaccgtatgggtgtggggtaggggatggttttaggatgtaactgttccacctcatat

SEQ ID NO: 940107 - DNA, 533 bp, Homo sapiens
tctctcttgctgcacacccagtccactagcaaaccctgcggacagcatctttacaatataatcagaattctcacttctgccacttccactgctgccatggtaattccagccatcatcatccctcactggactagtataatagcctcctaatagttctccctgcttctayccttgctcccctcccccaatatatactccacagagaaatttttaaaaaatataaatcagatcatgttgcctctctgcacaacaatctgtaatctcttctcttttcactctaagtaaaatgcaaaacccacacattcttaccgtggcctgcaagactccacaccatctggctgtctgccaccgccctggccttatggccatcactgtcccatttgctgcaccttctccaggcacactgacctcttaactctttgcagaacataccaagcaccttgtagcctccaagattgtatgactgttccctctgcttgggatatgctgcccacacatatctgactgacttgctgcctctctctgttcaagtc

SEQ ID NO: 940108 - DNA, 778 bp, Homo sapiens
ttgtgtggtcagctgtgcctgccaacagatgcaggttaggaactgtgttcagtatcttccaataagaaaggggaaatgccgatgcctatcctctttgtttaggtagaaagtaaaatgctactggacttaaatgggcaacaaggggctttgcctgttcatttgccatggagagggctgggaatccaggtgcggtggctcacacctgtaatcscaacactttgggaggccgaggtgggcagatcagttgaggtcaggagtttgaaaccagcctggccaacatggcgaaaccccgtctctattaaaaatataataattagccaggcatggtggtgtgtgcttgtaatcccagctactcaggaggctgaggcatgagaatggcttgaacctggaaggcaaaggttgcagtgagccgagattgggccaccgcactccagcctgggtgactgacagagtgagactctgtcaaaaaaaagagtagagtaaactgggtataagatccttccctttgcgtccacctctcatgccatgctgcctttgccattccctacaatagctgagggtcacacgctgaataatttaatttacacatacacgagggtccagagctaagttaattctgtaaataagacttagaataaaaggccctctccaaatattttaaaaataataatttttgttttttggaagattaagcataccactgaactgctttgttacagaattcagtacaacagaagtctggctaattttgttttttaatgagaaacatctgagttgt

SEQ ID NO: 940109 - DNA, 447 bp, Homo sapiens
ctgttcctttctggtgggagtttcctggccttggtagttgtcttgcaggcatacatccatcagtactccatggaagtctccaggggaagcctcgttgaactctgccctacaattctagctgcctgggcctccctgggttctcagctctgtctcctcctttgagggaacagcaggctctgtttgggtcagctttccctggaacgtagcctrgaaaggatttctaggtggtaagtgaggaccgtggtaaggcttgcccatttgtttcccttctttaaaggatctctgctctgtgtggcctgttgttctgtgtccaaaaatcattgtcttttttttttttatagttgttttgtctggttgtttggttgtttagtgtgggagggcaaagctagttcctgtgactgcatcatggtcagaaacagaaattctgcctatggacagagcatggtg

SEQ ID NO: 940110 - DNA, 620 bp, Homo sapiens
tgatcattagaggaatgaaaatcaaaaccacaatgagatactatctcatgccagtccgaatggcaattattaaaaagtcaagaaacaatagatgctgatgaggctctggagaaataggaatacttttacacattggtgggaatataaattagttcaaccactatgaaagacagcatggcaatttctcaaggatctagaaccagaaatacaatttgacccagcaatctcattactgggtatatacccaaaggaatataaatcattctacaataaagacacatgcacatgtatgtttattgcagcactatttacaacarcaaagtcttggaaccaacccaaatgcccatcaatgatggactgggtaaagaaaatgtggtatatacacaccatggaataccaagaagccataagaatgaatgagattatgtcatttgcagggacatggatgaagctggaagccatcatcctcagcaaactaatacaggaacagaaaaccaaacaccacatgttgtcactcataagtggagcttgaaaaatgagaacacatggacactgggaggggaacaacacacaccagggcctgttggaatgtgggggatgagggaagggaacatagagga

SEQ ID NO: 940111 - DNA, 628 bp, Homo sapiens
ttgcccatttttttaaatcaaattattagactttttcctatggggttatttgagctccttatatattctggttattaatcccttgttagatgtgtaatttgcaaatattttctccaattctgtgggttttctcttcactttgtttattgtttcctttgctgtgaagaagctttttaacgtgatctatttgtccagttttgctttggttgcctgtgcttatggagtattactgaagaaatctgcccagtccaaggttctggagaatttccacaatgttttctttcagtacattcataagttaaggacatagatttaagtctttaatccattttgwtttaatttttagatatggtgaaagataggggtctagtttcattcttttggatatggatatccagttttcccagcacaatttattgaagagactgtcttttcctcattgtatgttcttggcatctttgtaacaaatgagctcactgtagatgtatggatgtgttactgaattctctattctgttccattggtttctgtgtttgcttttatcccagtaccatgctgttttagttatagtagctctgttgtataatttgaagtcagttaatatgatttctacagttttcttcctttt

SEQ ID NO: 940112 - DNA, 644 bp, Homo sapiens
agccacacacccccatgcttgactatttttttttgtatttttagtagagatgggattttgcatgttgactgggctggtcgtgaactcctgaccataagtgatctgcccacctcagcctcccaaagtgctaggattataggcatgagccagcattcctggctctattttttttattttccatttgtatgaaataccattttctatcccttatttttagtctgtgtgtgctttataggtgaaatatgtttcttataggcaacagatcattggatcttgtttttttttttaatcatcccttcagccactctacgtcttctgactgatgagtttattccatgtacatttaatgttgtattgataagtaaggacttacttctgccwttttgttatgtgttttctggtttgtcttccttctttacttccttcctgtctttcttttagtataggtgatttttttctgatgttatgttttaatttcttgctttttatttgttttgtatctgctgaatgtttttagatttgaggttaccatgaagcttgcgaataatatattataaccaattattttaagctgatgacaaattaatactgattgcaaacaaacagataagccaaagagaactaataaaaactctatattttaa

SEQ ID NO: 940113 - DNA, 754 bp, Homo sapiens
ctcacagcgctgcagacccagtcccattgctctccagccccgcacgatgtgcctgctcccgaagcccgcgttccctctgagccgctttgtcacagcctcttactgtcggtctgtgccttcccaagtgacccatgacttgtcttccttcaaggccctgggccagggacctcctgtcctctgatcacttgtcaccagggtggctgtaaccccccrgtccacccatgccctttataacacagagacagcacctgctgcacggcttgtgaaaattagatgagacgattgctacaaggcaagcagcagagcggcaggcctgcggcaaggactgcacaagacagccacggacctcgccttcaagcccagcgccgccactcacaacccacacaagcctgggcaggagccccaggctcctcaccagtagaatggaagtattaatatgaacaggtccatcacagggctactgggatggccaggtgggaatctgcgtaaagcccagtcctcactggattactcctctcttcttggcagtggccacaagcaccccttcttttcctcccttttgaaaaaatcaaggcgaaactcacataacataaaattccccattttaaagtgtataactgattggcatttagtacattcacaatatggtacaactattccttctatctagttccaaagcatttcatcacccccagagaggaccacattgcccactaagcagttgctcccagaaccccctcctacccccagcccc

SEQ ID NO: 940114 - DNA, 775 bp, Homo sapiens
cctatctgtattgttccaggagtgttctctgtgaccaatagcacatggtagaagtgtgtgttgtgttttcctctgttaggtcttgaggtccctctcatgagagtggctgtaaactctacccctgctgtgatgtggcttcagggatctggccatggatatttatagtgtgccttccatgggatatgtctctattctggcagacaacctaatgcctaagtgctagaccyatgaccaggtgtccctctccctgaaaatttgtttacactggcagacacccttgtggctcttgtctgacctctgtccagtttattcctaccaagacatccattctctggaagatccctgatggaaagaagctgggtttgggtgtgttagttggatgagacttagaggagatgacatagcagaacacatgaaatgacagaagcagtttattactcacagatcccagagagaagaaggcagcatgcctcgcagggccaatgggaagcaggaagccatccagaataatgctttcaaacagtgggtggggagtaagagagagctataaggctccccacccacccacttgggtctgtgggccctagctattattggatccagggcattacccaagcaggtttcctcctgggaagttctaattggtgggtttagaggaaacaggcagttttcatggagttatactgtgattgagagggtagtcactgcagcatatctgtgctctccatgtggggtatgggaatcagtggggtgcatcaagtaggttgtatccggc

SEQ ID NO: 940115 - DNA, 775 bp, Homo sapiens
cctatctgtattgttccaggagtgttctctgtgaccaatagcacatggtagaagtgtgtgttgtgttttcctctgttaggtcttgaggtccctctcatgagagtggctgtaaactctacccctgctgtgatgtggcttcagggatctggccatggatatttatagtgtgccttccatgggatatgtctctattctggcagacaacctaatgcctaagtgctagacccatgaccaggtgtccctctccctgaaaatttgtttacactggcagacacccttgtggctcttgtctgacctctgtccagtttattcctaccaagacatccattctctggaagatccctgatggaaagaagctgggtttgggtgtgttagttggatgagacttagaggagatgacatagcagaacacatgaaatgacagaagcagtttattactcacagatcccagagagaagaaggcagcatgcctcgcagggccaatgggaagcaggaagccatccagaataatgctttcaaacagtgggtggggagtaagagagagctrtaaggctccccacccacccacttgggtctgtgggccctagctattattggatccagggcattacccaagcaggtttcctcctgggaagttctaattggtgggtttagaggaaacaggcagttttcatggagttatactgtgattgagagggtagtcactgcagcatatctgtgctctccatgtggggtatgggaatcagtggggtgcatcaagtaggttgtatccggc

SEQ ID NO: 940116 - DNA, 621 bp, Homo sapiens
aacaacctggagtttcagggaggcttccattaactcatgctggtccagggctactgcacaaatgcaggacaacatgccatttgtcgaaacgttttaaagatatgattcagctaatgaattgtgagcaaaatatgctctctccttttacctggacagatgcacctttgcaccctagaaggaaggctgggtttgaatatagccttctgggaatctgtgatggtgacttttatgtcaacttggctaagctatggtggcccagttatttggtcaaacccagcctagctggtgctgtgcaagtatattttagatgtgattgacatttaagttactagactttgagttaagtagatgaccttccatcatgtggctgggcctcatctaatctgttgaaggcctcaggggatagactttcccccaggaggaaggaattctcaagactgaagcacaaaaactttgcctgagattccagscaattgccctgtggaatgtggacctaagacagcaatatctggcctaccagcctgccctacaaatttcagccagccctacttgccaggacccataattgcacaaactaattccttattccttaaaataaatctctctctctcccccaacccc

SEQ ID NO: 940117 - DNA, 423 bp, Homo sapiens
caaagtaatgctgctacagctcatgaccatgacttctcaaacattaatgtacaaatgcatcacacagggatcgttgaagatgcagattctgaatcagtaggtctggacggggcctgagagtctgcatttctaataagttctaacatgatgttggtgcagctggtctaaggkccacattttaaataaggagttagagcaattcacggccttttcacgtgattagcctccttctctatattactattccaaagtagtttcatttaatacttgtcactcaatcaccgaagtcaggattttcctgaagacaagcactgtgtaccccatctctgctatatcctttagcacctagcatagcactaggaatgagtgctattataaggatgagaaaaaggaagtagcaggtaacagagacagaccctttct

SEQ ID NO: 940118 - DNA, 662 bp, Homo sapiens
ttgctcctctttctacacactgaagttgctgttgttttacatttaccttttatttatttgtagtttttgaggcaggttggagtgtaagaatgcaatctcggcttacagccgcctcgactttccaggactccctcaggtgatcttcctatctcagccttccaagtggctgagactacaggaatcacttaattctgtgatgtcgaagctgaagtgagccgtgatgatgccttgccctccagtctgagtgtttcagaaggtaagagagacaggttaaagaaaaaaattccttgaaataaactgcaattaaytgtgatctaaattaccttttatagtttttcactcccacgagtttgtttattattattgctgcttattatttctttgtattattgtttgtcattattgttattgtttttattatttatgtaattatttagagatggagtcttcctctatcacccagagtgcagtgcagtggcgcgactttgggtcactgcagcttcaaatgcctgggttcaaattcgcaatatggcgaaacaccctgtttactaaaatctgtcaatgacaccttcaggaccgttggttgtggcggctgcaatttcggagcctgaggagggcagttcgctagagctcgggagttcaagacagcctcggaaacagac

SEQ ID NO: 940119 - DNA, 432 bp, Homo sapiens
ggaaagacaggatgctgacagggcctgggtgaaagactctgtaggggccttataaaagaagggaggagggctggtctctgaggtgtttcttttaaggggctctcacctcccctccaatatcatgcagccctaactggttctcagagttgaatgtaaacggcycttcctctaggaagttgtcatcaacttcactcccctgattgcaccctgcattaggataggtctcctccttctctgtgtattactccctttcaataaatcttagatgcggaagaagggaccagggaatgtcctgcccagggtgatttctcatttccacctccaccctccctcaaagtgaggacttcagctactgctcacctttctgtttttctgggttttgatcacatttctctggaagacagaaagccaaagaccatcagaaaggtccgc

SEQ ID NO: 940120 - DNA, 432 bp, Homo sapiens
ggaaagacaggatgctgacagggcctgggtgaaagactctgtaggggccttataaaagaagggaggagggctggtctctgaggtgtttcttttaaggggctctcacctcccctccaatatcatgcagccctaactggttctcagagttgaatgtaaacggcccttcctctaggaagttgtcatcaacttcactcccctgattgcaccctgcwttaggataggtctcctccttctctgtgtattactccctttcaataaatcttagatgcggaagaagggaccagggaatgtcctgcccagggtgatttctcatttccacctccaccctccctcaaagtgaggacttcagctactgctcacctttctgtttttctgggttttgatcacatttctctggaagacagaaagccaaagaccatcagaaaggtccgc

SEQ ID NO: 940121 - DNA, 725 bp, Homo sapiens
ctggaaacatggattgttacaaattagaagtaaataacttgataggcccaatttaacaaatgaagctcaagaagtgggagatatgagacctataatgaaagattaaattattttaaaaatcttaccacaaagaaaaatcagagtcaaatactttaactgttaaattatacaaaatatttcataaaaataccaatcctttacaaatacacaccatacatagataagagataaacaacccctaactactttatgaggccaatattactataccaaagccagacaaacccatcatgtgttaggattaatatgggtacatacggctgataaataaagacacataattctcaaaaagtactaataagttaaatacagaaacacrtaaaagtaattatacaccatggccaagtacaatctttttacaaatgaagtggcttaatatctaaaaaccaataatttaatacacaacattgataaagtgaagaacataaaatgatccttttaatagacacagaaaagcttgtgatacaaacaacactgattcattataaaatccttaacatactaggaaggaaaaacttactggaactactaaaaaggattcataaaaatttcccactaatattacacttgctgatgaaagactaggctctttgcctcacagttgtgggaaacagataagcatggctactttcgctactctactaaattgaactaaaggtgttagg

SEQ ID NO: 940122 - DNA, 725 bp, Homo sapiens
ctggaaacatggattgttacaaattagaagtaaataacttgataggcccaatttaacaaatgaagctcaagaagtgggagatatgagacctataatgaaagattaaattattttaaaaatcttaccacaaagaaaaatcagagtcaaatactttaactgttaaattatacaaaatatttcataaaaataccaatcctttacaaatacacaccatacatagataagagataaacaacccctaactactttatgaggccaatattactataccaaagccagacaaacccatcatgtgttaggattaatatgggtacatacggctgataaataaagacacataattctcaaaaagtactaataagttaaatacagaaacacgtaaaagtaattatacaccatggccaagtacaatstttttacaaatgaagtggcttaatatctaaaaaccaataatttaatacacaacattgataaagtgaagaacataaaatgatccttttaatagacacagaaaagcttgtgatacaaacaacactgattcattataaaatccttaacatactaggaaggaaaaacttactggaactactaaaaaggattcataaaaatttcccactaatattacacttgctgatgaaagactaggctctttgcctcacagttgtgggaaacagataagcatggctactttcgctactctactaaattgaactaaaggtgttagg

SEQ ID NO: 940123 - DNA, 725 bp, Homo sapiens
ctggaaacatggattgttacaaattagaagtaaataacttgataggcccaatttaacaaatgaagctcaagaagtgggagatatgagacctataatgaaagattaaattattttaaaaatcttaccacaaagaaaaatcagagtcaaatactttaactgttaaattatacaaaatatttcataaaaataccaatcctttacaaatacacaccatacatagataagagataaacaacccctaactactttatgaggccaatattactataccaaagccagacaaacccatcatgtgttaggattaatatgggtacatacggctgataaataaagacacataattctcaaaaagtactaataagttaaatacagaaacacgtaaaagtaattatacaccatggccaagtacaatctttttacaaatgaagtggcttaatatctaaaaaccaataatttaatacacaacattgataaagtgaagaacataaaatgatccttttartagacacagaaaagcttgtgatacaaacaacactgattcattataaaatccttaacatactaggaaggaaaaacttactggaactactaaaaaggattcataaaaatttcccactaatattacacttgctgatgaaagactaggctctttgcctcacagttgtgggaaacagataagcatggctactttcgctactctactaaattgaactaaaggtgttagg

SEQ ID NO: 940124 - DNA, 727 bp, Homo sapiens
gggaaacagataagcatggctactttcgctactctactaaattgaactaaaggtgttaggcagagaaattatataataaaaacaaataaaacttctaaatttataaaataaacttttattgtaaatggcatcaacttatattcaagaatttttaaagagtttacaaaaatcaactggaactaataaatgagttcagcaggtcacaagatacaagataaatgcacaatattaaattgcacttttatacagtaactargggcaatcagtaaataaaattagaaaaaataattctactcattagctcaatgtgtagtggcttaaaattccaaatatgcattatgtcttattttctgttggctacaaatactgacacagcttagttgaatgggtctaccacaatgtcctcatgtgtccggaattggtcggttcttggtctcactgacttcaagaatgaagccgcggaccctcacggtgagtgttacagttcttaaaggcagcgtgcctggagtttttcccttctaatgtcagcatgtgtttggagtttctttcttctggtgggttcgtggtctttctggctcaggagtgaagctgcagacctttgtggtgagtgttacagctcataaaggcagtgtggacgcaaagagtgagcagcagcaggatttattgcaaagagcgaaagaacaaagcttccacagtgtggatggggacccgagagggttgccactgc

SEQ ID NO: 940125 - DNA, 727 bp, Homo sapiens
gggaaacagataagcatggctactttcgctactctactaaattgaactaaaggtgttaggcagagaaattatataataaaaacaaataaaacttctaaatttataaaataaacttttattgtaaatggcatcaacttatattcaagaatttttaaagagtttacaaaaatcaactggaactaataaatgagttcagcaggtcacaagatacaagataaatgcacaatattaaattgcacttttatacagtaactaagggcaatcagtaaataaaattagaaaaaataattckactcattagctcaatgtgtagtggcttaaaattccaaatatgcattatgtcttattttctgttggctacaaatactgacacagcttagttgaatgggtctaccacaatgtcctcatgtgtccggaattggtcggttcttggtctcactgacttcaagaatgaagccgcggaccctcacggtgagtgttacagttcttaaaggcagcgtgcctggagtttttcccttctaatgtcagcatgtgtttggagtttctttcttctggtgggttcgtggtctttctggctcaggagtgaagctgcagacctttgtggtgagtgttacagctcataaaggcagtgtggacgcaaagagtgagcagcagcaggatttattgcaaagagcgaaagaacaaagcttccacagtgtggatggggacccgagagggttgccactgc

SEQ ID NO: 940126 - DNA, 774 bp, Homo sapiens
aatattacacttgctgatgaaagactaggctctttgcctcacagttgtgggaaacagataagcatggctactttcgctactctactaaattgaactaaaggtgttaggcagagaaattatataataaaaacaaataaaacttctaaatttataaaataaacttttattgtaaatggcatcaacttatattcaagaatttttaaagagtttacaaaaatcaactggaactaataaatgagttcagcaggtcacaagatacaagataaatgcacaatattaaattgcacttttatacagtaactaagggcaatcagtaaataaaattagaaaaaataattctactcattagctcaatgtgtagtggcttaaaattccaaatatgcattatgtcttattttctgttggctacaaatactgacacagyttagttgaatgggtctaccacaatgtcctcatgtgtccggaattggtcggttcttggtctcactgacttcaagaatgaagccgcggaccctcacggtgagtgttacagttcttaaaggcagcgtgcctggagtttttcccttctaatgtcagcatgtgtttggagtttctttcttctggtgggttcgtggtctttctggctcaggagtgaagctgcagacctttgtggtgagtgttacagctcataaaggcagtgtggacgcaaagagtgagcagcagcaggatttattgcaaagagcgaaagaacaaagcttccacagtgtggatggggacccgagagggttgccactg

SEQ ID NO: 940127 - DNA, 764 bp, Homo sapiens
gaaagactaggctctttgcctcacagttgtgggaaacagataagcatggctactttcgctactctactaaattgaactaaaggtgttaggcagagaaattatataataaaaacaaataaaacttctaaatttataaaataaacttttattgtaaatggcatcaacttatattcaagaatttttaaagagtttacaaaaatcaactggaactaataaatgagttcagcaggtcacaagatacaagataaatgcacaatattaaattgcacttttatacagtaactaagggcaatcagtaaataaaattagaaaaaataattctactcattagctcaatgtgtagtggcttaaaattccaaatatgcattatgtcttattttctgttggctacaaatactgacacagcttagttgaatgggtctaccacaatgtcctcatgtgtccggaattggtcggttcttggtctcactgacttcaagaatgaagccgcggaccctcacggtgagtgttacagttcttaaaggcagcgtgcctggagtytttcccttctaatgtcagcatgtgtttggagtttctttcttctggtgggttcgtggtctttctggctcaggagtgaagctgcagacctttgtggtgagtgttacagctcataaaggcagtgtggacgcaaagagtgagcagcagcaggatttattgcaaagagcgaaagaacaaagcttccacagtgtggatggggacccgagagggttgccactgctggctcg

SEQ ID NO: 940128 - DNA, 764 bp, Homo sapiens
gaaagactaggctctttgcctcacagttgtgggaaacagataagcatggctactttcgctactctactaaattgaactaaaggtgttaggcagagaaattatataataaaaacaaataaaacttctaaatttataaaataaacttttattgtaaatggcatcaacttatattcaagaatttttaaagagtttacaaaaatcaactggaactaataaatgagttcagcaggtcacaagatacaagataaatgcacaatattaaattgcacttttatacagtaactaagggcaatcagtaaataaaattagaaaaaataattctactcattagctcaatgtgtagtggcttaaaattccaaatatgcattatgtcttattttctgttggctacaaatactgacacagcttagttgaatgggtctaccacaatgtcctcatgtgtccggaattggtcggttcttggtctcactgacttcaagaatgaagccgcggaccctcacggtgagtgttacagttcttaaaggcagcgtgcctggagtttttcccttctaatgtcagcatgtgtttggagtttctttcttctggtgggttcgtggtctttctggctcaggartgaagctgcagacctttgtggtgagtgttacagctcataaaggcagtgtggacgcaaagagtgagcagcagcaggatttattgcaaagagcgaaagaacaaagcttccacagtgtggatggggacccgagagggttgccactgctggctcg

SEQ ID NO: 940129 - DNA, 699 bp, Homo sapiens
gtgcggggccgccaagcccacgcccacccggaactcgcgctggcccggaagcaccgcgggcagccgcggttcctgcccgctccccgcaagataagggagccggctccggcattggcctgctgagaaaggggctcccacagtgcagcggtgagctgaagggctcctcaagcgcggccagagtgggcaccaaggctgaggaggcaccaagagtgagcgagggctgtgagggctgccagcatgctgtcacctctcactcatgagactgaagctgtgtctcaactgaagcttgactgggaaggatgcacttctgagctcaatctggttagttgtgcwttattgttttgactcagttcttagtttctttctgtctttggtcagggcactctctctattctctgtcacacaagcctgtaaaaatgaaagcttaaaacactgaagctcgcttctccagagcaaagtatgcgacagacagagagaaagacaggaaaaaaggaagtaaacaatatcacaagagagagaaagtaagaagcaagtgacaatcttttcataatcaaatattggcagtgacattccctattttccaatgtattctactgccatgaagtgagtcactaaccacttactgtttacatttgggtgtgtatagttggaaataaaaattattatgagccatcatgaaggctgtgcactacgtatgcc

SEQ ID NO: 940130 - DNA, 461 bp, Homo sapiens
agtgcggggccgccaagcccacgcccacccggaactcgcgctggcccggaagcaccgcgggcagccgcggttcctgcccgctccccgcaagataagggagccggctccggcattggcctgctgagaaaggggctcccacagtgcagcggtgagctgaagggctcctcaagcgcggccagagtgggcaccaaggctgaggaggcaccaagagtgagcgagggctgtgagggctgccagcatgctgtcacctctcactcatgagactgaagctgtgtctcaactgaagcttgactgggaaggatgcacttctgagctcaatctggttagttgtgcattattgttttgactcagttcttagtttctttctgtctttggtcaggrcactctctctattctctgtcacacaagcctgtaaaaatgaaagcttaaaacactgaagctcgcttctccagagcaaagta

SEQ ID NO: 940131 - DNA, 553 bp, Homo sapiens
ccagagcaaagtatgcgacagacagagagaaagacaggaaaaaaggaagtaaacaatatcacaagagagagaaagtaagaagcaagtgacaatcttttcataatcaaatattggcagtgacattccctattttccaatgtattctactgccatgaagtgagtcactaaccacttactgtttacatttgggtgtgtatagttggaaataaaaattattatgagccatcatgaaggctgtgcactacgtatgccaaggtgagacaaatgggcctgattctamatataacgagaaggtactacaatgtgtgttgttgttattgttgttgttctggccaaagaataacaacatctaaattttattcaatttcaatgttttcatggtggagtttgaaaaataaattcaagaggggacatgactttctcaagattcaagttataaaacccaggcatgtttgagagatattcaagcaatgtcccatcccttgtagtttctttctctaagtttatgcagtagctgtgtttaatatcaaacccaacagtcatgcgtatcatt

SEQ ID NO: 940132 - DNA, 693 bp, Homo sapiens
gaaacatgcttacactacacatgggcacaaaaactttcctctgggcatagacatttgcagcatttgcagtaataacataacaatggaacaatcagtattgacagaattgtaactatggttataaattgtattcacatttacttatctggacatggtcctcttagcttcggctgtgtgtacactagtcagcttccgggatgtgactagagcagagtttgaagaatccttaagcttcagccatgcttagactgaccagcctccagtgtggtcagagcagggcggttgtcctttttaccggtggctgagatttgccatagggctattcgagtggggcaatctgggtcttgttggctaatccacaggttgtcatcasgactcgctactgtcactggttttagatggctatggtgaatccaaggtgtggcacctgcaactttaacagcagtgggagtagacatgattacaatatggcgcctatcgtatatgggtcctagagtggttgaattccattttttacctaaacgaagtccctaggtttgaaagggtgtactgggtctgttagacttataggcatttttttacatacttaaccatgcattttagtatagccatacttaaagcctgcatttgccttcttaaagttagttttcccaatttacagagattaccctgaatctgatttttatggggggt

SEQ ID NO: 940133 - DNA, 694 bp, Homo sapiens
tggcagagactcactctgttgttgagaatctctccattatatgactgctgcttgtggtgcttaaacctcaggaagaaagaatatatgaatgtctgaacattgctttaaaaagacaatgtacatttaatgtagagatatgtgaccagcttagaaagctgcactttttccacagcaggcaaaccggagcctggataccccagggtcacagctcatgagaacatagggctggactgtgagaaaacaagaagcaattagtgcagaggagttgacaagacaccaactgggctgagaaaaaagagctgatagattaatttccaaattayactacaaaacatacaataagcagaccccatagctttatacattaaaaccaaatgatgacaaagagtgaggattgcattaaattaaattaggagcaactaaagactggtttatgatcttgaacctttagtcactctccatagttccatcccatgacccggtaattatttcctgctttctgcatgccttggacactggtccatttctggccccaaagtgttcctttttctaataagagtacttacttcatctcttaatacaattcctttccttgcatactgtgccccaaagaagaaatattaaaaactttcctgatgtttttctgctgcggggttaatgggctcagagtgatgataagaacggccaatgagtg

SEQ ID NO: 940134 - DNA, 694 bp, Homo sapiens
tggcagagactcactctgttgttgagaatctctccattatatgactgctgcttgtggtgcttaaacctcaggaagaaagaatatatgaatgtctgaacattgctttaaaaagacaatgtacatttaatgtagagatatgtgaccagcttagaaagctgcactttttccacagcaggcaaaccggagcctggataccccagggtcacagctcatgagaacatagggctggactgtgagaaaacaagaagcaattagtgcagaggagttgacaagacaccaactgggctgagaaaaaagagctgatagattaatttccaaattatactacaaaacatacaataagcagaccccatagctttatacattaaaaccaaatgatgacaaagagtgaggattgcattaaattaaattagsagcaactaaagactggtttatgatcttgaacctttagtcactctccatagttccatcccatgacccggtaattatttcctgctttctgcatgccttggacactggtccatttctggccccaaagtgttcctttttctaataagagtacttacttcatctcttaatacaattcctttccttgcatactgtgccccaaagaagaaatattaaaaactttcctgatgtttttctgctgcggggttaatgggctcagagtgatgataagaacggccaatgagtg

SEQ ID NO: 940135 - DNA, 694 bp, Homo sapiens
tggcagagactcactctgttgttgagaatctctccattatatgactgctgcttgtggtgcttaaacctcaggaagaaagaatatatgaatgtctgaacattgctttaaaaagacaatgtacatttaatgtagagatatgtgaccagcttagaaagctgcactttttccacagcaggcaaaccggagcctggataccccagggtcacagctcatgagaacatagggctggactgtgagaaaacaagaagcaattagtgcagaggagttgacaagacaccaactgggctgagaaaaaagagctgatagattaatttccaaattatactacaaaacatacaataagcagaccccatagctttatacattaaaaccaaatgatgacaaagagtgaggattgcattaaattaaattaggagcaactaaagactggtttatgatcttgaacctttagtcactctccatagttccatcccatgacccggtaattatttcctgctttctgcatgcctyggacactggtccatttctggccccaaagtgttcctttttctaataagagtacttacttcatctcttaatacaattcctttccttgcatactgtgccccaaagaagaaatattaaaaactttcctgatgtttttctgctgcggggttaatgggctcagagtgatgataagaacggccaatgagtg

SEQ ID NO: 940136 - DNA, 634 bp, Homo sapiens
aacacattcaagtcttgcaatgaacggcataatgtatggtggtataattcagagtggttacaggggagagttaaagatcattttatacaatatcactcgagaatcttttgctgtaaaactgcagatgtgggttcctcaatttttagtggtaccttgtcaacaattaacccctgaggatgtctctgccccaacagaggctacatacagaactgggagattcagacgcactggtacacrtagcttaaatcctggagccaaaatatgagtacagcgtccatcacatcctactcctatggctggtgaacttgtagctatgggagaagaaactgaaggcatagtacagtttcctaaagatgaaaaacaatattatgttcccctctgttttggttattacagagaataacctgtttactaatggtcagtacctgtgtctctgtgtctgatgccaagaataaattcatcatctgcatagccgccactgcaacagaagccaactgcagtcaatgttggctatgcgtggaattgccagaggccaccaaaaatgggctacgttggagaatcgtccctgtaccttactgcataccgaatgttgtgtgtatatccctgacaattctcacactacgactctccttgc

SEQ ID NO: 940137 - DNA, 692 bp, Homo sapiens
tcctaaagatgaaaaacaatattatgttcccctctgttttggttattacagagaataacctgtttactaatggtcagtacctgtgtctctgtgtctgatgccaagaataaattcatcatctgcatagccgccactgcaacagaagccaactgcagtcaatgttggctatgcgtggaattgccagaggccaccaaaaatgggctacgttggagaatcgtccctgtaccttactgcataccgaatgttgtgtgtatatccctgacaattctcacactacgactctccttgcacagccatggtgggtgtggttttyattaactgtgcttttaattctcctgtgcttaccctgagtctgtaatctgtatcaactatgctttccccaagtatctgtaagggtattttcctacaattgagtatcaaattgaagccaaatttggaagaaaagttaaatattcaattttatctcaattgaacatggacacaaacaatggtcaccaagtcccggaacaggttctgtgagtttcttcaggcgttcatccaccagtgtctcagagaaatttctattttaatctgttcctgtatgttagttattgaaaaacaacagacaatcgccaaaaatttgacatttttgtggtttttgagcccagtagtgaagagtcctcgttacccggccttatgccaaagaactcctt

SEQ ID NO: 940138 - DNA, 588 bp, Homo sapiens
cctaatttattgagagttttttgcaggaagagttgttgaattttgtcaaaggccttttctgcatctcttgatatctcaagataatcacatggtttttttgtcattggttctgtttataaggtggattacgtttgttgatttgtgtatgttgaaccagycttgcatcccagagatgaagcccacttgatcatggtggataagctttttgatatgctgctggattcggtttgccagtattttattgaggatttttgcatagatcttcatcggagatattggtctaaaattctctttttttgttgtgtctctgccaggctttggtatcaggatgatgctgtcctcataaaatgagttagggaggttccctctttttctattgattggaatagtttcagaaggaatggtaccagctcctccttgtacctctggtagattttggctgtgaatccatctagtcctggactttttctggttggaaagctaattattaattattgcctcaatttcagagcctgttattggtctattcagagattcaaattcttcctggtttagtcttgggtgggtgtatgtgtcgaggaatttatc

SEQ ID NO: 940139 - DNA, 651 bp, Homo sapiens
ccaccaacttccgttattatgtgtttagtttttcatctgtgcatcaaatcacaaagaatgaatacaattttttcctttatcagtcccttgggcacagcaggtctggaacaccctgctcagaatgttgcatcaagacttcaaacatcaaaataaaaaccatgaggaggaaatccccatcttgtgacttgagtcccttcagtctacagggactggttacagcattttgttaataggaagatcacattactagaaaatatggagtaaactgtttgcctatggtagacatcctcacacataagattgaagacagtaccggctcctgtacagagaagcgtctctcacatctgaactgcatactgagcgggcaagttggttgtaagttcagtaaaagcctctgataatgcaaaaaaaaaaaaaaaagtattaartttcacacgctgtttgtaatcaagtatattttctcagtttcagatcctctgctattttatttagtgggaagtcttgcactaaaagggttcaagaaaaatagtgttgcattttcttatgtcacaggaaacacttttaatggtaacttgtcagattgtctatgaacaaacccactttttaagacattgataaagtcttcttttcttcacgttgtgttttatacaa

SEQ ID NO: 940140 - DNA, 656 bp, Homo sapiens
gataagcagaatacagaataaacaaaaaactaaataaaaaattagtttaactttaaaatgggcaataatcttcagaaacatttctggaaaatataaggggcataaacatagaacctaaaagttagagaagaattatgaaaaaactgaaggatatagaaaaaataatttcagactattcacattaaaatttaattagagagggggtggagccaagatgggcgaataggaaaagccttagtctagaactcccagcatyggcaatgcagaacacaggtgatttctgcatttccaactgaggtaccgggctcatctcactggggagtgtcagaaagtgggtgcaggacagtgggtgcagcgcaccccatgtgagccaaagcatggtgaggcatcgcctcacccaggaagtgcaaggggtcagggaataccctttcctagtcaaagaaaggggtgacagattgcacctggaaaatcgggtgactcccaccctaacactgtactgttccaaaggtcttagcaaacggcataccaggagattatatcctgcacctggctcagagggtcctacgcccacagagccacaatcattgctagcacagcagtctgagatcaaactgcaaggcaacaacaagcctgggggaggggcgcccaccattgcc

SEQ ID NO: 940141 - DNA, 656 bp, Homo sapiens
gataagcagaatacagaataaacaaaaaactaaataaaaaattagtttaactttaaaatgggcaataatcttcagaaacatttctggaaaatataaggggcataaacatagaacctaaaagttagagaagaattatgaaaaaactgaaggatatagaaaaaataatttcagactattcacattaaaatttaattagagagggggtggagccaagatgggcgaataggaaaagccttagtctagaactcccagcatcggcaatgcagaacacaggtgatttctgcatttccaactgaggtaccgggctcatctcactggggagtgtcagaaagtgggtgcaggacagtgggtgcagsgcaccccatgtgagccaaagcatggtgaggcatcgcctcacccaggaagtgcaaggggtcagggaataccctttcctagtcaaagaaaggggtgacagattgcacctggaaaatcgggtgactcccaccctaacactgtactgttccaaaggtcttagcaaacggcataccaggagattatatcctgcacctggctcagagggtcctacgcccacagagccacaatcattgctagcacagcagtctgagatcaaactgcaaggcaacaacaagcctgggggaggggcgcccaccattgcc

SEQ ID NO: 940142 - DNA, 656 bp, Homo sapiens
gataagcagaatacagaataaacaaaaaactaaataaaaaattagtttaactttaaaatgggcaataatcttcagaaacatttctggaaaatataaggggcataaacatagaacctaaaagttagagaagaattatgaaaaaactgaaggatatagaaaaaataatttcagactattcacattaaaatttaattagagagggggtggagccaagatgggcgaataggaaaagccttagtctagaactcccagcatcggcaatgcagaacacaggtgatttctgcatttccaactgaggtaccgggctcatctcactggggagtgtcagaaagtgggtgcaggacagtgggtgcagcgcaccccatgtgagccaaagcatggtgaggcatcgcctcacccaggaagtgcaaggggtcagggaataccctttcctagtcaaagaaaggggtgacagattgcacctggaaaatcgggtgactcccaccctaacactgtactgttccaaaggtcttagcaaayggcataccaggagattatatcctgcacctggctcagagggtcctacgcccacagagccacaatcattgctagcacagcagtctgagatcaaactgcaaggcaacaacaagcctgggggaggggcgcccaccattgcc

SEQ ID NO: 940143 - DNA, 631 bp, Homo sapiens
tcctggcttaatcttgagagagtgtgtatatctaggaatctatttatttcgttaaagttttctagtttgtgtgtataaagttgttcatgttagtgctgtccccagttaaataaaaacaactattagaaaccactaaagtttaacacttgtttttatatctttaatcaatttttatttaatttttctacttggaatgtgataaagattcaactttactggtttaaatgtggacttgttttcccagcatttcttgtgtaacaaactgtctttacataatgattaagrcacacttttaaaaagacaaacaataatttatgaaagggttttttggagtatctattttatttatttgatctccacaattgttcttatgccactatcaaactgttataattttagtagctttttatgttttcaaatttaaaattgtgagccacctaattttgtccttcttttcaagattattctgtacattcagaggatgttcaaattccatatgaagttttaaatgagctattttctttttgcagaagaaaagttggaaaaatgaaaacttgggattacagtacatctgtacactcctttgggcagtggtattgtcatcttaacttcattaaatcttccggttcag

SEQ ID NO: 940144 - DNA, 627 bp, Homo sapiens
atagccttcttttacttacaaattggtatatttctctaggtttgggaagttctctgttattatttctttgaataaactttttacccctatctctttctctacctcctctttaaggccaataactcttagatttgcactttttaggtaattttctagatcctgtaggcatactttattgtttattgttctttttttcttttgtctcctctgtgttttttycaaatagcctgtctttaagctcactaattttgtcttctgcttgatcaattttactacaaaagactctgatatattctttggtatgccaattgcatttttcagctccaggatttctctttattattaattatttcaatcttttatttaaattattctgatagaattctgaattccttctctttgttttcttgaatttttttgagttttttcagaacaactatttttaatactctgtttgaaaggtcaccagaattgttccctgattccttatttagttaatttggtgaagtcatattttcttggacagtcatgatacttgtggatgttcatctatgtctgggcattgaagaatccagtatttattgtagtcttcttggtctggtcttgtttgtatcttttcctcttagg

SEQ ID NO: 940145 - DNA, 667 bp, Homo sapiens
aattctaacagatatacaaagaagggctggcaccattcctactgaaactattccaaaaaatcaagaaggagggaactcctccccagtgcattccatgagatcagcatcatcctgataacaacatctggtaaaacacaacaacaacaacaacaaaagaaaaagccaggccaatatcattgatgaacattgtagcaaaaattctcaacaaaatacttgcaaaacaaattaagcagaaaattaaaaaactaatccaycatgatcaagtaggcatcatccccagaatgcaaggttggttcaacaaacacaaattaataaatgagattcatgacataaacaaaactaaagacaaaaaacacatgattatctcaatatacacagaaaaggctttcaacaaaattcaaaaccccttcatgttaaaatttatcaataaactatgtattgaaagaacatacctcaaaatactaagagccatctatgacaaaaccacagcaaacatcatactaaatgggcaaaagctggaagcattcccattgaaaaccagcacaagacaaggatgctctctctcaccactcctattttaacatagcattggaagtcctggccaaagcaaacaagcaagataaagaaataaaggacatctaaatagaaagagaggaagtcaaactat

SEQ ID NO: 940146 - DNA, 493 bp, Homo sapiens
tggtatattctagatccttgtttacaaggagaagcttttggttgctgcagacaaggggctgatctgtggagtgcacagtggtctgagctccttgctcagccctgggtgagggagtgggggcaaggctataatgagtggggccagactgggcagatcctctccacctagagttcaycaggtggcaaacgagcaccagcactaagggagaatccagtgggtggccaccaggtgcccaaaggtgtgcctaggcatggagcttgaaaacccccattggccctaaattatctgcatgggaatatggggttggcctgaactcctaatccagaagagtagttgctcaagagacctggagatctacctagggatcagagaggggcctctgccccaagatctctgcacaggagggtagggtgactcaggctgctgaacccagcaagcaggttctctgaatgcctggaaatctgcctgggtgtgtagcagagagcccccccac

SEQ ID NO: 940147 - DNA, 652 bp, Homo sapiens
tctctgcccctgtggctctttagggtacagcccccttggctgctttcatgggctggtgttgtgtgcctgtggcttttccaggtacatggtgcaagctgttgatggatctaccattccagggtctggaggttggtgactctcttctcacagctccactaggcagggccccagtgagcactctgtgtgggagctccaaccccacatttcccctccacactgccctagtagaggttctccatgagggctctgcccctgcagcagacgtctgcctggacatccaggcatttccatacatcctttgaaatctaggcagaggctacgaagcctcaacacttgtcctctgtgcacatgcaggcttaataccatgtggaagctgccgaggcttatggcttacatcttctggagcagcagcctgagacatatctggggcccttttagccatggctggagctggagtgtctgggacacagggagcagtgttcygaggtaatgcagggcattagggccctgggcccagcctgcaaaactattcttccctgctaggcctccagacctgtgatgggagggtctgctgtgaaggtttctgaaatgccttcaaggcatttcccccattgtcttgactattaacatttggcttctctttagctatgca

SEQ ID NO: 940148 - DNA, 643 bp, Homo sapiens
acaatctgagccctggactgcaggaaagttcaggacaatgacttcctgattcccatgccttttgattgtgatagagatagggcttgcttctctaggatctgattctctgttttgaatctcttattgcttctgttatcccttacttatacctgattgataggtgccgttgttacttagtggccctaaaggagccatgggggaaaaaaagcctgggcagtaattacaagataaaactttacattgtgattatcagtgtacgggaggcacgcagattatacatgctacatcagtattggcaaagatagtcaactccactattcaaagttcaacccctctttatcrtcaactttcctggctatagctcctaatatgagattaagaaaaagcaaaacttttgaaccaagcacctgataatgctcataggtcttcatctggtgagcactcagggtatcactgactgctggttaatattaaatttgagcaagtttagttttataatttcttattatattgatcagaaactagaagtatgtaattattaattataacctaaaagtaatacagacacaaaaatagattacacatgaacacaaaatacaaatattgatattattttggagtttaaaggcttacaatgcaatag

SEQ ID NO: 940149 - DNA, 651 bp, Homo sapiens
caccgcatagtttgttgttaaagtgccatttgctttctcttattatacagcaggtcttcaaataatgttacaatgttgatgaggaaaaaaaaaatggattcctggccaaggccactatctgtgtggagtttgcaagctctccccacatctgtgtgggttttctccaggtgatccrgtttcctcccacttcccaaatctgtgcctgttaggtaaattggcatgtccacactgccccggtgtgagggagtgtgggcgtgtgtgtgaggtgtgagtgtgccctgtgatgggatggcaccttatccaggtctggttcctgccttttgccatgagctgctgggacagggcccagccacctgcaaccctgaactggaagaagcaagtaaataattatcttacttaattttatcactctttcttaaatgtatgtgtagcccacacttatttctatgtttaatataaaaagtgttttgctctaaacataactctgttttatatcaattagcctaagttcaaattggtttcattgtaccttctatgtcatttcacttagtcacagttcccgagaacccatcattaaggagggacttactgtactctccttttctctgttggtgtggatttcttcaaggatccaggatcaccttccccact

SEQ ID NO: 940150 - DNA, 651 bp, Homo sapiens
caccgcatagtttgttgttaaagtgccatttgctttctcttattatacagcaggtcttcaaataatgttacaatgttgatgaggaaaaaaaaaatggattcctggccaaggccactatctgtgtggagtttgcaagctctccccacatctgtgtgggttttctccaggtgatccagtttcctcccacttcccaaatctgtgcctgttaggtaaattggcatgtccacactgccccggtgtgagggagtgtgggcgtgtgtgtgaggtgtgagtgtgccctgtgatgggatggcrccttatccaggtctggttcctgccttttgccatgagctgctgggacagggcccagccacctgcaaccctgaactggaagaagcaagtaaataattatcttacttaattttatcactctttcttaaatgtatgtgtagcccacacttatttctatgtttaatataaaaagtgttttgctctaaacataactctgttttatatcaattagcctaagttcaaattggtttcattgtaccttctatgtcatttcacttagtcacagttcccgagaacccatcattaaggagggacttactgtactctccttttctctgttggtgtggatttcttcaaggatccaggatcaccttccccact

SEQ ID NO: 940151 - DNA, 612 bp, Homo sapiens
tagacaggtcaagcagttcctcaaatggttaaacacagagcacagagttaccatatgacccagtcactcccctcctacgtatatacccaagaggtgtaaaaacatatgtccacgttgccaggtgcagtggctcacgcctgtaatcccagcactttgggaggctgaggcaggtggatcccctgaggtcaggagttcaagatcagcctgaccaacatggcgaaactctgtctctactaaaaatacaaaaattagccrggtgtggtggcgcacacctgtaatcccaactacttgggaggctgatgcaggagaatcgcttgaacccggaaggtggaggttgcagtgagctgcgatcgtgccactgcactccagcctgggtgacagagcaagactatgtctcaaaaaaacaaaacaaacaaacaaacaaaaaccaaaaaaacaaaaccatacatccatgcaaaaacacattacacgtggatgttcatggcagcattattcataacagcctgaaagctggaaagtggaaacaacccaaatgtctatcaactgggaaatggatccacagaatgtggtctccccatgaaagggaatatcatctaggatctaggaatgctc

SEQ ID NO: 940152 - DNA, 727 bp, Homo sapiens
atggggagtgcctctgcccggctgccccatctgggaggtgaggggcgcctctgcctggccgccccgtctgggaactgaggagcgcctctgcccggctgcccatcgtctggaatgtgaggagcacctctgcctggccgccctgtctgggaagtgaggagtgyctctgcccggcagccgccccatctgggaagtgaggagtgtctctgcccggccgccccgtctgggaagtggggagcgtctctgcccggccgccccgtctgggatgtgaggagtgcctctgcccggccgccaccccatctgggaaatggggaacgcctctgcccggccgccccgtctgggaggtgaggagcgcctctgcccggccgcccttcatctgggaggtgaggagcgcctctgcccggctgccccgtctgggaggtgaggagcacctctgcccggccgccccgtctgggaggtgaggagcgcctctgcatggccgctgtgcaatcttccaagtgtgaagtgacagcctttctgcaggtgtacccaacagctccgaagagacagcgaccatcgagaacaggccatgatgatgatggcggttttgtcgaaaagcaaagggggaaatgtggggaaaagaaagagagatcagattgttactgtgtctgtgtagaaagaagtagacataggagactccattttgttctgtactaagaaaaattcttctgccttgggatgctgttaatct

SEQ ID NO: 940153 - DNA, 595 bp, Homo sapiens
ccagcttcacaggaggctggggcaggaggatcacttgagcccaggagttcaaggctgcagtgagctatgataacaccactgcactccagcctgagggacagagccagaccctgtataaaaagtaaaataaaataaaaataaaaatgaaagaaaagaaaaagaagaagagaaaaagaaawtcgtccaagtaatatcctataatggcctaaaaagtgtttgagtgaaagattcaggagagttgcatgtctctcactccaaatcaaaagctaaaaatgaagcttagtgaggaaggcgtgatgagccaaaatctaggcctcttggccaaacagctaagttgtaaatacaaaggaaaagttctgaaggaaattaaaagtgctgctccagtgaacatatgaatgataagaaaacaaatcggtcttattgttgataaggagaaagctggagtggtctggagagatgatcaaaccagccacaatattcccttaaaccaaagcctaatccagagcaacccctaactctctttaattttatgaagcctgagagaggtaaggaaattgcagaagaaaagtttgaagttagcagagtttggttcctg

SEQ ID NO: 940154 - DNA, 725 bp, Homo sapiens
gcctatgtaatgagcttctatacaaacacaacaaagcagggttcagagggcttcacgacagtggaggttcctggaggatggtgcctggagagggcatggaggcttcatgtccccttcccccatacctcgccctatgcatctcttcccctgtagccttcataatatccttttttttttttttttgagacagagttttgctcttgtcacctagactgragtgcagtggtgtgatcttggctcactgcaacctccgcctcccgggttcaagagattctcctgcctcagcctcccaagtagctaggattacaggtgcccgccaccaagcccagttgatttttgtatatttagtagagatggggtttcaccatgttggccaggctggtcttgaactcctgacctcaggtgatccacccacatcagcctcccaaagtgctgggattacagccgtgagccaccacgcccagcccataataccctttttaataaaccagtaaacataagtgcttccctgagttccatgagctgtggtagcaaattaatgaaacccaaggatggggtcatagaaaccctaatttatggtcatttggtcagaagcactgggaaaacaacccagggcttgcaactggtatctgaagtaggggcagccttgtgggactggggcctcaacatgtggggcctgagcctacctccaggtagatcatctcagagttgaattgaattagaag

SEQ ID NO: 940155 - DNA, 627 bp, Homo sapiens
aagtgtgatgaatttattgatgtgcccattcgactagactgtagtcctcactaatgtaggtgttgccatgaaggtattttacagatataatcaaagcccctgatacggtttggctctgtgtccccacccaaatctcatgtggaatggtaatccccatgtgttgggggaggggcctagtgggaggtgattggatcatggggggaatttctcccatgctgttctcatgatagtgggtgagttctcacgagatctgatggtttaaaagtatgtggcacttccctcttgytctctctctctcctgccactatgtgaagaagatgcttgcttcccctttgccttctactatgattctaaatttcctgaggcctcccagtgatgcttcctgttaagcctgcagaactgtgagtcaattaaacctcttttcttcataaattacccagtctcaggtatttatagcactgtgaacatgggctaatacaggccctaatcagttgactttatataagggacaatatcctagataatctggatggacctgactgaatctgttgcaagaccttaaaagtagagcctaggtctcacacagaaagggcagaaattctacctgtgcaccacagctttagccca

SEQ ID NO: 940156 - DNA, 568 bp, Homo sapiens
tcatttacttttaccgtatttccagaaatgaacttaatgcattaaaacacattaaatatcttgattgaaataatttctagaaattttataacattttcactactttagtggaaaaacagtatcataattgattttcaattattttattacaagtggaattgaacaattttcagctatttctttatactttggatttcttctgttgtctatgtcttttgcctgattttctatagaaaaatctctattttatattgtcctttgcctaattagcaccattgttagtgttttccctattraattgtaagcagggggacacactttctcactcatgctagttccctctgtgcggatggagctccactgccaaccacttctggcactcttgccctcatggtccttctagccctagggatgaggaatggctgattggtgagtttggggtaaggaactgagcatgtgcagcttaactctttccacagtgtccctgtccggctgttatagataccataagtgctcgtctcgtctcatctgttcttctttgctgtaagttttaaaggaacagcttaat

SEQ ID NO: 940157 - DNA, 614 bp, Homo sapiens
cagttagaatggcttttatcaaaaagataaaatataacaaacgctggcaaagataaagagaaagaagaacactcatatcccattattagtgggaatgtaaattagtacagccactatgccaaaacagtatggaggttcctcaaaaacctcaaaatgaaactacctatgatccagcaatccctctactggttatacctcaaagaaagaaagggaatcagtatagagaagagatatctgcacycctgtgtttattgcaacactattcacaatagtcaagatatggaatcaggaggtagagcaagatggcagaatagaaagctctgccaattgtaccttccacaaggacaccaatttaacaactatctacagaaaaaaaagcacttagtaagaaccaaagatcaggtgagcactcaccgtacctgcttttaacttcatgtcactcaaagaggcactgaagaggtaggaaaaacagtcttgacttgtggaccccacctcttcccatcccctggcagcagaggcatggtgcagagagcatttctgtgcactggcaagagggagagtgcagtaattgtgaggcactgaactcaacactacctgttacagcagaaagcaaa

SEQ ID NO: 940158 - DNA, 652 bp, Homo sapiens
atagtgcaagaggttgaaagtattaaaagtagtttcttgatattctgctgttaatcctcagatatttattggtgatcttccagctttttcatagcaaatgaatattttttccatgtagctacagtgttgcaccactagtgtcattgtgtatcatagcttttgtctagttaaaaaaacttaaagggaggagccaagatggccgaataggaacagctccggtctacagctcccagcatgagcaacccagaagacgggtgatttctgcatttccatctgaggtactgggttcatctcactagggagtgccagacagtgggcgcaggacagtgggtgcagcgcaccatgagccagccgaagcagggcgaggcattgcctcactcgggaagcgcaagrggtcagggagttccctttcctggtcaaggaaaggggtgacagacggcacctggaaaatcgggccactcccacccaaatactgcgcttttcagacgggcttaggaaatggcgcaccaggagattatatcctgcacctggctcagagggtctgacgcccacggagtctcgctgactgctagcatagcagtctaagatcaaactgcaaggcggcagcgaggctgggagaggggcgaccaccattgcgtaggcttgcttaggt

SEQ ID NO: 940159 - DNA, 666 bp, Homo sapiens
tagaacatttgtatagtgcaagaggttgaaagtattaaaagtagtttcttgatattctgctgttaatcctcagatatttattggtgatcttccagctttttcatagcaaatgaatattttttccatgtagctacagtgttgcaccactagtgtcattgtgtatcatagcttttgtctagttaaaaaaacttaaagggaggagccaagatggccgaataggaacagctccggtctacagctcccagcatgagcaacccagaagacgggtgatttctgcatttccatctgaggtactgggttcatctcactagggagtgccagacagtgggcgcaggacagtgggtgcagcgcaccatgagccagccgaagcagggcgaggcattgcctcactcgggaagcgcaagaggtcagggagttccctttcctggtcaaggaaaggggtgacagacggcacctggaaaatcgggccactcccacccaaatactgcgcttttcagacgggcttaggaaatggcgcaccaggasattatatcctgcacctggctcagagggtctgacgcccacggagtctcgctgactgctagcatagcagtctaagatcaaactgcaaggcggcagcgaggctgggagaggggcgaccaccattgcgtaggcttgcttaggtaa

SEQ ID NO: 940160 - DNA, 745 bp, Homo sapiens
agagcgggctcaggttgccacaggcatggctggagactaggaatagagccttgctcactgacccatttcatgtctaggcttccagcggagactacagtttcattacaacctatatgcgcccataggtcctgcctgcggcaatgacatctctcgggtcagtaagggccactgggaacaggaatatcacccctatctggaagaccaggtggaggcttatcaccttcatagtaaggtactcactgtccacgtcaagagccaagccaaggtactgttcctccaatgagtgaacagcacttctgtagggctggcctaagtcaggcagttcaagataacctgaaggagtcgaataacatctatccagtgagtcctgcaagacttcaggctctttctcatccagcagctccctgctgagcctggaaaagtaggaaaaagtaaagaataagccagggggaatcagaaaccacacagccccagctacatttcatgggtagcataaggaactgtttaaacagaaaaaggacagatccattaatgaggtaatgaattattgccttyatgttgggacagaacatggccaaatggaaaagaatgaaagagaaagacagatagacacacacacacacacacacacacacacacaatgagctcagtgaattggccaggtgacacactgatgagggagtcaacggtcattctctatttgtgctctcaggacacacagtgaacagtgatcatgaaaagcatg

SEQ ID NO: 940161 - DNA, 542 bp, Homo sapiens
gctgagagagggcatccttgttctgtgcctgttttcgaaaggaatgcttccagcttttgcccattcagtaagatattagctgtgggtttgtcataaatagctcttattattttgacatatgttccatcaatacttagtttatggagagtttttagcatgaaggagtgttgaattttattgaaggccttttctgcatctattgagataatgatgtggtttttgccattggttctgtttatgtgatggattatgtttattgatttgcatatgttgaaccagccttgcatcccagggatgaagctgacttgatcrtggtggataagtttttggtgtgctgctggatttggtttgccagtattttattgaggatttttgcatcaatgttcatcaggaatattggcctgaaattttctttttttgttgtgtctctaccaggttgtggtatcaggatgatgctggtctcataaaatgagttagcgaggagtccctctttttctattgtttggaatagtttcagaaggaatggtgccagctcctctttg

SEQ ID NO: 940162 - DNA, 605 bp, Homo sapiens
gtggaagagggattggggttgggatgaagaagagttaggactgcctgtaagaaatgaagggggtcaggggttgccagaagagctggagagaagaacacagatttggggacattaatgaggccaagccaggcaatgcaaagggcaagaagagcaagggggaggtcacagttcagatccctggggactggacaggcgggcaggcagagcccacaggcaaatagcagcccacccggggagcccgagggcaggtgcctgcctcagcagttgtcctagcaactctgtgagaagcagacagagctgccacttctttttttttttttttttttagacagagtctcgctctgtcacccaggctggagtgcagtggcgtgattttggctcactgcaacctctgcctcccaggttgaagcgattcttctgccttaccctcccaagtatctgggactacaggcgygtgccaccatgcccagctaattttttgtgattttaggagagatagggtttcactgtgttagctaggatggtctcgatctcctgacctcgtgatccgcccacctcagcctcccaaagtgctgggattacaggcatgagtcagcacgcccggc

SEQ ID NO: 940163 - DNA, 604 bp, Homo sapiens
agtcctagctacttgggaggctgaggcaggagaatcgcttgaacccaagaggcagaagttgcagtgagctcagatcgcaccactgcactccaacctgggcgacaagagtgagactctgtctcaaaaaatcaaacaggctgggcgcrgtggctcatgcctgtaatcccagcactttgggaggccgaagtgggcagatcacctgaggtcgagagttcgagaccagcttgaccaacatggtgaaaccccgtctctactaaaaatacaaaattagccaggcatggtggcgcgtgcctgtaatcccagctacttggaaggctgaggcaggagaatcgcttgaacctgggaggcggaggttgaggtgagccaaaatcgcgccattgcactccagcctgggcaacaagagtgaaactccatctcaaaacaaacaaacaaaaacaaacaaacaaacaaaaaccctattactgactcagcacttactatgcgtcaagcacccagctaagtattttagacataacctcattttgtcttcataacatgcctatgtagtttatcctcatccccgtttaacagatgatgaaatggaggatcagaggagatcagcagc

SEQ ID NO: 940164 - DNA, 703 bp, Homo sapiens
ttagaatgtatttgctgctaaaagacacccccaccagcaccatgacagtttacagatgccatggcaatgtctggaggttaccttataaggtctcaaaagggaggggaggagacctcagttcctcttcatccctttactttcctgataaacttgctctcactttactctgtgaactcgctccaaattctttctcgcatgagatcaaagagacctctcttggggtctggatcagagctcccccttttccagtaacaccagcactttgtgggaaagacagaggcgggaggattgagtgaggccaggagtttaagatcagcctggccaacataaggagacctaagtgcctaacttaaaaaaaaaaaaaaaggccaggcatggtggcttacgcctatagtcccaatactttgggagaccgaggtgggcagatcacttgagcccagcagttcgagaccagcctggacaacattgtgaaaccttgtctctacaaaaaaaaaaaaaaaaaaaawatgaagaaattcccaggcacaatagtgtgcacctgtagtcccagctattcagaaggctgagatgggagaatcgcttgagcccaggaggtagaaattgcagtgagctgagattgcgccactgcactccagcctgggtgacagagggagaccctctctcaaaaaaataaaaaaagaaacccaggcaggcatggtggcac

SEQ ID NO: 940165 - DNA, 703 bp, Homo sapiens
ttagaatgtatttgctgctaaaagacacccccaccagcaccatgacagtttacagatgccatggcaatgtctggaggttaccttataaggtctcaaaagggaggggaggagacctcagttcctcttcatccctttactttcctgataaacttgctctcactttactctgtgaactcgctccaaattctttctcgcatgagatcaaagagacctctcttggggtctggatcagagctcccccttttccagtaacaccagcactttgtgggaaagacagaggcgggaggattgagtgaggccaggagtttaagatcagcctggccaacataaggagacctaagtgcctaacttaaaaaaaaaaaaaaaggccaggcatggtggcttacgcctatagtcccaatactttgggagaccgaggtgggcagatcacttgagcccagcagttcgagaccagcctggacaacattgtgaaaccttgtctctacaaaaaaaaaaaaaaaaaaaaaatgaagaaattsccaggcacaatagtgtgcacctgtagtcccagctattcagaaggctgagatgggagaatcgcttgagcccaggaggtagaaattgcagtgagctgagattgcgccactgcactccagcctgggtgacagagggagaccctctctcaaaaaaataaaaaaagaaacccaggcaggcatggtggcac

SEQ ID NO: 940166 - DNA, 751 bp, Homo sapiens
acaaattaatgcagcatcaggtaaccaaatacccatggtctcacttataagtgggagctaaacactgagtacacatggacacacagatgggatcaatagacaccagggtctgcttgagtggggaggatggcatgaggctatgggtcaaaaaactattgggtactctggttactacctgggtgacaacatcatttgtacaccaaactccagtggcatgcaatttacctgtgtaacaagcctgcacatgtatcccttaaacctaaaaacagaaaaaattaaaaataaataaataaatgaggtataagtctaattgttgaatgttgtgactagtaaccaacagagccattgaaaatagtgagagtggccgggtcggtggctcacacctgtaatcccaacacttttggaggccaaggtgggtggatcacaagatcaggagtttgagaccagcctgggcaagaaagcgaaacccygctgctactaaaaatacaaaaattagctgggcatggtggctcatgcctgtaatcccagctactcatgaggctgaggcagcagaatcacttgaacctgggaggtggaggttgcagtgagctgagattgcaccactgcactctagcctgggcgacagagcaagactctgtctcaaaaaaaaaaaaaaaaagaagaagaagaaaagaaaagaaaaagaaaatagtgagagcaccatataaggaaagtggttcaggcactgtggtaaggggtgagtgtcagccaa

SEQ ID NO: 940167 - DNA, 619 bp, Homo sapiens
attttatcatgcagcgagattgaattttattaaatgctttttcagcatcaattgaaatgatcctatagtgtttgwtttttcttctgttgatatgatgtatcatattgactgatttgcatatgttgaaccactcttgcatttctgggttaaatctcacttcatcatgatgaatgatcttttaatgcattgttgaatttggtttgctagtatcttgtggaggatttctgcattaacattcatcagagatatttatctgtaattttatttttttgatgtgtctttggttttggtatcaaggtaatactggctttgtagaatgagtttggaagtatttctttcttctctacgttttggaacagtttgagtaggatttctattcttttttaaatgtttggtagagtttagcagtgaagacataaggtcctgggtttttctttacagggatagtttttattatgggatcttgttacctgttattggtgtgttcaggttccggatttcttcatggttcattcttggtaggttgtaggtgtctagaaatgtatccatttcttcttcattttccaatttattggcatatagttgtttatagcagccattaatgatcctttgaatttct

SEQ ID NO: 940168 - DNA, 619 bp, Homo sapiens
attttatcatgcagcgagattgaattttattaaatgctttttcagcatcaattgaaatgatcctatagtgtttgttttttcttctgttgatatgatgtatcatattgactgatttgcatatgttgaaccactcttgcatttctgggttaaatctcacttcatcatgatgaatgatcttttaatgcattgttgaatttggtttgctagtatcttgtggaggatttctgcattaacattcatcagagatatttatctgtaattttatttttttgatgtgtctttggttttggtatcaaggtaatactggctttgtagaatgagtttggaagtatttctttcttctctacgttttggaacagtttgagtaggatttctattcttttttaaatgtttggtagagtttagcagtgaagacataaggtcctgggtttttctttacwgggatagtttttattatgggatcttgttacctgttattggtgtgttcaggttccggatttcttcatggttcattcttggtaggttgtaggtgtctagaaatgtatccatttcttcttcattttccaatttattggcatatagttgtttatagcagccattaatgatcctttgaatttct

SEQ ID NO: 940169 - DNA, 759 bp, Homo sapiens
agaatataaaatacctacaaatatatttaacccagaaagtaaaagatctttaccaggaaaatggtaaaacactaatgaaagaaattaaacaggacacacgaaaaatgaaaagaacatttcatgctcatgaattgaaagaatcaatattgctaaaatgtccatactatccaaagcaatctacagattcagtgcaatctctatcaaaatgccaatgatatttttcacagaaatagaagaaacaatcctaaaatttgtatggaaccataaaagaccccaaataaccaaaacaatcctgtgggraaaaaaaaaaaaacaaagctggaggcatcacactacctggatttcaaaatttattccaaaactgtagtatttaaagcagcattgtctggcataaaaaacagacacatagaccaatggaacacaataaagaacccagggataaatccatgcatttacagccaaatcatctttgatgaaggtacctagaacatacaatggggaaaggacagcatctttgataagtagtgttgctcccatggtgctggataactataagtcagcagaatgaaactggatccatatctctcaatatatacaaaaataaagtaaaaatagattaatgtcttaaatctaagacccaaaactctgaaactagaagaaaacattagggaagtgctccagaacagtggtctgggaaagatttttttttaatataagaccttaaaagcacaagcaaccaaatcaaaaatagacacatgg

SEQ ID NO: 940170 - DNA, 759 bp, Homo sapiens
agaatataaaatacctacaaatatatttaacccagaaagtaaaagatctttaccaggaaaatggtaaaacactaatgaaagaaattaaacaggacacacgaaaaatgaaaagaacatttcatgctcatgaattgaaagaatcaatattgctaaaatgtccatactatccaaagcaatctacagattcagtgcaatctctatcaaaatrccaatgatatttttcacagaaatagaagaaacaatcctaaaatttgtatggaaccataaaagaccccaaataaccaaaacaatcctgtgggaaaaaaaaaaaaaacaaagctggaggcatcacactacctggatttcaaaatttattccaaaactgtagtatttaaagcagcattgtctggcataaaaaacagacacatagaccaatggaacacaataaagaacccagggataaatccatgcatttacagccaaatcatctttgatgaaggtacctagaacatacaatggggaaaggacagcatctttgataagtagtgttgctcccatggtgctggataactataagtcagcagaatgaaactggatccatatctctcaatatatacaaaaataaagtaaaaatagattaatgtcttaaatctaagacccaaaactctgaaactagaagaaaacattagggaagtgctccagaacagtggtctgggaaagatttttttttaatataagaccttaaaagcacaagcaaccaaatcaaaaatagacacatgg

SEQ ID NO: 940171 - DNA, 747 bp, Homo sapiens
aaagggaaaatgaggttttgggaggctaaaagcatgcccagcagctcacagctagctggtaggtggcatttcttcaaggcccgcactgttaaccctcacacctccttgatcatcccctggcccgtggatactcattcatttggaattcactacatccggcctccccacctcctcctgtgcttccctaaatggggccatcagccttctctcacccgtcgtcaatccctgctgtctgcagggggagggaagtaaaaagctgacaggaaggagttacatgtaaaatggtaacctgtagattgagactgttctccaacaggtctgagggctctaggcagagggaggggaagcggggatatgagggctgtggaaaggatgggaccagactgccaagcaaagaatgctatgtgtggttctgcaggttgtgtacagttctgcaggttgtgtactgcacaacygcttcccatctaagggggcacctttacttcatagacatagtaactctgtgatcattttctggccgaccttgagtaaagtatcttctaacgaaatcagtatattatgacacttcactgacagatggaaaaagataccttgtggaagaagtgtcttttcctaatttgctcaaagcccaaagctttggctctggccgaggtgtgaaatgctgagcttcttgaaggcgggcctcaagtttgacattagtaccccttttcttgtttccccattctgaagcttcaggtggagagtctc

SEQ ID NO: 940172 - DNA, 617 bp, Homo sapiens
gaatagtgggaacttctcctgcttgataaaaacacctacaaaaacctacagctaacattatacttaatggtgagagactggatgctttctcactaagactgggaacaaagcaaaggtattcactctcacaacttttattcaacatagtgaaagaagttctagccagtgcaacaaaacggaaacaaaaggcatacagagggaaaaggatctagaactgtctctatgtgcaggtgtagattccaaacgaatctacagaaaattcctagaactaataagtgagtccagcagtgttactggacatgagataaacatacaggaatcaagtgtatttctatatactaacaataaacatgtagacccraaaatttaaaatacagtaccatttaaaattgctcagaaagtaaaatacttcagtgtaaatttaacaaaacataaacagaacttccatactgaaaactacaaaatactgatgaaagaaatctaaggatgtctaaataaatggagagatatactatgtaaatggattggaaaactcaacaaaataaagatgtcaattctcctcagatttatatacagtttcctttctaaaccccagcaagaattttatagacatagac

SEQ ID NO: 940173 - DNA, 677 bp, Homo sapiens
aacaatactgcaggatatggctttatttggagatagggtctgtaaagaggtaattaaagtcaaatgaggtcattgcagtaggccccaatccaatataactgctgcccttataagaagagaagatgaggctaggcacggtggctcacrcctgtaatccctgcactttgggaggccaaggagggtcgatcatttgaggtcaggagtcaagaccagcctgggcaacaaagtgaaaccccatctctacaaaaaaacacaaaaattagccagccatggtggcatgcacctgtagttccagttactcaagaggctgaggcacgagaatcacttgaacccaggaggtggaggttgctgcactctagcctgggcaacagagcgagactgtctcaaaaaaaaaaaaaaaaaaaaaaaaagacaatgaaggaggcttccaggaagatgtcagtatagggagcacaaggaagctgcctccacctagacaataactgcactggcagaatctgtcctgcataactattttgggactcgaaaggagcctattggaggagactattttaaataggaggtgaccagaagcttgcaacttccaggggaaagcttggtctgcacattgtggttaattacagtcaacctcagcttttggcacagcagcagctaccatcccccaaccccagctctgt

SEQ ID NO: 940174 - DNA, 677 bp, Homo sapiens
aacaatactgcaggatatggctttatttggagatagggtctgtaaagaggtaattaaagtcaaatgaggtcattgcagtaggccccaatccaatataactgctgcccttataagaagagaagatgaggctaggcacggtggctcacacctgtaatccctgcactttgggaggccaaggagggtcgatcatttgaggtcaggagtcaagaccagcctgggcaacaaagtgaaaccccatctctacaaaaaaacacaaaaattagccagccatggtggcatgcacctgtagttccagttactcargaggctgaggcacgagaatcacttgaacccaggaggtggaggttgctgcactctagcctgggcaacagagcgagactgtctcaaaaaaaaaaaaaaaaaaaaaaaaagacaatgaaggaggcttccaggaagatgtcagtatagggagcacaaggaagctgcctccacctagacaataactgcactggcagaatctgtcctgcataactattttgggactcgaaaggagcctattggaggagactattttaaataggaggtgaccagaagcttgcaacttccaggggaaagcttggtctgcacattgtggttaattacagtcaacctcagcttttggcacagcagcagctaccatcccccaaccccagctctgt

SEQ ID NO: 940175 - DNA, 677 bp, Homo sapiens
aacaatactgcaggatatggctttatttggagatagggtctgtaaagaggtaattaaagtcaaatgaggtcattgcagtaggccccaatccaatataactgctgcccttataagaagagaagatgaggctaggcacggtggctcacacctgtaatccctgcactttgggaggccaaggagggtcgatcatttgaggtcaggagtcaagaccagcctgggcaacaaagtgaaaccccatctctacaaaaaaacacaaaaattagccagccatggtggcatgcacctgtagttccagttactcaagaggctgaggcacgagaatcacttgaacccaggaggtggaggttgctgcactctagcctgggcaacagagcgagactgtctcaaaaaaaaaaaaaaaaaaaaaaaaagacaatgaaggaggcttccaggaagatgtcagtatagggagcacaaggaagctgcctccacctagacaataactgcactggcagaatctgtcctgcmtaactattttgggactcgaaaggagcctattggaggagactattttaaataggaggtgaccagaagcttgcaacttccaggggaaagcttggtctgcacattgtggttaattacagtcaacctcagcttttggcacagcagcagctaccatcccccaaccccagctctgt

SEQ ID NO: 940176 - DNA, 565 bp, Homo sapiens
ggcgcatatctttattagaacagattaacacagccttggttacatagaatgtagctgttgatctggccatgtagtcttttccatacccttcagaaatgaggatcagaagcactttgcattcacatgaggtagacaacagtatacattcatggtttcccccagagctatgttacttctcctgctctctgtcataaccgagtataaagggatgtggaccatctggacatcttgcagaatataacatattggttcactctattgaggacatcatattaattagacctgatgagtgagaagggacaattagtgctttggcaagatgmcttttcaagatgcatgtgctccagagggtaagaggtaaatcctacaaagttctgctatgaatttttagggtccagtggtctgaagcatgctgagacatgccctccaaattaaagagcaaattattgcacattttccctcttaaagccaaagaggcagcacaatgtttggtagatctctgggttttggaggaagcacactcttcacttgggaatactgtttgacccatttatctgctgacatg

SEQ ID NO: 940177 - DNA, 603 bp, Homo sapiens
ttctaaaatctgataagttctgaattctgaaatacatgtgatctcaagggtttctttatttaaaaaaatgtctataaggtagataacatgatgttttgctatatatgtacttagtgaaatgattgctacagtcaagcaaattaatacatgcatcacctctcatagttacctttgtccgtggagtggggcagaaaggttaagagtacctaaaatctactctcttagcagatttccagtgtacagtacgatattattaactatagttctcatattctcatagtgtacattagatctctagacttatcctacataactgcaactttgtgccctacatctccttttttttttttttttttttttttgagacaaggtcttgctctgtcactcaggctggagtgcagtsgcgcaatcatgcctcactgcagcctcgaccttccaggctcaattgaccctcccacctcagcctcctgagtatctggggctacaggtgtacaccgccatgcctggctaatttttgtattttttgtagagacggggttttgccatgttgcccagattggtctcaaactcctaggctcaagtgatcctcccaccttggccttc

SEQ ID NO: 940178 - DNA, 782 bp, Homo sapiens
acacttgtgtatgcttcacgaagttcttgtgctgtgtttttcagccccatcaggccatttgtgttcctctctaaactgattattctagttagcaattcctccaactttttatcaaggttcttagcttcttcgcattgggttagaacatactcctttagctcatcatagttttttctacccrtcttgtgaagcctacttctgtcagttcatccatctgatcctccgcccagttctgcacccttaatggagacattgtgatcatttagaggagaagaggcactctggccttttgggttttcagcatttttttcattggttctttctcaccttcgtgagtttgtctagttgtggtctttgaggctgctgacccttgtatgggttttttgtgggggcccttgttgttgttgttgatgatgatgctgttgttgtcactttctgcttgtttgtttttctttcaatagtcacttccctcttctgtagggctgctgcagtttgctggggttcactttaggccttattcatctgatttgctcccacgcctggatatgtaactcaaggaggctggagagcagcaaaaatgggtgtctgctccttcttctgggacctctgacttcaaggggcaccaacctgatgccagtaggatcgctcctgtatagggtgtcctgacaatccctgttggagggtctcacccagttgggtggcaccaggaggaggacccatttaacgaagcactttgtcccctggtggagagggtgtgttttgctgtgggaaagcccacttgt

SEQ ID NO: 940179 - DNA, 600 bp, Homo sapiens
taatttttttgtattttttttctttagcagagacaaggtttcactatgttagccaggatggtctcaatcacctgaccttgtgatccactcgcctcggcgtcccaaagtgctggggttacaggtgtgagccactgcacccgayctttttttcacttttaaatcaaaacagatcattcatacaagagaagaaatacatatgtagagatgacaaatcattcagtgggcctctctgtaatgcttcccgctccagtccctgagtagctccccccgcccagctgtgcacgtcttcttctttgtgatgtggtctctacacagatttgggattcattttccctcgcttctctttttagttttaccacatattaatgtatccttaaacaatatgttcttaagccttgcttccttttgccgtttatagaagcagagtcaaacaatatatatttttccatgacatgcttttagctttcagcactgtggttttgcagtctctccaggttgatgggtgcagctgtggtccattcgttttcttagctgaataatactcctgttgtaggaatagatggcagcaagcgtaacccctcttcatggatgggtacctgg

SEQ ID NO: 940180 - DNA, 600 bp, Homo sapiens
taatttttttgtattttttttctttagcagagacaaggtttcactatgttagccaggatggtctcaatcacctgaccttgtgatccactcgcctcggcgtcccaaagtgctggggttacaggtgtgagccactgcacccgatctttttttcacttttaaatcaaaacagatcattcatacaagagaagaaatacatatgtagagatgacaaatcattcagtgggcctctctgtaatgcttccygctccagtccctgagtagctccccccgcccagctgtgcacgtcttcttctttgtgatgtggtctctacacagatttgggattcattttccctcgcttctctttttagttttaccacatattaatgtatccttaaacaatatgttcttaagccttgcttccttttgccgtttatagaagcagagtcaaacaatatatatttttccatgacatgcttttagctttcagcactgtggttttgcagtctctccaggttgatgggtgcagctgtggtccattcgttttcttagctgaataatactcctgttgtaggaatagatggcagcaagcgtaacccctcttcatggatgggtacctgg

SEQ ID NO: 940181 - DNA, 537 bp, Homo sapiens
tcctggtgctgtccccaaactgccactcttaactcttgaagtaaataaataatctttgctggcaggactatgctgaatctccttaggcactctctaatcagatgtcctaggtcctcccaattcttagaccttttatacctgtttttctccttctcttattccatttagtttttcaattcatacaaaaccgtrtccaggccatcaccaatcattctatacgacaaatgtttcttctaacatccccacaatatcatcccttaccacaaaatcttccttcagcttaatctctcccactctaggttcccacgctgccccaatccggcttgaagcagcccggagaaacatcgcccattctctctccataccacccccaaaaattttcgctgccccaacacttcaacactattttgttttatttttcttattaatataagaaggcaggaatgtcaggtctctgagcccaagccaagccatcgcatcccctgtgacttgcacgtatacgcccagatggcctgaagtaactgaagaatcacaaaa

SEQ ID NO: 940182 - DNA, 604 bp, Homo sapiens
aggctagatgcccaaaccaccacctcacattccccactagggtggtgtcaaagggatgacagtagggaactggtactttcaccctcaccaggaagtagtaagcctcttccctttcataagcatctggcatttcccctgcttgcactcaactctgtcctgccaccctgtgaagaaggtgcctgcttctcctttgccttctgccatgattgtaagtttcctgagggttccccagccatgtggaactgtgagtgaagtaaacctctttcctttataaattacccagtcttgcatatttcttcatagcagtgggagaatgstctaatacaccagacaatcaacagatgtcaacactgagctaatagaaatgttagaattatctgaaaaaaggttttaaagcagccattataaaaattattgcttcaaatggaataataaatagcaataaaaagcaaataaaagaaagtaaagaagtaggagatataaataaaaaccaatgtgaattttagaactaaaacaacagaagaaccaaattttaaaactcagtggaagagctcagcagcagaatagagaagacagaagaaataatcagtgaacttgaagatac

SEQ ID NO: 940183 - DNA, 640 bp, Homo sapiens; identical to SEQ ID NO: 938456

SEQ ID NO: 940184 - DNA, 636 bp, Homo sapiens
ccagactgagtgttgcaagagagcaaagcaaaagtggcaaagtcctagccttagaagtctgcaccatcgggccaggcatggcagttaatgcctgtaatcccagcactttgggaggccaaggtaggtggatcacatgaggttaggagttcgagaccagcctggccaatatggtgaaacctcatgtctaataaaaatacaaaaattagccaggcgtggtggtgcatgcctgcagtcccagctactcaggaaactaaggcaggataattgtttgaacctcagaggcagaggttgcagtgagccgagatcaccacactgcactccagactgggcaacagagcaagactccttctcaaaaaaaaaaaagaaagaagtcagcaccatcactyatcactctcaccatactctgttggtcacacaaaccaacccagatgtagtatgggaagggagtataccaggaggtgaggaccacaagggccaccttgaagactggctaccatagtccaccctctgacccctaataattcacatccttcctacatgcaaaatacactcgctccctctaaagtgtcccaaaagtttcatctcatcacagcctccattcaaagtctagaatctcatcatttatatcaggtccag

SEQ ID NO: 940185 - DNA, 593 bp, Homo sapiens
catttcttctaggaaggagcttgacacagaggttgcccataacacttctcatatcctattggctagaactaagtcacatggataagcctggctgcaagggtatgtgggaaatatagtctttattctaggtggccatatattcagctagatgttctattaaaaaacgaaggagataagaatatgccaccacaaaatatgccattttaaaaaagacctacaatctcttttcaattttctttttttcaattttctttcaattgagaaccaagagatccaggaagaattctctgtcctcctcttatctgcctaaaagcaggggataaatttccctatgagaagtacctcgtctgaaccaggagtagtaactcatcaccgaaggcagagagtggatamtgagatgagtttgcataaacaggccttactaataaaaactaacagctattagttttcctgtaactctcctagtcccttccccacaatttattgtcccttacaacccaaccccaaataggaagagaggaagtgaaactatccctgtttgcagatgatatgattctatatctagaaaaccccctagtcctggcccaaaagct

SEQ ID NO: 940186 - DNA, 409 bp, Homo sapiens
gagactttgggggcaaataataagtattagcaaaattatccagacacttcttttcatgaagaaacacaaaggctctagcatgctaaaatccaaactcctgattattaaagcagttgaattctactttgctattgcaaagaagaaaggataaaaatatcagttctcattacctctgcccatattttgccccatttctcctttcagctcttgtctgaaggtttgtggtcccagcaagctcrgttgtttcatgctgaccactttgtttatttatgttacctctactctgcatctctggtctcatcttctttgatgcatcataaatactaatgagctagtttgcctttcttactgacaataatgaagaggagtaagtagttgggtggttttcctgtccctaaatgtatcctcc

SEQ ID NO: 940187 - DNA, 409 bp, Homo sapiens
gagactttgggggcaaataataagtattagcaaaattatccagacacttcttttcatgaagaaacacaaaggctctagcatgctaaaatccaaactcctgattattaaagcagttgaattctactttgctattgcaaagaagaaaggataaaaatatcagttctcattacctctgcccatattttgccccatttctcctttcagctcttgtctgaaggtttgtggtcccagcaagctcagttgtttcatgctgaccactttgtttatttatrttacctctactctgcatctctggtctcatcttctttgatgcatcataaatactaatgagctagtttgcctttcttactgacaataatgaagaggagtaagtagttgggtggttttcctgtccctaaatgtatcctcc

SEQ ID NO: 940188 - DNA, 589 bp, Homo sapiens
gaaaaggaggcagcaatctagcaggaaaaaaaaaaagaaaaagaaaatcaagagatgtattacaaagaatcactaagcaaacacataataaaaaccaaaacaagtagatccaaacatgggagcttgaaaaacagaaaacaaggccaaaagaaaagactggaacaaagaactatccttcaatgcaaatatacagatgcacatccacaagaaacaacagcaaacagggagccaaggcctcctctaacagcaaagtgaggaaccaactgtccctagcaagacarcaatttgggaaccctccaaccaagaattcaaaaatagccattttaagtgaattcagtgatcaccaagataacacagaaaagcaattcagaaacagattggagaaatttaacaaagagattgaaatagtataagaaatcaaatattggaactcagaaatacatttgctgaactgaaaaagtcattagaggctctcaacagcagaaaggatcacacagaggaaagaatcagtgaactcaagaggctatttgaagatacacaattaaaggagaaaaaagaccagcgctgccaagtataaaaagcaaatgtt

SEQ ID NO: 940189 - DNA, 804 bp, Homo sapiens
cagtcaacattatgaagtcatcacagccaactggaaggttgatatcattcctattttacagatgtggagactaaggcttgcccacagtcacagattaaataagtggtagagccaagacttcaacccagatctgtctgatccccaaacctgagagttttctattctatgaagctgcctgaggaaggtggctctttcacattatcctcacacaaaaggagagcccaggtgtaggcacagactcatggtggtctcagkactcatctggtaccctggttgtagaaagtatcaaggtattcagattcagtggtggtggggagagtatggcttcacaaacactgtgcctttagcccattgacttttattgccagtatgttcttttccagattgggtgaatcatccttggttggcgggtagacctctcttaatttttttagctgcccctgaattcttgacaacgttgagtcattccttggcaggacattgccaatgttgtggcaattgggacaattggtgtgagccgaatggcttagttatctaacctataggttttctttaaacacagcacagagtttaactctgttctagggagtgtttgaaagagcggtggcagttctttaatccttgcagaatgctttcaaaatctcaagggtgggtggaggtaggtggaagacagagggggtatatttgtaaactgtaaaggatgtcttttaacaatccaagctgggctgtttgtgcttgaaataagactcaggcaggcacacaaatacacaaacaccctgtgatgaaaaacctcagtctttattg

SEQ ID NO: 940190 - DNA, 804 bp, Homo sapiens
cagtcaacattatgaagtcatcacagccaactggaaggttgatatcattcctattttacagatgtggagactaaggcttgcccacagtcacagattaaataagtggtagagccaagacttcaacccagatctgtctgatccccaaacctgagagttttctattctatgaagctgcctgaggaaggtggctctttcacattatcctcacacaaaaggagagcccaggtgtaggcacagactcatggtggtctcaggactcatctggtaccctggttgtakaaagtatcaaggtattcagattcagtggtggtggggagagtatggcttcacaaacactgtgcctttagcccattgacttttattgccagtatgttcttttccagattgggtgaatcatccttggttggcgggtagacctctcttaatttttttagctgcccctgaattcttgacaacgttgagtcattccttggcaggacattgccaatgttgtggcaattgggacaattggtgtgagccgaatggcttagttatctaacctataggttttctttaaacacagcacagagtttaactctgttctagggagtgtttgaaagagcggtggcagttctttaatccttgcagaatgctttcaaaatctcaagggtgggtggaggtaggtggaagacagagggggtatatttgtaaactgtaaaggatgtcttttaacaatccaagctgggctgtttgtgcttgaaataagactcaggcaggcacacaaatacacaaacaccctgtgatgaaaaacctcagtctttattg

SEQ ID NO: 940191 - DNA, 804 bp, Homo sapiens
cagtcaacattatgaagtcatcacagccaactggaaggttgatatcattcctattttacagatgtggagactaaggcttgcccacagtcacagattaaataagtggtagagccaagacttcaacccagatctgtctgatccccaaacctgagagttttctattctatgaagctgcctgaggaaggtggctctttcacattatcctcacacaaaaggagagcccaggtgtaggcacagactcatggtggtctcaggactcatctggtaccctggttgtagaaagtakcaaggtattcagattcagtggtggtggggagagtatggcttcacaaacactgtgcctttagcccattgacttttattgccagtatgttcttttccagattgggtgaatcatccttggttggcgggtagacctctcttaatttttttagctgcccctgaattcttgacaacgttgagtcattccttggcaggacattgccaatgttgtggcaattgggacaattggtgtgagccgaatggcttagttatctaacctataggttttctttaaacacagcacagagtttaactctgttctagggagtgtttgaaagagcggtggcagttctttaatccttgcagaatgctttcaaaatctcaagggtgggtggaggtaggtggaagacagagggggtatatttgtaaactgtaaaggatgtcttttaacaatccaagctgggctgtttgtgcttgaaataagactcaggcaggcacacaaatacacaaacaccctgtgatgaaaaacctcagtctttattg

SEQ ID NO: 940192 - DNA, 804 bp, Homo sapiens
cagtcaacattatgaagtcatcacagccaactggaaggttgatatcattcctattttacagatgtggagactaaggcttgcccacagtcacagattaaataagtggtagagccaagacttcaacccagatctgtctgatccccaaacctgagagttttctattctatgaagctgcctgaggaaggtggctctttcacattatcctcacacaaaaggagagcccaggtgtaggcacagactcatggtggtctcaggactcatctggtaccctggttgtagaaagtatcaaggtattcagattcagtggtggtggggagagtatggcttcacaaacactgtgcctttagcccattgacttttattgccagtatgttcttttccagattgggtgaatcatccttggttggcgggtagacctctcttaatttttttagctgcccctgaattcttgacaacgttgagtcattccttggcaggacattgccaatgktgtggcaattgggacaattggtgtgagccgaatggcttagttatctaacctataggttttctttaaacacagcacagagtttaactctgttctagggagtgtttgaaagagcggtggcagttctttaatccttgcagaatgctttcaaaatctcaagggtgggtggaggtaggtggaagacagagggggtatatttgtaaactgtaaaggatgtcttttaacaatccaagctgggctgtttgtgcttgaaataagactcaggcaggcacacaaatacacaaacaccctgtgatgaaaaacctcagtctttattg

SEQ ID NO: 940193 - DNA, 553 bp, Homo sapiens
gaaaaaccaaaaacaacaaaaagaagaggagaaaggaaaactaggtttaccacattgggtccaaccaacttggaaatctgaccctttctctttgccctggaaagttgggggagacataaccagggagggaaatggaagcagagcttggtggaagtggggattgccaacacgtagcccgcaggctgacagaggctctccccgtctcttcctaaaccctcagtccatcttctcttcttctcagtcttcccctcccacctccaacctcgtcacaggaagaatgaagcaggccccgccttccggtcctgcccctagcgcttctcccttggccccagtgcccttgtccatccaatgacaaaggatgcaacaacatggtctgccctaaaaggacyggaccctctcaaaccccatgatccagtgacaactgcagagggttttacatatatgtcaagaggaggagacatcccataaggaagcttccagaaggcagtgcgtgagaggcaccatcattcactctgattattcaggacctttcttggcagccacgaatcccatc

SEQ ID NO: 940194 - DNA, 858 bp, Homo sapiens
ccctccctgactctgtttccccatcactaatagaaaattagagatactagtgtctcaagttttctccaattccaaaatactccaaatactgtttataattcactttaattctcctctttgaatagtctaatatatatgtgcctataggttaattaaatccactctgcaagactgaggagctcataattaaagtatcctaatcagatcacacacaccagaggctgctggttggttgaaggactccaatctgaagtccacacccagaagcagctactacaagccttcagctattttcgtggttgctaaaaatgtttctttgctgaaatgagtggtgctcaggataaatggagtggctggaaatactgttccagcacttccaccctcacatgaacaggatgtaagagtctgggtaagcccagcaggccataccattcacagttgtatcctaggctcaggacaaaatgcagtgcagggtccacagaaggctggaagattctgttgcctgatccactagggtagctaaatcctgcccygtgtattttcttgcacttaccttaagccagatgttttttgggcagaatacctaaatgccagagagctggggcccagaggataaactgtaagactgttttggggcctgcttgctaacagatttttggagtacagctaaatttggtctgagacttgttctcatttgaacatcaattggggatgaaattctgcggaggggacctgtgccccgcttctgtatcttgccattggaggtcactgggttcatcgaaagcacctttggtatggttatccacttccactatttctctccatctggaattccttatttttccccacttttccata

SEQ ID NO: 940195 - DNA, 580 bp, Homo sapiens
aaaacagtctgtcggtttcccaaatgatgaaacatagattaccacatgacccaacaatttcgctcttaggtgtgtgtgtatgtatatgcatgtgtgtgtatctcacacccaagaaaaatgaaagcatatgtccattcaaaaacttgtacatgaatggttacagcagcgtagcagcattattcataatagctaaaaagtggaaacaacccgaatttccatcagtggtggaatggataaacaagagttgttatagccatacaacagaatattattaagccatgaaragcaatgaaatactgatacaggcttcaacttggattgaaccttgaaaacattatgccaagtcaaagaagtctgtcacaagagtctacatagcatatgattccattcaaaagaaagttcagaatagggaaatctgtaggaacagaaagtagattagtagttgttttagggatgaggatgaggagaggaggatgtaaagatgaaggggtgatcaataaaaggtacaaggttttttattgagatgatgaaaatgttctgaaatgaactgtgatgatggtggcccatgtccgtgaatata

SEQ ID NO: 940196 - DNA, 592 bp, Homo sapiens
aaaacagtctgtcggtttcccaaatgatgaaacatagattaccacatgacccaacaatttcgctcttaggtgtgtgtgtatgtatatgcatgtgtgtgtatctcacacccaagaaaaatgaaagcatatgtccattcaaaaacttgtacatgaatggttacagcagcgtagcagcattattcataatagctaaaaagtggaaacaacccgaatttccatcagtggtggaatggataaacaagagttgttatagccatacaacagaatattattaagccatgaaaagcaatgaaatactratacaggcttcaacttggattgaaccttgaaaacattatgccaagtcaaagaagtctgtcacaagagtctacatagcatatgattccattcaaaagaaagttcagaatagggaaatctgtaggaacagaaagtagattagtagttgttttagggatgaggatgaggagaggaggatgtaaagatgaaggggtgatcaataaaaggtacaaggttttttattgagatgatgaaaatgttctgaaatgaactgtgatgatggtggcccatgtccgtgaatataccaaaagccatc

SEQ ID NO: 940197 - DNA, 672 bp, Homo sapiens
aaatgggccaaaacaaaggggctacatgacccatgcaagtctgaaatccagcagggcaaattttaaagcttcaaaatgatctcctttgactccatgtttcacatccaggagtcaatggaactccatttacatccatgctgatgtaagaggtggttcctatgttcttgggcagctccaccactgtggctttgcagggtacagcctcccttctggctgctttcatgggctggcattgagtgtctgcagctyttccaggtgcacagtgcaagctgtcagtggatctaccattctagggtctggaggatggtggcccttttctcagagctccactaggtggtgccccagcagggactgtgtgggggctctgaccccagagcactgccctagcagaagttcaccatgagagtgcatgcctagtggtaaacttctgcctggacattcaggcgtttctatacatcctctaaaatctgaaatctaggtggaggttcccaaacctcaatttttttttttttttttgagatggagtctcactctgtcacccaggcccaggctggagtgcaatggcgctatctcagctcactgcaacctccgcctcccaggttcaagtgattatcctgcctcagcctccagagtagctgggattacaggcacgtgccaccacacctggctaat

SEQ ID NO: 940198 - DNA, 579 bp, Homo sapiens
gcgtttgccaccacgcccagctaatttttgtatttttagtagagacagggtttcaccatgttggccagtctggtctcgaactcctgacctcgtgatctgcccacctcggcctcccaaagtgctggaattacaggcatgagccactgtgccccgccatgaatgcacttctttagtgcccttactacctgtgcccggtcctgcacgcagggccactgcctattagaatagaaggcacggtgtctatgacccatcatacttataggagcccatgataatgttctagctttaatttattttaaagtcagaagaaaaagagaatacaacaatgatgaatatgtaataatgaatccagcctcgtctatcttcatgtctataccaaggcaatgtaagacttaattttaatatttgtatagagcattggtccatgaaagcaaatgtgcataygtcctagggaagtcacagtgggccctgcttccatggcctcccctaagtgtccagtgacatttctccttactgtggcattccttttccgagacaccaactatttcttccaaatttttgtcttccttggctttcttt

SEQ ID NO: 940199 - DNA, 587 bp, Homo sapiens
atagaaagggaatagccctgtaacagcagacttaaattgtaaaggaaaagtgaagttttttgtttttttttttcctaagagaatgcctatcagatagaatctcccttgctttttgatgaagtggggcttgctctgttactttgtagtrggagaatttctcagacattctgctgtagcaaaaaatttagaccttatcacctttcccaatcctacaccccctcatttcctcattatttttcttagtggcttagagtgcatggcccaaccttataagcacacccccagcataccctcatcatatcctgtttaccttcaatcttactcatttgaaaaatctataatccggattaaactcaactacttgtctactcatgcctgtacactagcagctaagaatgattgaagaaaatcacagaagcctcccgtgtgatcttgcttgatgtttataaccacaaatatccaatgagcgctccgtactgtgctgaccaaccagctactacacttacctaggcagtttcatcttcgattctcacagtgcctctttcacctgttttcctctatcctcaaatcttgggcatccctctcta

SEQ ID NO: 940200 - DNA, 616 bp, Homo sapiens
tactcaggaacccagcccagctctaggactcacccctgagcacaaaggcaatgttgggcacgctggaaaaggaccactagaatccagcagcctggacccctttctttgtggtcaagaaaggtgggaaaaggggtgcaggactgctacatcrgtgagcgtaacgaatccaataagcagaggtccatgggttgttatacgtcctggaaaggaataagcattaggaccacagaggacacctatgactaatgctcatcagaaaatgactaggggtgctggcatccctatgttctattttcagatgggaaacgttctccacaaggcaaaaacacccctaagatgtattctggagaattcagcccagtcagagtgcatgtacctttttccctctcagacttgaagcaaattaaaatagacctaggtaaattctcagatgaccctgatggctatattgatgttttacaagggttaggacaatactttgatctgacatggagagatgtaatgttactgctagatcagacactaaccccaaatgagagaagtgccaccgtaactgcagcccgagagtttggcgatctctgatatctcagttacagttaagtcaatgataggatga

SEQ ID NO: 940201 - DNA, 591 bp, Homo sapiens
aagatagcctgcgttgagttgaagtaaagtaaaaatattatgaatatgtgtaactaggtgacatcctctctgctgggaagaatcctttttttttttttttttttttttctggtgacaggttcttgctccatcacccaggctggagtgcagtggcatgatcttggctcactgcagcctctccctttcaggctcaagcaatcctcccacctcagcctcccgagtggagggggagccactgcagatctggagcaaatcagcaccagccactccagagcctgacctacataggactcagaaagcattgtctattgtgattgattattcctgtgttcagtcccaatggcctrttgattgggggtttctctccaaaaggctgcatggcttttcttctctaagtgaatctcctttataacccatattttatgtctatataccaaacatgctatccatatttagtcaatgtccagttgcttgcatgtaagggcaatagagtaatcagaaaactcttcccagaaagcccccgaagacaaaactagtactggtagaaaactgggcatgcagctctaagaaactctatgggaagtgaggctg

SEQ ID NO: 940202 - DNA, 547 bp, Homo sapiens
atttctaattctagatccttgaggaattgtcacactgtcttgcacaatggttgaactaatttacactcctaccaacagtgtaaaagcgttcctatttctccacatcctctccagcatctgttgtttcctgactttttaatgatcaccattctaactggcctgagatggtatctcattgtggtttgttgtactaaaaatacaaaaattagcatttctctaatgaccggtgatgatgagctttttttcatatgtttgtggtctgcctaaatgtcttcttttgagaagtgtaagttcatatgttttgcccactttttgatgaggttgttttttttcttgtaaatttgtttacaagaaayaaataacattgaatctataaattactttgggcagtatggccattttcacaatattgattcttcctatacatgagtatgaaatgtttttccatttctttgtgtcctatcttttatttccttgaggagtggtttgtagttctccttgaagaggtccttcacaacccttgtaagttggattcctagatatttta

SEQ ID NO: 940203 - DNA, 596 bp, Homo sapiens
gaaagaagatagcctgcgttgagttgaagtaaagtaaaaatattatgaatatgtgtaactaggtgacatcctctctgctgggaagaatcctttttttttttttttttttttttctggtgacaggttcttgctccatcacccaggctggagtgcagtggcatgatcttggctcactgcagcctctccctttcaggctcaagcaatcctcccacctcagcctcccgagtggagggggagccactgcagatctggagcaaatcagcaccagccactccagagcctgacctacataggactcagaaagcattgtctattgtgattgattattcctgtgttcagtcccaatggcctrttgattgggggtttctctccaaaaggctgcatggcttttcttctctaagtgaatctcctttataacccatattttatgtctatataccaaacatgctatccatatttagtcaatgtccagttgcttgcatgtaagggcaatagagtaatcagaaaactcttcccagaaagcccccgaagacaaaactagtactggtagaaaactgggcatgcagctctaagaaactctatgggaagtgaggctg

SEQ ID NO: 940204 - DNA, 628 bp, Homo sapiens
gggaatcatgggtaagttctctcttaaattttagagttccatggatttgtgttttgagctctctgagtttctttgaacaaatttctgttccaaactgggtttggaagtcacaacagaaactggactaggtccaggatcagatttgatccagtaattaactgtcttggatccagttagaggcctcttacatctgactgggtcagaagaaactggtagtaaatgataatattgcaggggttgtaaaatttggcttttgaaaattcacagggatttttgtgtyctaccccttcatttcacttttcttgtgcacttaggtaggaaaaaaaaaatcattggctaagttaaccaagggaacctgagagcaaagccaatactttaggtaaaaatgggatcctgaattgctgaaaaactgagttccctttgacttatacattagacccagggaggagcaaagtcttacagaaatggcaaaatcttactaaagataacttacagtggaacgttctggataaacaacacattgaagtgtatttaaaaatgagggctccccaaaattaaatctgctaaccttttatcttagttactatcctgatccaaagaaatagacggcagcaccaattggctgact

SEQ ID NO: 940205 - DNA, 664 bp, Homo sapiens
gtaggtaatgctgggttagcaacaatgctgattcatgctggaatctcctagactctcccttgactaacttttcaaaatttatgccatatgattaaaccgcttttcttatttggttgctaccaaaaatttggctggttttgacttcagagttcattcccttaagcactgctctcctctgacatctttactcagaaatacttttattgtgctgggcrtggtggctcatgcctgtaatcccagcacattgggaggccaaggtgggaaaattgcttgagcctaggagtttgagaacagcctgggcaacatagggacacctcatctctacaaacatatatattttttaaattagccgggaatggtggcatgcacctgtggtcccagatactcgggatgctaaggtgggaggatcactacagcctggggggtcgaggctgcagtgagccatgatcacaccactgcacactagcctaagcaaacagtgagaccctatctcaaaaacaaacaaacaataaaaccttttattggcatagtcgcatgcatactttcatatataaacatttaagcaagaatttgtgtccatagagacaaatctgaaaggatgtttatgaaaatgtaaacgtttccaagggcaggcagaatggcagcgttgtcatgagttgttaca

SEQ ID NO: 940206 - DNA, 664 bp, Homo sapiens
gtaggtaatgctgggttagcaacaatgctgattcatgctggaatctcctagactctcccttgactaacttttcaaaatttatgccatatgattaaaccgcttttcttatttggttgctaccaaaaatttggctggttttgacttcagagttcattcccttaagcactgctctcctctgacatctttactcagaaatacttttattgtgctgggcgtggtggctcatgcctgtaatcccagcacaytgggaggccaaggtgggaaaattgcttgagcctaggagtttgagaacagcctgggcaacatagggacacctcatctctacaaacatatatattttttaaattagccgggaatggtggcatgcacctgtggtcccagatactcgggatgctaaggtgggaggatcactacagcctggggggtcgaggctgcagtgagccatgatcacaccactgcacactagcctaagcaaacagtgagaccctatctcaaaaacaaacaaacaataaaaccttttattggcatagtcgcatgcatactttcatatataaacatttaagcaagaatttgtgtccatagagacaaatctgaaaggatgtttatgaaaatgtaaacgtttccaagggcaggcagaatggcagcgttgtcatgagttgttaca

SEQ ID NO: 940207 - DNA, 548 bp, Homo sapiens
aacatcaattgaatgagtggatgaattcacgaatgaacaaatgaatgacattcaaaagccctgaccatggcacacaagggccagcatgacagaatcaccaccttgttctccagcctcacctcccatgtctctctactttgcttttgcacctccgtgaaattggctttcttttagttcattgaacacatcctgcttcttcctgctccaaggccatgrcacttgttttctcccctgctggaagactctcccttcctctccttttgcctagataattcccactcatccttgggagctcaggttaaacatcacttattagagaaaccttccctggctcccaggagagatgcaggtctagtccactggtgcatgcttccatggctttctgacttcttagctcttgtttcccttctaaagactgcctggccagggtagctcacacctgaaattgcagcactttgggaggccgaggtgggcagatcacgaggtcaggagtttgagaccagcctagccaacatggtgaaacgccatctctactaaaaatacaaaaa

SEQ ID NO: 940208 - DNA, 606 bp, Homo sapiens
caagtagtcaagagctagtctattttgatagatagcatttttcatcagagtctcttgccaggcaagaacagtcaaggcttgaccggttttattagtggtgatttttaaaacagcttgcaactgtatgattcagttgagtatgtaaatgggggtccggtatccccatgagccrtcttgtgtctaagtggcaggattatagtattgtatgattctttcagggggccattcattatttttttaatcacctatggctatgcttcattttttgcaggaagcatagactgagaagcttagaagttcacctgtttttatgggcagtaagaagaaagatggcttgatggtgccaattacccagctacctgtccactgatcagggagcttaacataagctctgtgtccacatatccagtataacctggtgggtactgtccagtcccagtggaattctgggtgggcccaaacagtctgcaactttggaaatttacttctgtgtaattggaacttcaccatgtaactttttgtagtaccattatacagcttttgctcaagacaactaagccgcgctacaggatgagtgaatctttttccttttctagctatgcaata

SEQ ID NO: 940209 - DNA, 645 bp, Homo sapiens
aaaatccacattcttatgcctccttataatctttttaccaaaggtatattttacttttttatacactttgcacataaactgtttcttcaatagtactcaggaggccttattacttttaaattatacaacattctttgcataaaaatttttataacattttttctttcacgactttccctgacaattcttcaacatgtcttaactttctgacttattacaaacttttttttctctttaaaccaccagytaatttatttcaggacaagaatttaccatataacagtctttttacataaatttttcctccccctctttttttttgtttgaagataaccattcctttttttaaagagaactttctttatatctttggactagactgtttaaggccacaagattagaagttaccataatacatgttacactgttaacttttagcaatcttcacttttgttgaaaaccttgtaagtttgagatgtcaattatcctttgctattaataagaccttgtttagtctaaactaacttagaattggtatagatggcctctttttctctctgctggtctttccttgcctctgccagccacttatgctgctgttctcttaactactgtagtgggaggaaagggggtctaaaaccagct

SEQ ID NO: 940210 - DNA, 586 bp, Homo sapiens
acccaggttaccttgtgccgtacctttgaaacaagggacctgtccaggcatccttctgatggccaacccacctctaatgctagccagtctatttcacacaaagttctaagttttcctggtgtcatagtaacaccgtaatctcccttaaattctttcttgaaatttttttttaacatagttctcagtggggtgggcttactttgcacctgacccatgtttttttgagataaaacaccatgctcacacaacacacacaccacaaacaaagaagaggaaagagggcacacacacacttttgcaatttacacaaaaccaaaatcaaaaccaaaatcagagaaatccaacaaatccaagccagatcaaaaacctaaaccaaagtatccagcaattcaagtcaagtcaaaaccagaacaaagatgccaatacaggcaaaccgtgggtgatsaggccacgcttccactcagatggagtggggcaagttcaaaagactagtcttaccaagtcaagccaagtcaaaaccagaacaaagatgccagtacaggcacactgcgggtgatcaggccatgcttccactcaggtggagtgg

SEQ ID NO: 940211 - DNA, 575 bp, Homo sapiens
aatatttttacatataaattatttatttaaaataaaataatacttaagaactattaactttctgtagcaactaatacaactattacatgtccatagtcatgaacacaattccacagattctaggtctctggcctatagatctggcattgtctccccttctattaatccaccaaaattacaagtgacatctttccaagtgtaaaaagactcaagtctacattcaagtttggatctttacttggtactagaattccacatgtccactaattctcatttttaaaaatacagtttctgccacatckcctcagcaaaaatgggatctcaccctcatcagagcaccgcaattagctctggattattcctcagtaagaaaggtggaaagctggtgagacacaagagaaggttcctaggaaagtattataatgagttaaagtaatcctgaagaaagtttgaggctggtggctcaagcctgtaatcccagcactttgggaggctgaggtgggtggaacgcttgagctcaggagtccgagaccagcctgggcaacatggcaaaaccccttgtctacaaaaaaaac

SEQ ID NO: 940212 - DNA, 607 bp, Homo sapiens
gtagaggagattcaggcttcaagtggtttcatgacttctaatcttaggaaaggtccttcatttctgttgtaataacaacaacaactagcatttattgaacttctataatgtgtcagatgcccttctaagcacttcacatgcactgacttaacttattcgatgcctgtaaaagtacttagatgggcagtagwggggaggggagggcaacaaaaaacgatgtcactagggtgttgctgtagattggatgtttgtaaccccccaaaattcctatgttgaaacctaatgtgatgatgtttgcagtggagaatttggaagatgattagggcatgaaggtggagccctcatgaatgggattagtgttcttataaaaaagatcccaggccaggcacggtgcctcatgcctgaaatcatagcactttgggaggctgaggcagccagatcataaggtcatgagttcgagaccagcctgaccaacatggtgaaacccagtctctactaaaaatacaaaaattagccaggcgtggtggtgtgcgcctgtaatcccagccactcaggaggctgaggcagaagaatcgtttgaacccaggaggcagaggttgcagtaagc

SEQ ID NO: 940213 - DNA, 583 bp, Homo sapiens
aaggaaatatcttcccataaaaactggacagaagcattctcagaaacttgtttatgctgtatctactcaactaacaaagttgaacctttcttttgatagagcagttttgaaatgctctttttgtggaatctgcaagtggatatttggctagttttgaggatttcgttggaagcgggaattcatacaaattgcagactgcagcgttmtgagaaacatctttgtgatgtttgtattcaggacacagagttgaacattccctatcatagagcaggttggaatcactccttttgtagtatctggaagtggacatttggagcgctttcaggcctatgttgaaaaaggaaatatcttcccataacaactagacacaagcattctcagaaacttgtttgtgatgtgtgccctctactgacagagttgaacctttcttttcatagagcagttttgaaacactctttttgtagaatctgcaagaggatatttgcatagctttgaggatttcgtgggaaacgggattgtcttcaggtaaaatctagacagaagcattctcagaaacttctttgggatgtttgcattcaagtca

SEQ ID NO: 940214 - DNA, 627 bp, Homo sapiens
cacaagcattctcagaaacttgtttgtgatgtgtgccctctactgacagagttgaacctttcttttcatagagcagttttgaaacactctttttgtagaatctgcaagaggatatttgcatagctttgaggatttcgtgggaaacgggattgtcttcaggtaaaatctagacagaagcattctcagaaacttctttgggatgtttgcattcaagtcacagagtagaacattccctttggtagagcaggtttcaaacactctttttgtagtatctggaagtggacatttggagcgctttcaggcctatgttggaaagggaaatatcttcccgtaacaactaggcagaagcattctcagaaacttatttgagatgtgtgtactcaactaagagaaytgaaccaccgttttgaaggagcagttttgaaacactctttttctggaatctgcaagagtatatttgcctagccttgaggatttcgttggaaacgggattgtcttcagatcaaatctagacagaagcattctcagaaacttctttgggatgtttgcattcaagtcacagagtagaacattccctttggtagagcaggtttgaaacactctttttttagtatatggaagtggaca

SEQ ID NO: 940215 - DNA, 666 bp, Homo sapiens
atagagcagttttgaaacactctttttgtagaatctgcaagaggatatttgcatagctttgaggatttcgtgggaaacgggattgtcttcaggtaaaatctagacagaagcattctcagaaacttctttgggatgtttgcattcaagtcacagagtagaacattccctttggtagagcaggtttcaaacactctttttgtagtatctggaagtggacatttggagcgctttcaggcctatgttggaaagggaaatatcttcccgtaacaactaggcagaagcattctcagaaacttatttgagatgtgtgtactcaactaagagaattgaaccaccrttttgaaggagcagttttgaaacactctttttctggaatctgcaagagtatatttgcctagccttgaggatttcgttggaaacgggattgtcttcagatcaaatctagacagaagcattctcagaaacttctttgggatgtttgcattcaagtcacagagtagaacattccctttggtagagcaggtttgaaacactctttttttagtatatggaagtggacatttggagcgctttcaggcctacgttggaaaaggaaatatcttcccataacaactagacagaagcattctcagaaactagtttctgatgtgtgtcctcaactaacac

SEQ ID NO: 940216 - DNA, 649 bp, Homo sapiens
caaaagaaggcattcaaatgtccaacagtcaacatcacttcaaaagaagacattcaatccgttaacagtcaacatcactaattatctgagaaatgcaaatcaaaaccacaatgagatatcatctcctaccccagttagagtgacaattatcaaaaagacaaaaaataacaaacgctggcaaggatgtggagaaaaactctcatatactgttgaggggaatgtgaatcagtactaccataatggaaaacagtatggttgtttttcccaaatctaaaaatagaactaccatatgattcagcaatcacactactgggtatttatccaaargaaaggaaatctttatatcaaagggacacctgcacccccatattttttacagcattattgatagtagccagtatcagggatcaacctaagtgtccatgaatagataaatggaaaaacaatatatggtttatatacatgatgaaattttattcagacataaaaattaatgaaatcctgtcatttgtaacaacatcaatggaagtggagataattatatttagttaaataagccaggcacagaaagacaaaaattgtatattctcacttgtggagtagagagtagcataatggttattagaggctggagagagaggaaaggttg

SEQ ID NO: 940217 - DNA, 572 bp, Homo sapiens
gttgttgttcccttgcatttcttgcctttatcctcattcggtcagtggtatgctgccaattcatacgtcccagtattatcccgtaatatttggaaaagttggtatcaactaagagtgcaggagtacaagtcttaactttggagtttgaaaagctgaaaccccaggaataaaatttcttaatttagaagaatatacagctaggcaatttttcttattcctggaaatagacaaagatttcttggattgagggatggaagatgatatcaatagttgaggaggaacaggagagttgaackatgtgtctttgagaacgggatcattactttatctccatgccagactgaaaaaccctggactggggatgaaatcagataaaaaaaaattctggtaattttgggaaatgtgaaaacagagaaattttgccctgtgctccctggatagaacccaagaaagcagcaaaatctcaggttgcttgccctgtggggattgtatttaatcattcacacactgatttgtctgttcaacaggtattttctttttcattgattgatggattgattgagaaagggtgt

SEQ ID NO: 940218 - DNA, 568 bp, Homo sapiens
aggcagcatggaagctggtctagaaaggtagaatcttattatatggctttaggtgatactattctctttgcctcagttccatatatgtaaaatgagataatggaaattgaagcccggtgtggtaagctacactggtgactcacatctattatttgatgtgttcagcactccacttttctgggaacaggcactaactcgctgttttagtcagggttctttcaagggacagaactaatagggtagatgtatatgaaggggagtgtattaaggagtattaactcacaggatcacaagctgaagtcccacaataggctgtctgcttggctgagacgcaaggaagccagtccgagtcccaaaacttcaaaagccgacagtggagccttcagtctgtggccagagatctgagaacacctggaaaaccacyggtgtaagcccaagagcccaaaagccaaagaacatagagtctgatatttgagggcaggaggcatccagcacaggagaaagatgaagtctggaagactcagcaagtctgctcttccatcttctcctgcctgctttattctagctg

SEQ ID NO: 940219 - DNA, 486 bp, Homo sapiens
tcggcaagcctcgcaatcacaggttaaagtgctctgggatcctaagtgaacttgaaagacagtctaggacacaaggactgcaattcttaggcaggtcctgatgctatgctgggcttagagccggtggactggggcagtagatgacacagtgagacaccagacaggacatttgggggagtgcttacgccactcccctctcaatcccaggtagtgaagcttgcagcaactaaagtaactcctttcttcttccacttgaggagaggagaaagaagggtaaagaggactttgtmttgcatcttagataccagctcagccacagtaggatagggcaccaggcagtggtgaggcccccatctcaggtcctagctcctggatgacatttctagagacaccctagaatagaagtgaacctgctgccttgaaagaaagaatccagccctggcaggattcatcacatgctgactaaagaccccttggaggccggac

SEQ ID NO: 940220 - DNA, 631 bp, Homo sapiens
ttaagcctagtctaatggtatgatctctaaagttatgagaaacctgtattgaagagtacttatcagaatcttttccatgacttttcttgaagaagaagcaaattttagactgtagctatctacttttgagcaagcaaattttgttattactgkggcatacaacaatttagagctaggtgtggtggctgacacctgtaatcccagcaactcaggatattgaggcaagaggatcgcataaggccaggagttcaagaccagcttgggtaacatagtgagacactttctctacaaaaaattaaaaaaaaaaaatcttagccaggcatggtggtgcatacctgtagtcccagctactcaggaggctaaggcaggaggatccttgagcccagtagttccaggctgctgtaaaccatgatcatgccactgcaccccagcttggatgataggtcaagaccccaactctaataataataaaaaaattataatcatcataattgataacatattccaagacacttcagaattttaggaatctcatacaattttggaacacatattaataacatattaataaaaatataactcaaagaaagttaaaaactttttcttatttgacaatgcttttcatatgatt

SEQ ID NO: 940221 - DNA, 740 bp, Homo sapiens
tcttacaaatggaaccccaaatgagttcaactaacaacttctaccgaggacccctggactgacctgctggcccttccactggcctaaagagttcccctctggaggacactacacctacagggccccttcttcgcccctatccagcagaaagtagctagagcagtcatcagccaaattcccatcagcaattggggtgtcctgtttagaggggggattgaaaggtgaagctggctgggcttctgggtcaggtggggactcagagaacttttctgtctagctaaaggattgtaaacgcaccaatcagcactctgtgtgtagctaaaagtttgtaaacgcaccaatcagcactctgtcaaaatggaccaatcagcactctgtaaaatggaccaatcagcactctgtaaaatggaccaatcagcactttgtaaagtggaccaatcagctctctgtaaaatggaccaatcagcaggatatgggtggagccaaataagggaataaaagcaggccaccccagccagcagcggcaacctgctcgggtctgcttccaygtcgtggaagttttgttctttcgctcttcgcaacaaatcttgctgctgctcactctttgggtccacactgcctttatgagctgtaacactcaccacaaaggtctacggctttactcctgaagtcagtgaaaccacgaacccaccgggaggaacgaacaactccggacgcgccacctttaagatctgtaacac

SEQ ID NO: 940222 - DNA, 723 bp, Homo sapiens
ggagtttgagaccaacctggccaacttggtgaaatcccatctctaatgaaaattagctgggcatgctggcatgtgcctgttagtcccactacttgggaggcagaggcaggagaatcgcttgaacctgggaggtggaggttgcagtgagctgagatcacgccagcgcactccagcctgggcaacagagtgagactccatctcaacaacaacaacaacaacaaaacagcaacaacaacaaaaaactggttagaatcaaggaattagaattttattatttattttattttatttatttattttttgagatggagtctctctgttaaaaaaagtaccttcttagcaaatttcaggcatagaatatagtgttattaactgtagtcaccataatttaccttagagctccagaacttattcctcctgcaaaactgaagctttgtaccctttgagcagcatcttcccattgccctctcctgcccctggcaaccaccattgtactctctgcttcaatgagttggactatttcagattccaygtataagtggaatcttgcagtgcatgtctttctgtagagtgacatctcttgagtttttactcttttttttttttgagatggagtcttgctctttttgcccaggctgtagtgcagtggcgccatgtcggctcactcaagcgattctcctgcctcagcgtcctgagtagctgatccggattacaggcgtgtgc

SEQ ID NO: 940223 - DNA, 723 bp, Homo sapiens
aatgtccttctccccctcgagcattttctggaattgctgctgtagacacaagtgtctccacaaagttaagggtacttcattgagctgcttatcaattttctctcagtcaaccctggccaaaatcaaatgtatccacatctatgagcatgtcactcattgggcccccttttgtcccatgggtgagccctttatgggaaaggcaccttccccttctttacagcatggacccctcagtcttgctgacagccttctgyttccccacgggccgccacagcagtgatcacttcatgtatgtggtgccctatgtatggggtgagaacagcagcttggggatgcagaacccaaaaggagatccctcatgtgggaggtgaaacattcaccatctggcccccaagtattcatgtcaaacatagcctgccgcatacccatctcaaagatggcttgcaccaaattggcacatgactaccatttgctcacagttttaggtatttcaccagcattgttccacacagtctatatggctgcccatagccactcagtcagggtgtggtcaccttgccctgttgctcaccacctgctcacttgcaactgctgactgatggagggatgagtcatgatggaggccagctcttccaactcagagacagaacaagagatactatctgctgccttgtcccacaaacgaagcatccaggcagtcaggagttcccctggatgctggtg

SEQ ID NO: 940224 - DNA, 706 bp, Homo sapiens
agcattgttccacacagtctatatggctgcccatagccactcagtcagggtgtggtcaccttgccctgttgctcaccacctgctcacttgcaactgctgactgatggagggatgagtcatgatggaggccagctcttccaactcagagacagaacaagagatactatctgctgccttgtcccacaaacgaagcatccaggcagtcaggagttcccctggatgctggtggcactgcttgcctaatttctgcaactcagttggggtacagggaatatatgaagtgtgttgcattayggtgggggggtccctgagcccgcccttggggccccatcggctgttcatgatctatcttctgacagaccattgggtaagcccacaacaggagttcctcctcctcaatagcagaccgagtgggggcctcagacagaaatggtggacccaggcctgcattcattgcagcctctaattctttttctgatcagtgtagctgggcctccaggcaccccacctgcacctggaggtccccattcacagcagcctctaactctttctgagctctgtagctgggcctccaggtgccccacctgagcctggaggtcccttacctgcactacatccctcagagacagggtgtgtacttcccattgcacagtcaaaaatgcccatccaactctgccagcaaaggtttgctccttcttgatgctct

SEQ ID NO: 940225 - DNA, 619 bp, Homo sapiens
cacctactacattgagcgatggtttggctgttgtcacattgtctctctaaaagtgataaactggcagtcagcaccagggagtggccgtttccttatggtccacacctgttgcattaaagtgttaattgaatgcaggtgccagggagaagcaaaaaggggcttccaacaaaatctcaggtattggactaatgagcctgggcatgtgcatcaagagacaaaatggtggagtattaccttcagggggcactccaccagaagasagaagaaagcttcagatgggtgtgcatacaacttcctaaccacactgtacatgctcacctccaagtgtaaggagagcactgtgcatgtgggcagcccaccctaagggaagaatcatgggaaaggggccagcctagaaagtcctaggatcagggctaaacactgcacttgaccttcacatgcctgcttgggtttcttccaagcatgttttcctttctttccttttctgaaggcttttaaataaacttccactcctgctctgaaacgtgcattggtctctccttctgccttatgcccgtcagttgaattctttctttcggaggaggcaagaattgaggttgctacagacctgtatggattc

SEQ ID NO: 940226 - DNA, 612 bp, Homo sapiens
ctggtggtgttacaggtagacagacacgcatggggcaagagagagctctcctccacctactacattgagcgatggtttggctgttgtcacattgtctctctaaaagtgataaactggcagtcagcaccagggagtggccgtttccttatggtccacacctgttgcattaaagtgttaattgaatgcaggtgccagggagaagcaaaaaggggcttccaacaaaatctcaggtattggactaatgagcctgggcatgtgcatcaagagacaaaatggtggagtattaccttcagggggcactccaccagaagagagaagaaagcttcagatgggtgtgcatacaacttcctaaccacactgtacatgctcacctccaagtgtaaggagrgcactgtgcatgtgggcagcccaccctaagggaagaatcatgggaaaggggccagcctagaaagtcctaggatcagggctaaacactgcacttgaccttcacatgcctgcttgggtttcttccaagcatgttttcctttctttccttttctgaaggcttttaaataaacttccactcctgctctgaaacgtgcattggtctctccttctgccttatgcccgtca

SEQ ID NO: 940227 - DNA, 811 bp, Homo sapiens
attgaccacatgattggaagtaaagcactcctcagcaaatgaaaagaacaaaatcataacaaattgtctctcagaccacagtgcaatcaaattagaactcagaattaagaaactcactcaaaaccgcacaactacatggaaactgaacaacctgctcctgaatgactactgcataaataaggaaatgaaggcagaaataaagatgttctttgaaaccaatgagaacaaagacacaatgtgccagaatctctgggacacatttaaagcagtgtgtagasggaaatttatagcactaaatgcccacaagagaaagcagaaaaggtctaaaatcgacaccctgacatcacaattaaaagaactagagaaacaagagcaaacacattcaaatgctagtggaaggcaagaaataactaagatcagagcagaactgaagcagatagacatacaaaaaaaaccttcaaaaaaatcaatgaatccaggaggtggtttttttaaaagaccaacaaaatagatagaccactagcaggactaataaagaagaaaagagagaagaatcaaatagatgcaataaaaaatgataaaggggatatcaccacccaatcccacagaaatacaaactaccatcagagaaaactataaacacctctacgcaaataaactagaaaatctagaagaaatatataaattcctggacacatacaccctcccaagactaaaccaggaagaagctgaatctctgaatagaccaataacagtttctgaaattgaggcaataattaataacctaccaaccagaaaaagtccaggacca

SEQ ID NO: 940228 - DNA, 811 bp, Homo sapiens
attgaccacatgattggaagtaaagcactcctcagcaaatgaaaagaacaaaatcataacaaattgtctctcagaccacagtgcaatcaaattagaactcagaattaagaaactcactcaaaaccgcacaactacatggaaactgaacaacctgctcctgaatgactactgcataaataaggaaatgaaggcagaaataaagatgttctttgaaaccaatgagaacaaagacacaatgtgccagaatctctgggacacatttaaagcagtgtgtagagggaaatttatagcactaaatgcccacaagagaaagcagaaaaggtctaaaatcgacaccctgacatcacaattaaaagaactagagaaacaagagcaaacacattcaaatgctagtggaaggcaagaaataactaagatcagagcagaactgaagcagatagacatacaaaaaaaaccttcaaaaaaatcaatgaatcyaggaggtggtttttttaaaagaccaacaaaatagatagaccactagcaggactaataaagaagaaaagagagaagaatcaaatagatgcaataaaaaatgataaaggggatatcaccacccaatcccacagaaatacaaactaccatcagagaaaactataaacacctctacgcaaataaactagaaaatctagaagaaatatataaattcctggacacatacaccctcccaagactaaaccaggaagaagctgaatctctgaatagaccaataacagtttctgaaattgaggcaataattaataacctaccaaccagaaaaagtccaggacca

SEQ ID NO: 940229 - DNA, 646 bp, Homo sapiens
tccagaatacattaaaaaattacaactaaataaaaagacaaataccgaaataaaatatgggcaaagtatctgaataaacatttctccaaataacagatacaaaattaccaataagtacataaaactgtgttcaacattagtccttagggaaacataaatcaaaaccaaaatgagatgtcacttcacacccactaagatggctacaaccaaaaagacaatgctgtggtcttgaatgtttgtgtcccccagcccctgaatctatatgttgaaacctaattcccaatatgrtattaggaaatggggcatttagagataattaggtcatgaaagctctaccctaaggaatgggatgggtgcccttataaaagaagccccaagggagtttgtttgccccttctcacatgtaaggacacaacaagaaggtgccatctatgaaggagtgagtgagccctcaccagacaccaaatctgctggtgtcttgatcttggacttcccagcctccagaactatgagcaataaatctctattgtttataaattacccagtctaaggtagttagttatagcagctcaaacagactgactaagataattggctaggttgtggagaaactggaactctcatacatttttcgtgggaatgtgaa

SEQ ID NO: 940230 - DNA, 465 bp, Homo sapiens
aaaacagtttggcaattcctccaaatgtcaaacctagaattactataagaaccagcaattccacttccaataacatacccaagagcaatgaaagtgtatgttcacacaaagcttatatatgaaggttcatagccccattgttcataataatcagaaaatagaaacaacccatcaacttatgaggtataaccatacartgaagtattattcagaaatatcaagaaaaatactgataaattctgcaacgtagatgaatttgaaaggattatgctaagtaaaagaagccaaacaaacaaactacaacttgtatgatcccacttacatgaagtgtcaagaataggcaaatccatagagaaagaaagtagattaacagttgccatggggataggatgggggaagagtaaatggggaaagagtactaattagtaggtttctttttgggatagtaaaaatgttctggaacta

SEQ ID NO: 940231 - DNA, 559 bp, Homo sapiens
ccttccacatttttaggtatttgttacagcagcaccccactcccagcacaatttcttgcttagtctactcctgctgccatagcaaaatatgttagactggataatttataaataatagaaatgtatttctcacagttatggaggctggraagttcaagatcaaagtaccagcagacgtggtatctggtgaaagtttgctctctgctccacagacggtgcctgttgctgtgacctcatatggtggaagggcagaagagcaagaaggtacaaacagactccctcaagcccttttataagggcactaatcccattcatgaaggcagaaccctcatgacctaattacctcctaaaggccccactccttaatactattgcattgaggattaagtttcaacatgaatcttggagggacatgaacattccaagatagcaagatttatggcactgttctatctaaagcaggtattttataacctaaaaaaatcaaaaccatatacgatatccacatgcaaaagaatgaagttggacccctttccatacacaaaaattaactccaaat

SEQ ID NO: 940232 - DNA, 774 bp, Homo sapiens
taagatccagcatcttatatactaaatatatccaggttttaaccagaacccatttgacacactaagagccaggaagatacctaatcaaatgcaaaaagacaattaatagatgccaacaccgagaagacagagatgttagaaatacctgatgaagagttttaagcagttattgtaaaaatacttcaaagagtaattrcaaatgtgcttgaaacaaatgaaaatatagaaagttcaagcaagaaaattgaagatataaagaagagccaaatggaagttttagacatgaaaaacataatcactgaaaataaaaatctcaaaggatatattcaacagcaaaacagagggacagaggaaagattaattgaacttgcaggttgaaaagtagaaattacccaatttgaacaacagagagaaagtacactgaaaacaataaagagaacagtctcagtgcttgtgggattgtaacaaatgatctagtataaatgttctaggagtcccagaagaacagaagacaaaggacaggaatggaaaagtacttggaaaaataatggctgaaaccttcccaaattttgcaaaccacatacctacaaaaaagaaagacaggggtaactatctgaagtgaggaatatgttaattagtttaaggtgaatttatatatatacacacatatatattaaatcatcatgttatacaccttaaatgtatacagtctttgtcaaatatacttcaagttgaaaaattagtttaaaaaagacatacttatgtattcaagaa

SEQ ID NO: 940233 - DNA, 791 bp, Homo sapiens
gaggttgaataagacaacactctaccttctcatttaaattatcataccataagcaaccttgtgccatatttttcacacttttgtgcctttttttggtgcttttctgtttaaaatggtctccaagcataatgctgacatgcagtatagtgttcttaattgcagaaggctgcgatatgccttatggaaaatacatgcattagataatcaccttcttccaaacatgagttatagtgctgctggccttgacttcagtgttaatgaatcaataatatgtataaaataggtgtatctaaatggaaacatatataaaacgagcttatgtattgatcagttgagaaaaggtcctgactacaggtttgcagaaacctaattctgaacttcccctagcagcatggttcagtgtccactaattcattgttcactataacttcatayaacctaactactgcaaataatgagactttcttatgtagtatttctgtcatacagatagacatagataacttcaagatcatagaaaatggtaaaatatagtgaaattcttagaaagtgattagtttttaggttttacctttgtttttaaaatcattaacaatatgtttacagtatttgtttttttcataatggctgggctggctcataaaatttctgaaaatttaacagtttgctcttgtgaggctatatatgccatctcttgcacaccactaagtagaagcaactaggaagaacctattttgggggcacaaagcagattttaaggaaaaagaaacccatctgtgtgtaatattagg

SEQ ID NO: 940234 - DNA, 565 bp, Homo sapiens
tcctcctcagtagctgggattacaggtgtgtgccaccatgcccagctaatttttgcatttttagtagagacagggtttcaccatgttggtcaggctggtctcgaactcctgacctcatgtgatctgcccgctttggcctcccaaagtgctgggattacaggcgtgagccactgcacctggcctcgtggtggttttaatagacaaatttgtggttggtttagatgatatatgcacttctataatagagtgatttctttatgttactttgttgtactgtttggagaaaatattttaaaaatttttatttatatgttatttatttacttatttttagagacaaggtcttgctctgttacccaggttggagttcagtggcatgatcrtagctcactgcagcctcaaactcttgcctctgcttcccaagtagccagggctacaggtgcacactaccacctctggcctagtttaaaatttttttgtagatacaggctctccctgtcttgcccaggctagtctcaaactcttggcctcaagcagttcacctgctttggcctcccaaagtgct

SEQ ID NO: 940235 - DNA, 634 bp, Homo sapiens
tacatggctggtttcatgcccatctggagtggaggagcctgttaactattttcttgacttctcacaaagggaattcatccatgtattgttgaaccagtgccttcccggcggggaaggagggcctggggcttcctgttctgccatctcccttttgtaaatgctgccatgctgtatacttttttttttttaaaggataaacatttctgtttaaaggataaacattcaackttaactggaaatgaaaaggagacgatttttagtctgatacttataatgcaatattatttgcaattctgtataaatagatttcagaaacttcgatttcaaatcccaattaaattaaagagaggaaaattactgagaggaactgcagttccaaatttttcctttcagggcagtcaataaaattagctttttgtttaactaaaagtaagatttcaactatctaactatatcagaaaaacaaagtacctgtttgtgattttgggtagtcaagtcaaaattccttgcaaatcatccacatgcaccttcatctctttccattgcttttcttttttgtctcttttgctacatctattgaaactaggccaggtgcggtggctcacacctgtaatcccagcactttgggaggccg

SEQ ID NO: 940236 - DNA, 634 bp, Homo sapiens
tacatggctggtttcatgcccatctggagtggaggagcctgttaactattttcttgacttctcacaaagggaattcatccatgtattgttgaaccagtgccttcccggcggggaaggagggcctggggcttcctgttctgccatctcccttttgtaaatgctgccatgctgtatacttttttttttttaaaggataaacatttctgtttaaaggataaacattcaacgttaactggaaatgaaaaggagacgatttttagtctgatacttataatgcaatattatttgcaattctgtataaatagatttcagaaacttcgatttcaaatcccaattaarttaaagagaggaaaattactgagaggaactgcagttccaaatttttcctttcagggcagtcaataaaattagctttttgtttaactaaaagtaagatttcaactatctaactatatcagaaaaacaaagtacctgtttgtgattttgggtagtcaagtcaaaattccttgcaaatcatccacatgcaccttcatctctttccattgcttttcttttttgtctcttttgctacatctattgaaactaggccaggtgcggtggctcacacctgtaatcccagcactttgggaggccg

SEQ ID NO: 940237 - DNA, 596 bp, Homo sapiens
atgaatagaaaaaaagacaggagattaataaaaacattgaataacaacactatagagcatgtggttctaacagacatacacagcacactccactttgtaacagtataatacacatttttctcaagtgcacagggacattttccaagactcaccatatgctagactacaaaacaagtcttaataaatctaaaaatattgttattatacaaggcattacattgatcacagtagagtaaaastataaataaattgcagaacaaaaactagacaattcaagaatacatgaaattaaacaacccattccttataaaaacaatggaccaaacaagaaatcacaaggaaatttagaaaataccttgagacaaacaaaaataaaagcataacacaccaaaatatgtaggatacagtgaatggaaagccactgtgtggcagtaaactctgcaccaaagaagaagaaaggtctcaaatcaactacttaacttttagagaaagaacaacctaaattcaatgctagcagaaagaaggaaacaataaagattagagcagaaataaataaaatagggaattaaaaacaatacaaaacatcagtgaaacta

SEQ ID NO: 940238 - DNA, 464 bp, Homo sapiens
gagctaggggaggagcattgggatggagcagagagcctggatggcagaaatatttaggaggtagagtaggcggctcatttctaaattactaaatatagagtgagagataaagagtcaaggatggtcttggagttttaatgttggtgatcaagatgatggaggtgctgcagaggctacagaaagaagatgctggtttagaagamgaaagggcagtttgaactctgcactggttgaggttaaagtgtttgagtgaggacccgggtggtgccatctggctggaagttggatataaaactttgaagcataaaggaaaggtgtgagctaaaggtatatatttgcaagccatgagtacacaggcaggggttgaaatcacaaaagttgatgatgtaacacaaagaacatgtttagaaggacaagcagaatggtgaaaatgtttagaaggaattctagagaatacaatactg

SEQ ID NO: 940239 - DNA, 464 bp, Homo sapiens
gagctaggggaggagcattgggatggagcagagagcctggatggcagaaatatttaggaggtagagtaggcggctcatttctaaattactaaatatagagtgagagataaagagtcaaggatggtcttggagttttaatgttggtgatcaagatgatggaggtgctgcagaggctacagaaagaagatgctggtttagaagaagaaagggcagtttgaactctgcactggttgaggttaaagtgtttgagtgaggaccmgggtggtgccatctggctggaagttggatataaaactttgaagcataaaggaaaggtgtgagctaaaggtatatatttgcaagccatgagtacacaggcaggggttgaaatcacaaaagttgatgatgtaacacaaagaacatgtttagaaggacaagcagaatggtgaaaatgtttagaaggaattctagagaatacaatactg

SEQ ID NO: 940240 - DNA, 853 bp, Homo sapiens
gattctcctgttggatttttccaattgcaatgcatgagacgtgggtgatgctttttttttgtttttaatcagaaattttttttttagtgcagttttaggcttgcagcaaaattgagaaggtacaggcataactcttaattcaggtagacaaggaggtgaccgccacatgcacagccccacacatttacagccccctatatcaacatcccctccagtgtggtacattcgttacaattgatgagcctacattgacacatcatcactcaaagcccacagtttacattagacctcactcttgctgttatacattctataaattttgatgaatgtataatgagatgtggccatcattatagtatcatacagaggggtttcagttcccttcaatcctctgtgctccacccattatccctccctcccctctaatccctggcaccactgaactttttactgtcttcctagtttgccttttccagaatgtcatacaattggaatcatacagtgtgcatgaagaagccttttcagatttgcctctttcacttggtaatacrcatttaagcttcctccatatgttttcattacttgatagctcatttcttcttcagagctgagtaatattccattgtacgggcgtaccacagctttttcatccattcactccctgcaggacatcttgattgcttccaagctttggcaattatgagtgaaactgctgtacacatctgtgtgccattttctctatggacatgagttttcacctcctttgggtaaatgtcaaggagtgtgaatgatggctcctgtggtaagagtatgtttggttttgtaagaactgcccattgtcttccaaagtggg

SEQ ID NO: 940241 - DNA, 622 bp, Homo sapiens
ttctaagtttttatcattttagatcttaaatttgggtcttcaatccactttgagttaatttttgtatatgtataaggtaagggtccagcttcattcttttgcatacgagtatccagttttcccagcatcatttgcttaaaaaaaaatacaaaacaaaacaaaaactaaaacaactgtctttccccattgagtggtcttagcagcactcctgttgaaattcaccatgtatttgagtgtttatttctgggttctctcttctgtttaattggtctatatgtctatctttatgccaataacacataytttgattacggtagctttgttgtaagttttgaaatcaggcagcgtgagtcattcaaatttgttctttttcttcaagattgttttggattttgggggtctcttgagatttcatataacttttaggatgagttctctatttttgcaaaatatgtcattaggattttgatagggattgcactgaatttgtagattgcttttggtagtattaacattttaacaatattaagtctttcagtccaagaacacagatgtctttccatttatttatgtcttctttaattttcttctgaaaatattatgtacttttcagtgtataagg

SEQ ID NO: 940242 - DNA, 623 bp, Homo sapiens
caaagtcattttaaattgtttagattgtttgctttagtcaaacttcttaaactggattcagtacgtattacatgatattcttaaaatacgattttaggccatgttaattcacaatggtcctctagagcacccagaaagtggccactgaattccaaaagagatgtttgtgttggcgagtgacaaaaaccaaaaaataaaaaccactactataaagtgctaaatgaattggtcattaataataagaaagattattatttttctcagattatcccagatatctggagcagtctggagacattaggaaactatataacatgtaaccatcacgacagttgtctaacaatgcttataagcactaaacccatgcaaactacttstaaccttaactaatccaaatgtagaaatacttcaaggccatatcatactcaaccacatactttgccattgaaagtaatggcaaaaaccgcaattacttttgcaccagcctaatattaaagtctgtatactccctgtcaaaccaaagttctattctgttataccagcctcatttcaaaccagcacagggagtaaaagttaaacagaaagaacaatgtggttgtatatggttatttatggtttgtttt

SEQ ID NO: 940243 - DNA, 572 bp, Homo sapiens
tatacctgtagtcccagccacttgggaggtcaaggggggaggatcgcttgaactcaggggttcaaagctgcagtgagctatgattgcaccactgcattccagcttacgtgacagagtgagaccctgtctctaaaaaaataaataaatacaaataaaataaaatctaggctgggcacgatggcccacgcctgtaatcccagcactttgggaggctgaggtgggtggatcacaaggtcaggagttcgagatcagcctggccaatatgatgaaaccctgtctctactaaaaatacaaaaattagccgggcgtggtggcaggcacctgtagtcccagttactcaggagtctgaggcagragaattgcttgaaccccggaggtggaggttgcagtgagccgagatcacgcctctgcactccaacctgggtgacagaatgagacaaaacaaaaaacaaaaaaacaaaacaaaacaaaaatctagatgctttaattcctacttcaatattatttttcctacatttccaacaataaggaatatctagaatggattggtgatgcttgatgagtctctggtt

SEQ ID NO: 940244 - DNA, 638 bp, Homo sapiens
tttgcaaatatgaatcataaggcactcactcatttctgcccttgtctgctatcttcctttccacccctaagtgtttattttaacctagtttgatctgtgtcagtgcacatggaggcaaggatgaataaaaaatactgaggatgggccaggcacagtggctcatgcctgtaatcccagcactttgggaggccgaggtgggaggatcacgaggtcaggggttcgagaccagcctggccaatatggtgaaaccccaactctactaaaaatacaaaaattaactgggcgtggtggtgggcacctgtaatcccagctactcaggaggctgagccaggagaatygcttgaaaccggaaagcagaggtaacagtgagctgagatcatgccactgcattccagcctgggtgaaagagcaaaactccttctcgttgttgaactcttgtttctctgggtccatttttctcatgtggttcaacagagggactttttattaagaaccaggcgccccccaaccaaagaacctaaaagagggatataggaatctgcgatgattctcacattatgccagttcatgcttcacttagtcttctggttcactgtaattctctgccaggtttcaaggtgctctccttggctaaagcc

SEQ ID NO: 940245 - DNA, 603 bp, Homo sapiens
tgaacaccttcagatgcaagaggaaatttgggggggtgttggctatattcattatcttgagtgtggtaatgatttcataggagtatcaagcttatcaaattgtacacttcaaatatctacagttgattgtgtgtcaattgtgtcgagaaggaaaagaaactttttatctgaggaatacaagcctcaatgatcagaccctgagagacattgaaatgtgacagcagccacatctcactccctcttgatctacttgaagccacttgctatgtgggctgtagaatgactgacgccaagtagctgtaagttaacctaacaatgccacatgctgkactctataactcatattctatagttcaaccgtgtatagccaatcactaatcaatgttacttctgtaaaccattgagaattcctgaaaaacaacttttgtaatcacccccctcctgattcgccctttttactttaaaaactcaagcctctcctttgttttccggagcacttcccagtgcacaacctagtcccaaggttgaggactgcagccagtcctcatatataaaccctctatattaattttgcctcagttttcttatttagatcaacagcct

SEQ ID NO: 940246 - DNA, 578 bp, Homo sapiens
tgtcccaatcctaagtaacaatgcaggggctgcaaagacgacagtgaaggtgcttgggtctcattgttggtgtactagatattgtctttgtttctaaaaaaaaaacctccaagtctcagtttcttcattagtgagaagggggataataaaaccaccataccggattgttcatacaatatgcatagtaataaagctcttagcataatacctggcatataattagtgctcaagatttctttgcatcactgcttttttttttttttttttttttgagacagagtcctgctctgtcgcccaggctggcattcagtkgtgcaatcttggctaactgcaacctctacctctcaggttcaagcaattctcctgcctcagcctcccaagtagctgaagttataggcgcctccaccacgcccagctaatttttttgtatttttagtagagatggggttttgccatgttggccaggctggtttcaaactcctgacctcaagtgacctgcccacctcctattgctttaggccctttatttggctggccatagagaagacctgtggagatacatgggcattggtaatgtc

SEQ ID NO: 940247 - DNA, 578 bp, Homo sapiens
tgtcccaatcctaagtaacaatgcaggggctgcaaagacgacagtgaaggtgcttgggtctcattgttggtgtactagatattgtctttgtttctaaaaaaaaaacctccaagtctcagtttcttcattagtgagaagggggataataaaaccaccataccggattgttcatacaatatgcatagtaataaagctcttagcataatacctggcatataattagtgctcaagatttctttgcatcactgcttttttttttttttttttttttgagacagagtcctgctctgtcgcccaggctggcattcagttgtgcaatcttggctaactgcaacctcyacctctcaggttcaagcaattctcctgcctcagcctcccaagtagctgaagttataggcgcctccaccacgcccagctaatttttttgtatttttagtagagatggggttttgccatgttggccaggctggtttcaaactcctgacctcaagtgacctgcccacctcctattgctttaggccctttatttggctggccatagagaagacctgtggagatacatgggcattggtaatgtc

SEQ ID NO: 940248 - DNA, 565 bp, Homo sapiens
ctacagttttgacacctgctccagggatagtcattgccaaagggtagaaacaccagggggctcatcacattcgcaaaaactgagagcacagtgcctcccagttatacaggcatctgggcaatgtggggagaacagtagcaggtacataaggccacccccagatacaacatccactccagtttgctgataggaaaggctactgtgtcctcatagacccataagctcccaagaggcaaaaagtccattggggtccgaccttggtgaggccacttgttccaccataccttcagtgtggtgacacatgttatgtttgcacaggccgtgacaggtacccatcctgttaccccaatgttgctctgtgcactgcaatgcctgggcttgggctactacatgttcccctaytagccagccccactcatcacgaatgctacggtccagccatgggtcttgctgtgtcctttgtccaaagcttgccacattgtgttccaggcatcagccatgggatctcaagtctccaggcatgtccagttctctgcagacacgggatgtatgtgtcagggaaagc

SEQ ID NO: 940249 - DNA, 565 bp, Homo sapiens
ctacagttttgacacctgctccagggatagtcattgccaaagggtagaaacaccagggggctcatcacattcgcaaaaactgagagcacagtgcctcccagttatacaggcatctgggcaatgtggggagaacagtagcaggtacataaggccacccccagatacaacatccactccagtttgctgataggaaaggctactgtgtcctcatagacccataagctcccaagaggcaaaaagtccattggggtccgaccttggtgaggccacttgttccaccataccttcagtgtggtgacacatgttatgtttgcacaggccgtgacaggtacccatcctgttaccccaatgttgctctgtgcactgcaatgcctgggcttgggctactacatgttcccctactagccagccccactcatcacgaaygctacggtccagccatgggtcttgctgtgtcctttgtccaaagcttgccacattgtgttccaggcatcagccatgggatctcaagtctccaggcatgtccagttctctgcagacacgggatgtatgtgtcagggaaagc

SEQ ID NO: 940250 - DNA, 622 bp, Homo sapiens
cattgggtaaatatagctgttccacgtgggagaaattggccaaaacaaactggctacaggccccatgcaagtctgaaatctagcagtgtagtcaaaccgtaaagctccaaaatgatctcctttgactctatgtctcacatccaggtcaygctaatgccaaaggtgggttcccatggccttgggcagctccacctctgtggctttgcagggtatagcccccctactgctgctttcatagactggcattgagtgtctgtggcttttccaggcacattgtgcaagctgtcagtggatctcccattctggggtctggagaacggtggccctcttctcaaagctccactaggcaatacccaaatggggactctgtgtgggacccttgacttcacatttcctttctgcactgccctagcagaatttctccatgagtgccccacccctgcagcaaacttctgccttgacatccagccatttccatacatcttctgaaacctaggcggaggttcccaaatgacaattcttgacttctgtgtactcacaggcttaacaccacgtggaagctgccaaagcttcgggcttgcaccctctgaagcaatggcctgagctgtatgttggctgcttt

SEQ ID NO: 940251 - DNA, 476 bp, Homo sapiens
gttccttcccaaccatatgttctccctcccctcaaggagtaaccactaccctgacttttgtgataatttctttcttgttctttgtagtttaccacttacatgttcctagataatataattccattttgcctgtttcagagccagattaaaactggaarcacacaaaatgtatactcttttgtgcctggattttttttttttttcacaacattgtaagattcttttgtttgtttgcttgttttgagaccaagtctcgctcttgtcacccacgctggagggcagtggtgcgatctcggctcactgcaaactccaccccgctgggttcaagtgattctcctgcctcagcctcccaagtagctgggattacaggcgcgcactaccacgcctagctaatttttgtattttcagtagagatggggtttcatcatgttggccaggatggtctcgatctcgtcctcatgatccaccctcctcag

SEQ ID NO: 940252 - DNA, 566 bp, Homo sapiens
gaaatctcacttctggcgtctgcacctggaggggacaggccttgtgaagtgggcacaggaccaatcttgggggccctatttgaattaagggtttctaagaccagcaggtcttctctaatatcctcagagtcaatcaggagggcagggaagatgagctgcaaatgggggcccaggagcctaggtcccaagtcctaaataactgtgtaatggccgggtacggtggctcacgcctgtaatcccagcactttaggaggctgaggcgggcggatcacgaggtcagragatcgagaccatcctggctaacacggcgaaaccccatctctactaaaaatacaaaaaattcgctgggtgtggtggtgggcgccctgtagtcccagctactcaggaggctgaggcaggagaatggcgtgaatccgggaggcggagcttgcagtgaggcgagatcgcgccactgcactccagcctgggcaacagagcgagactctgtctcaaaaaacaaaaacaaaaaaacaaacaaacaaaactgtgtaataatatggcaggcggatatcttttttagattttca

SEQ ID NO: 940253 - DNA, 467 bp, Homo sapiens
cagaggcccagggcgcctggtgccacagcccacagagctcagcctcccgagaggcccagggacactagacggcgcatgtcctgagaaataatctgaccagaagtcctgtgctgagatttaaacgctagttttcctgaagccactgctgtccttcctcccattgtctacaytatcaaaaatagcagctagaagtcaaaaagaaaaagagatggacaaggaaattaaagttcagctcatagaccagtggcatccaaagtgtattctgaggtacactaggctcttttgttgccacatagtttgacaaaggctttatttcatatctcccagttggagctccgaaatgtgttttagcatattgaagactctgagatgtaattaagcctaactaattttcattcttttcttcaacttaattgaccatgaaaactttttccattcatataatatcatggagactttgtattctt

SEQ ID NO: 940254 - DNA, 684 bp, Homo sapiens
ttaagtctgttttaatttacaggcttcaactattttctttttttgtttctttccttgcaacctattcattggagaaactggaccaatgtcatagtgttttccatatagtctgtcttttgctgatttcatcttcctctgacccctgcatgtcctataaatttttaaatagatctagaggcttgatcagatttcaatttaagcttttttggtgagaatactccatagatgctgtgtacttccatcaggaggtacatacataatrtttgattgtctcctttcttgtgtgatattattaatagcagctatcaatgattcctacccatatccattaggaaatgcaaattgatgatagtcaaattatatcattcctttataatttatttagcaaaaatactctgtaaaaaaagctttctctttattcactatttggctgaaatatagattgcacaggaatgagactaagtgcttgattgttttcctttatttaccaatattcaaaataataaggtgtttccctaggatcctccgaatgtaaccaatgcatttttttttttttttttggccaatgaaactttaattgcattgaaataaattcatggatttttaatacatttgatggtttaaatacattgcagtgattattcttattgatgttcaaattattccatctttggctagtgggat

SEQ ID NO: 940255 - DNA, 749 bp, Homo sapiens
tggacaatatgatagcagcaggaggaagacagacttctgcatagaaaagggtgggtgcacagtgaagccccaccttcaagccagagatgacctaaagtatggggtctgggctgtcagttctggctggagtccatggcttggagtaagaacttatggtgctttttccaggcctgcctatggctgcccatggactaatcagcatgcacaatgcacttccttccttctgaagcccataaaggactctctctccattccgccccatccaccactcagccatactcacagagatgttgggacaacttgcctgcagatggcagctacccatgcttggtctctccgctgagggctgcaacctgcctgcggaaaggagctacccactttgggtctattgaaagctgtcctgtcactcaatgaagcttctctccaccttgtttaccctccagttgtccatgtacctcattcttcctggatgtgggacaagaactcaggacctgctgaatggcaggactgaaagggctataacacaaacagggctgaaacatgmcctgccactcaccatgttgtgagcgacgggaaggagaaaagagttgccgcccttagggaagcccagacctaggggctccccaagttagggctatgatgatactgtctttgaggctctgtggttcctggcatctccaagtttccaggcaccactgcattccccttgtccaggcatgggtgcccacaacagaagctgcatgtagtac

SEQ ID NO: 940256 - DNA, 726 bp, Homo sapiens
ggaatcagtttgtaggtgaccggccctttctctccagttgcctttaatattttttctttcatttcgaccatggaaaatctgacaattatgtcagattttcctgggggatgattttcttgtgtagaatcttgcaggagttctctgtatttcctgaatttgactgttggcctctgtagcaacgttgaggaagttttcatggatgatatcctgaaatatattttccaagttgtttgctttctccccctgcctttcagggatgccagtgattcatagatttggcctatttacataatcccatacctctcaggggttttgttctttcttttttttccttgtttttgtccgactgtcttatttcagagaaccgatcttcaagttyggagattctttccttagcttggtgtattctgctgtttgtagttgtgattgcattgcaaaattcttgtgttattaagctctgtcagacccattatgttcttttttgtaccaactattttgtccttcagctcctgtatcactttattgtgatgcttattttccttggattgggttttgccatcctcctgaatctcagtgatctttgttcctgtccatattctgaattctatttctgtcatttcagccagttcggcctggttaagaactcttggagaactggtttggtcattagtagaatatgtgacaccctggccatttgagtcactggagttcttgtattggttcttt

SEQ ID NO: 940257 - DNA, 697 bp, Homo sapiens
ggaatcagtttgtaggtgaccggccctttctctccagttgcctttaatattttttctttcatttcgaccatggaaaatctgacaattatgtcagattttcctgggggatgattttcttgtgtagaatcttgcaggagttctctgtatttcctgaatttgactgttggcctctgtagcaacgttgaggaagttttcatggatgatatcctgaaatatattttccaagttgtttgctttctccccctgcctttcagggatgccagtgattcatagatttggcctatttacataatcccatacctctcaggggttttgttctttcttttttttccttgtttttgtccgactgtcttatttcagagaaccgatcttcaagttyggagattctttccttagcttggtgtattctgctgtttgtagttgtgattgcattgcaaaattcttgtgttattaagctctgtcagacccattatgttcttttttgtaccaactattttgtccttcagctcctgtatcactttattgtgatgcttattttccttggattgggttttgccatcctcctgaatctcagtgatctttgttcctgtccatattctgaattctatttctgtcatttcagccagttcggcctggttaagaactcttggagaactggtttggtcattagtagaatatgtgacaccctggccatttg

SEQ ID NO: 940258 - DNA, 579 bp, Homo sapiens
tagtttccttggaagatcatgtgagtatattctacgtaggctcttctctatatctcactaatatataccatatatttttaacaaagtatatttctgcttccttccatgaaagtttgctacttggttatttgttttaccatctgctgtcactcatcaacagggagcttgcaccaaagccctagaaaaacttgtatttgaagagtgtaaaccagtaaatattttttctattagagaataccactcttccattttgctggtgctactctatagaaacatagtttgagaactactgagggttacaaagaaactaygagccattcaaagtgttagatgttactgagtagggtggattaacccctgtctccaagactgcttttgcctgttttgtgggaaagagctattttgtattttctgatgcactgaaatcactgtttgtggttcaggggattgatggatattagatgtgtgagccagcagtcttcctcctcaccctctttttccccttgagctatctaagcctgagcttgtggttgggagccttaggctctctcccacccaggagggaaatgctggtttgtt

SEQ ID NO: 940259 - DNA, 548 bp, Homo sapiens
atggacacttaggttgattccatgttttggttattgtgaatagtgctgcaataaacacagaaacgcagataactctttgatatattgatttcctatcttttaggcataactcaatagcggaattgctggatcatatggttagttctatttctagctttttgaggaatctccatctgttttccatagtatggctattctaattcacattcctaccaacactgtacaaggattcgcctttcttcatatcgtcaccagcatgtcattccttgtctttttgacaaaagtcattataactgggttgagactatagttttsatttgcatttctctcatgattagtgatgttgagtattttttcatgtacctgttggccatttgttccatcttttgagaaatgtgtttttaggtcttttcccattttaaaatcaaattattcgacattttgctatttagttgtttatatataactgtttatatattctggttattaatcccttataaaataaatatttccaaatattttctcccactttgtgggttgtctcttca

SEQ ID NO: 940260 - DNA, 624 bp, Homo sapiens
gggaatcatgggtaagttctctcttaaattttagagttccatggatttgtgttttgagctctctgagtttctttgaacaaatttctgttccaaactgggtttggaagtcacaacagaaactggactaggtccaggatcagatttgatccagtaattaactgtcttggatccagttagaggcctcttacatctgactgggtcagaagaaactggtagtaaatgataatattgcaggggttgtaaaatttggcttttgaaaattcacagggatttttgtgtyctaccccttcatttcacttttcttgtgcacttaggtaggaaaaaaaaaatcattggctaagttaaccaagggaacctgagagcaaagccaatactttaggtaaaaatgggatcctgaattgctgaaaaactgagttccctttgacttatacattagacccagggaggagcaaagtcttacagaaatggcaaaatcttactaaagataacttacagtggaacgttctggataaacaacacattgaagtgtatttaaaaatgagggctccccaaaattaaatctgctaaccttttatcttagttactatcctgatccaaagaaatagacggcagcaccaattggct

SEQ ID NO: 940261 - DNA, 435 bp, Homo sapiens
tctcaaaatgaagaaaacgactaaaaggggggaattgttaaagcaaactaaatatggcctgagaaggactctatacttctatatctgagtccttgtgaactaactgcaacctaatttaacaagtagacaagattgaaaacttaacttagcagtatgtgcctatawcaatagctgagtcttggccaatcccagcagacatacttcaaccactcatacactgccaagtgttcaaactgtgttcaaataaggcaaatgccaacctgtgactaatctggctgtttctgtacctcactttggatttctgtatatcactttactttttttgtctataaatttgatctgaccacgaggccccctggattctctctgaatcttctgtgattctgggggctgcccgatttgtgaaacatttattgcttaaactcctttaaattt

SEQ ID NO: 940262 - DNA, 698 bp, Homo sapiens
acctgatgcactggccttatgcctttgagtgagccttgccagagcctcatctggggaatcagggggttgagcaggatggtgttagtaacttattgtaagtcacagcagcagagcaggataggaacactcatttgcatgccaagctgaggagcttgacatgggatcttagcctcttctgctacagcagcttagctgtagctacaggagtttaactctggaaaaaggaaggcagtctcacatggtgtgtaccccagggtatgcacctgtaaccctcctgctccctttattcatttagaaaaggtgctgactyttctgttgagcacctggggttacagtaataagtaagtctcagcagaagatgtgagaagagctcaccattagtgccgtgccctgtgctggaagaagggtggataactccctgaggatgagttaaggaagacttcctaggggagaggagatatctacgtctaggaagaggagggggcataggcattccatgtaaacttaacacctgggttacgatctggaaggatgaaaaagcatggctttttttggccaggcgcggtggctcacgcctgtaatcccagcactttgggaggctaaggcgggcggatcacgaggtcaggagatcgagatcatcctggctaacacggtgaaaccccgtctctactaaaaatacaaaaaattagctgcgcgtg

SEQ ID NO: 940263 - DNA, 664 bp, Homo sapiens
tccatgtaaacttaacacctgggttacgatctggaaggatgaaaaagcatggctttttttggccaggcgcggtggctcacgcctgtaatcccagcactttgggaggctaaggcgggcggatcacgaggtcaggagatcgagaycatcctggctaacacggtgaaaccccgtctctactaaaaatacaaaaaattagctgcgcgtggtggtgagcgcctgtagtcccagctactggggaggctgaggcaggagaatggcgtgaacccaggaggtggagcttgcagtgagctgagatagtgccactgcactccagcctgggcggtaaagcgagactccatctcaaaaaaaaaaaaaaagaaaaagcatggctttttaaaaattcttggccctttgtcctctctgggattggagtttgggacatagagtggctggatgggcaggtagggtagaagcctggcatttgtgtccacacttggtggggctgtctctcactcaggcggggagacaaccccttccccaagaatgctgatgggactatatgctacgactccacccactacaaggagacttggaaggctctggaggcactggtggctaaggggctggtgcaggcgctgggcctgtccaacttcaacagtcggcagattgatgacatactcagtgt

SEQ ID NO: 940264 - DNA, 639 bp, Homo sapiens
catcaagctcgaggatttgcccccacccaggactggcaaattagctttactcaacatgccctgagtcaggaaactaaaatatctgttagtctaaatagacactttcactgaataagtaaaggcctttcctacagggtctgagaaggccaccgcagtcatttcttcccttctgtcagacataattcctcagtttagccttcccacctctataccgtccgacaacagaccagcctttattagtcaaatcagccaagcagtttttcaggctgttagtattcagtgaaacctttatatcccttacggtcctccatcttcaagaaaagtagaatggactaaaggtcttttaaaaacacacctcaccaagctcagctaccaacttaaaraggactggacaatacttttaccactttcgcttctcagaattcaggcctgtcctcggaatgctacaaggtacagcccatttgagctcctttttattaggccccagtcttattccagacaccagaccaacttagactgtgcccccaaaaaaacctgtcatccctactattttccgtctagtcatactcctattctccgttctcaactactcatacatgccctgctcttgtttacactgccggtttacacagtttctcc

SEQ ID NO: 940265 - DNA, 599 bp, Homo sapiens
ttcatcttccgccatgattgtgaggcctcctcagccatgtggaattgtgagtccattaaacctctttttctttataaattatcaagtctcaggtatgtatttatagcagcataagaacagactaatacacccacctacaaataaagccctgaggtctcttccccgcccttgcttgggtgggtgcagtgagtggaatgtgtagtccctgatgcaccatctccggcccttacagtttatggctcctcactgggctgtgtccagcaacatctatcctgctgtttcccctactctgggcygtccctgctcttgccgctttcctggggagtgggtgaggactgagggacactcagccccagcctggggacccagggacgaggagacacctcgggagggctgggtcacttcaggcaattaccttcacctctctaagcctcttgaaaatgggcagaatgatccctaggtgtcagaggtatggagagcatcatgggagatgacatccctgaagtgaggcacactgtgatctgtgtgtcagcattggcaggctgggaatagggtgaacctgtgaggcacctggggtgcaagttctccctgggtctggc

SEQ ID NO: 940266 - DNA, 774 bp, Homo sapiens
cagcctccaggcccaacgcaggctccaggccagctcctgtagccccaggattcagactgaaacccaaagactcagcctccgggcccagtccagccccatgtcagccgctacaactctaggttccaggctcactagaatgccaggtcagtcctcacagccctagactccaggccagcacccatggacccacgctccagcaaacccaggacccatgcccactctatagactcagagtccaggcctgcctcagtaaactcagcatccacagccttaggcaccaggctagcacctgtgaacccaggctccagaccaagccccgtggacccagkctcaccccagcaccaggccaatcccaggctctaggctggtccctgtgaccccagactctaatagacccaggatccaagctcattccagcagacccagggtccaagtccaccctggtcaaccctagtgccaggttgccccacagatccaggctctaggattgcccctgtggacccaagatccagacaggtccccacaggcccaagaaccaggtctctttctgcatactcaagctccaggctcaccccagcaccaggctaacccccatggactcaaactcaaggcccatccacatggacccaggcacccagacaatcctagtgccaggctggcccccacagactcaggctcaaggcccactccagggccaggctggccagacttcaggccagcccctacagacacatgctccaggctcgcacccatgagctcagtcaacagactcac

SEQ ID NO: 940267 - DNA, 642 bp, Homo sapiens
caggccagctcctgtagccccaggattcagactgaaacccaaagactcagcctccgggcccagtccagccccatgtcagccgctacaactctaggttccaggctcactagaatgccaggtcagtcctcacagccctagactccaggccagcacccatggacccacgctccagcaaacccaggacccatgcccactctatagactcagagtccaggcctgcctcagtaaactcagcatccacagccttaggcaccaggctagcacctgtgaacccaggctccagaccaagccccgtggacccaggctcaccccagcaccaggccaatcccaggctctaggctggtccctgtgaycccagactctaatagacccaggatccaagctcattccagcagacccagggtccaagtccaccctggtcaaccctagtgccaggttgccccacagatccaggctctaggattgcccctgtggacccaagatccagacaggtccccacaggcccaagaaccaggtctctttctgcatactcaagctccaggctcaccccagcaccaggctaacccccatggactcaaactcaaggcccatccacatggacccaggcacccagacaatcctagtgccaggctggcccccaca

SEQ ID NO: 940268 - DNA, 669 bp, Homo sapiens
gaggtggaaggatcacctgagcccaggagttcaaggctgcagtgaggcatgattgtgcctctgcactcgagcctgggtgacagagcgagatcctgttcctgtctcaaaaaaaaaaaaaaaaaaatctgtttcacagggtagttggtaaggattaaataagwtagtgtatagtacctgccacatagcaagtactcagtgtatgatagttgctataaataataaggacccatgaagataaatctatgtttttaattttttcagagaccaacattactatttttttttccttgcatctccagggacaccagggacaacatttctatttcttatgttaagaatgttcatcttagctatccctctttcccactgttggcctagtctaaagactgtgcagagttctcaggagcgctctgtggccccaggtcagaccactcctgtttctggtgccctgattctcaggactatagcactaccagagaccagattaagaactgctgtcgtggctagagtcaagccccagagtcagtgatgctgacagaacccaatcattcatttcttgaacccgtcatggtcttgtgattgtgtgcatgtgtgtgtgttttgcacagaaggagccctcagttctgagaaaagtactattggaggatgaggtgttggctgccatggtgt

SEQ ID NO: 940269 - DNA, 656 bp, Homo sapiens
atagattttggtgggtacaatcattttagaacactggattataattatgcaaatattatgcattacatgccaaaatatcttttttcccttagagaaatttgcaaatattccaaaatctgaaaaactccaagatccaaaacacttcttgtcccaagcattttggataaatgatacttgacaacctgcagtacttttggcagcataattgaataattaaaactcaaaccatcactaaagaagtcagcaaractatgatggattttaaaagatctacagcacttagaaagtgtctgaagttagtgtactattcccctcattgtcttttaataccataccataccattgttcaaataaaactacttactgctgttttaccccctgaagcaacctgaatccttctctggcactttctttcttgactttatgcattgccttttttgtttgtttgttttgctttttgagatggagtcttgatcttgtcgcccaggctagagtgcaatggcacgatctcagatcacagcaacctccacttcccgggttcaagcgattctcctgcctcagcctcctgagtagctgggattacaggcatgcgccaccacgcctggctaattttatgcattgcctcttatctctcataagctgtatccagctctgta

SEQ ID NO: 940270 - DNA, 584 bp, Homo sapiens
actactagtctgttgaccagaaggcttgctgataagataaagtggattaacacatattttgtatatgtgttatattctgtattttttcaataaagtaagctagagaaaagaaaatgttatttaaaaaaatcgtaaggaggagaaaatgtatttgctattcatcaagtggaattggatcatcataaaggtcytcttcattgtattcattttatttttatttttttatcttatttttgagacggagtctcgctctgtcgcccaggctggagtacagtggtgcgatctccgctcactgcaagctccgtcttcctgggttcacgccaccctcctgcctcagcctcctgagtagctgggactacaggcgcctgccaccacacccggctaattttttgtatttttagtagagacggggtttcaccgtgttagccaggatggtctcgatctcctgacctcgtgatccacccgccttggcctcccaacattgtcttcatgctaagtatgctgaggaggaggaagagaagggattggtcttgttgactcagggttggcagaggagagaaaaggctgtgtataagcagaccagg

SEQ ID NO: 940271 - DNA, 613 bp, Homo sapiens
ctcaggcctgggcgaccatcgatggctgtgtggtaaagcaagccccacgcggaaggagaaccctccctcagctcctgtgcccatggaaatccaacccttcacagatctgagtctcatctggattaggccatatatttaggtgatgaagggactctgggcctgagctgcttcattctctagaggggcctgggggctgcctgcagaggaggagggggcaggagaagctgcctgaggctgagggatgagaaggaaatgcctggaggccctggctttgcaggaaggggaggagctctgcagccatttatggaggtattcacatcaatttctgaaaagtaagtttttcttcaatttctatcttcaactagtaaaagaaatatgaaacaatcagaatgaacagagtggttgcaagcacattacggagaacttctctgcctgcactacttaagagygagctgtcacactgatgccccatcttaatgatgccaccttatgccccatactttactgtggtttccttgcaaaccaggacaatctccagataaccactgtgcaaactccaaattagatttcactccagacattacgaccacctcatgctcagatgccactccgg

SEQ ID NO: 940272 - DNA, 620 bp, Homo sapiens
gtattcacatttattggtattattggttttgttttattcctaattttagaagtctcagcatgttttcctatccctttcacgtgccacctccagccccattttcctgataattttcctagctgtaattctcggttattcttagctacacttccttgtttctgtgatcctaacttcacatttccccttgttgtgagataacagtaatctggaatggattccttggtcacttgtcctccttggttctcttgtcgcatctcctgtgtttctcttgctgttgaggtaccttcctctgaactatttccaacttggatctttaggaggcaaatatccttcaggttttctataatttcgaatatttctaatacactgcagtgggtaggatttggaagctgccccttcaagtttcctgtaccttttctagaacgatatgttatagaaaacrctgatgataggacaactaaccactgtcttagcctgtttcattgagcatggagcataccagccgcaggaaaatccagtattttaagcaaggaaggaaggagtatgaaagtgggaatgcaaacgggaaagaaaaggggggccaggaagaaggggatggagagagtaaggggtgaggggcc

SEQ ID NO: 940273 - DNA, 554 bp, Homo sapiens
ccatcacttgtcttttggcagaaactcagaggcaggcagaggagtggggaagcttcatagtgggggaaagggaaggctcggagagtgtgctgattggaggctgctggtgcgggaagctggagggggctcactggaagtgaggtgtcccatgggatttggtagagtgcaacttggctttctctgcttggtcctcagaaatagggacagaaattagaaaaactgtcagtttttaattaagtcctggcccttttggagcaaatgttacaacggtttttgttttgcttcctggatggttactagagatagcrtctgacttcctaaaagtctgtgtcatagacatcaggctggcttcctgggctggctcctgcagatgatgggttggtttcctgggctggttgcatagattgtgggtcactttttaaaaaatgtatgtctgcttatttgtatattcaccctctgtctatttgtattttcagtctctcagtccatatacctatgtgaaataagagatcatctctggatttcaggtgggcactatgattggagtgtgtctg

SEQ ID NO: 940274 - DNA, 554 bp, Homo sapiens
ataacatattaaatattatatatatatatatatatatataaatttttttttgagacagagtctcactctgtcacccaggctagagtgcagtggcatgatctcagctcactgaaacctcagcctcccagattcaagcaattcccctgcctcagcctcccaagtagctgggattacaggcatgccccaccacacctggctaatttttgtatttttagtagaaacagggtttcaccatgttcaccaggctggtcttcaactcctgacctcaaatgatctgcccacttcagcctcccaaagtactgggattacagacttgagccacygcgcctggcctaaatatatatttaaataaaatatattacattttactcctattagttttactaaatggcaattacaggtatccaaagaacatttactgagcaaccaccaggcactatgctagaatcagagatatcacagtgtatctcctgtctctactcctgtggagtgggagagagagctctccacacagtggaaaaacagaaatccctatttctgtgaaaacaccaagt

SEQ ID NO: 940275 - DNA, 618 bp, Homo sapiens
acagccttgacctcagctccatatccttggagctgcagttttcagacttgtttcagtaccgcttcacgctcttaacaattattaaggacctcaaagacctttgctttacatgagttatatctatcaatgtttaccatattagaaatataagtgggaaattttagagtatttatgaattcaataaaacataataacctggctgggtgtggtggctcatwcctgcaatcccagcactttgggaggccgaggtgggacgatcacttgaggccaggagttcgagacaagcctgggcaacatagtgagactttgtctctacaaaaaatttaaaaaattaacaggatatggtagtgtgcacttgtggtcctagctacttgggaggctgaggcaggaggattgcttgagcccaggaggttgaggctgcagtgtaccatgatcacaccactgcactccagcctgagtgacagagcgaaaccctgtctcataaaaactaaaaatcaaaacataataacccttttgtatatgaacataaataatacttctgtatgaaaaatacctttacaaagatagtttagggaaagagtggtggtggtttacatttttgcggttctctataacgtc

SEQ ID NO: 940276 - DNA, 582 bp, Homo sapiens
  misc_feature 270, 286, 300: n = A,T,C or G
cctgggaggcagaggttgcagtgagccaagatcacgccactgcactccagcctgggtgacagcgcaaggctcaataataataataataaatacttcacttagtctttatagcaacactttaaggtagatattgttatcatccctatttcaaagatgaggaaataggccaaggaggttaagtaatttgctcaggaccacaaagcaggaagcagcaatacccagatttgtacaacggtctgaggggactgggtgggggttgggaagatgggnctgggggcgagtgggnagagggggtggttnctggctccaggacctctgtttttagccaacactctgtgctgtgcagtgtccgtatctcagtgcgtgagttsagagatactccagccctttactgtaaatattttccttgtcctctttctttctttttttggcatatccaacccctagatgctctggttaaaatgttctgaccttttcgaaatgggtatattcagtgcattcccaaacgcaatcgcggcccctttaacagggccactgcaggaggagctgtcctatcagcaccacggccgccgcccagtgtgc

SEQ ID NO: 940277 - DNA, 572 bp, Homo sapiens
tgcctgtagtcccagctacttgggaggttgaggtgggaggatcgcttgagcccacgagtttgaggctacagtgagctatgatagtggcggcactgcactctagcctggacatcagagtgcagccctgtctctaagaaaaaaaaaaaagaacgagtctaaataaactgwagagttctatttataagcatttactgagcactcttcagtgtagaggactgggctgggtacaagggagaaaacaagaagtgacctcagcctcaggacactcaccatgtagtaagggagaaaagtaatacacaactttctataatctaaagtaggaagtgttaaatccccacagagagagtcaggtaaaatgctggggagtgttgacgagagagacattcattctctggagagatccaagattgctccgtggagcaggtggcatgagaattggactttacaggatgatgggtttgggtcgagtggttgttagctgtgggaaagcaccaggcagaaggagcagcatgaacccagcacttggactcaggatgggccacccagagcctgtggtggtcagtcccaccctg

SEQ ID NO: 940278 - DNA, 613 bp, Homo sapiens
atctgagaatgttcttgatttcccctttattcctgaagaatatttttactgggtataggattatgagttgacagttctttttattttccccccagcacttgaaaaatattgtgccacttccttctgtcctctgtggtttccaatgagaaatctactgtcattyggaccctttccacctgtagattaaggtttcctgtttctcttcctgctttcaagattgtttctttgtctttaactcgcagatgcttaatttgtgctttctttaggtctatcttgtttggcatttgctcagattcttgaatctgtgggtttatgtctcttgccaactttgcaaagttttcaactattttttcttggagtactttttcagcaccatcctctttcttttctcttaccagaacttcaataacacgaaagttagatcttttgttatagtcccacaggcccctaagaatctgctctgctttttgttttggtctattttctttctgttgttcatattggttaatttctattgttctatcttccagttcactgattgttctccttaattctactgttgatcccatccactgagatcaacacttcagttactgtatttttcagtttaaaa

SEQ ID NO: 940279 - DNA, 613 bp, Homo sapiens
atctgagaatgttcttgatttcccctttattcctgaagaatatttttactgggtataggattatgagttgacagttctttttattttccccccagcacttgaaaaatattgtgccacttccttctgtcctctgtggtttccaatgagaaatctactgtcattcgraccctttccacctgtagattaaggtttcctgtttctcttcctgctttcaagattgtttctttgtctttaactcgcagatgcttaatttgtgctttctttaggtctatcttgtttggcatttgctcagattcttgaatctgtgggtttatgtctcttgccaactttgcaaagttttcaactattttttcttggagtactttttcagcaccatcctctttcttttctcttaccagaacttcaataacacgaaagttagatcttttgttatagtcccacaggcccctaagaatctgctctgctttttgttttggtctattttctttctgttgttcatattggttaatttctattgttctatcttccagttcactgattgttctccttaattctactgttgatcccatccactgagatcaacacttcagttactgtatttttcagtttaaaa

SEQ ID NO: 940280 - DNA, 595 bp, Homo sapiens
agctcttagggaggcagaggcgggaggatagcttgagcccaggagttcgagacctgcttgggcaatatagtgagaccttgttctccacaaaaaggaaaaaaaaaaagaaagaaagagtgtgatgtgaatgggtgagggcagccctcctgctgctgggggacctggaagccagcctccttatccatcaatatggcaccttgacaatcagcagcggaaagagtaatgtggcttaaaactcacctcatggtgggtcactcacwcatgagcgctgagacctgctgagtggtgcaggcctgactccgaaggtctcgctagtccagccttctcctcctaagatggggaaacccaaggatgagctggaagaacaggtgagaggacctcggttctaattgtccagttcgtgtctcagtttcttcattaagaaacaggctaacttggccagatgccatggctcatgcctgtaatcccagcactttgagaggccaaggtaggaggattgcttgagcccagaaatttgagaccagcctgggcaatatagggaggcccccatctacaaaatttgttttaaaaattagccaagcatggcggtgtgcac

SEQ ID NO: 940281 - DNA, 614 bp, Homo sapiens
ctgcagacctggtggtgaaagttacagctcttaaggcggcatgtctggagttgttcattcccccccggtcggttcgtggttttgctggcctcaggagtgaaactgcagaccttcacggtgactgtaacagctcataaaggcagtgcagactcaataagtgagcagcaacaagatttattgcaaagagcaaaacaaggtagattccatagcrtggaagggaacaggagcaggttgtgcactgggctctggcagcctgcttttattcccttatctggccccacccacatcctgctgattggtccattttaaagagcactgattggtccattttacagagagctgactggtctgttctgacagggtgctgattagtgtgtttacaatccctgagctagacaccgagtgctgattggtgcatttataatcctctagctagacataacagttttccaagtctccactaggttagctagacacagagcactgattggtgcatttacaaacttttagttagacacagagtgctgattggtgtgtccacaaaccccgagctagacacagagtgctcattggtgcatttgcaaacctccagctagacataaaagttctccaag

SEQ ID NO: 940282 - DNA, 614 bp, Homo sapiens
ctgcagacctggtggtgaaagttacagctcttaaggcggcatgtctggagttgttcattcccccccggtcggttcgtggttttgctggcctcaggagtgaaactgcagaccttcacggtgactgtaacagctcataaaggcagtgcagactcaataagtgagcagcaacaagatttattgcaaagagcaaaacaaggtagattccatagcatggaagggaacaggagcaggttgtgcactgggctctggcagcctgcttttattcccttatctggccccacccacatcctgctgattggtccattttaaagagcactgattggtccattttacagagagctgactggtcygttctgacagggtgctgattagtgtgtttacaatccctgagctagacaccgagtgctgattggtgcatttataatcctctagctagacataacagttttccaagtctccactaggttagctagacacagagcactgattggtgcatttacaaacttttagttagacacagagtgctgattggtgtgtccacaaaccccgagctagacacagagtgctcattggtgcatttgcaaacctccagctagacataaaagttctccaag

SEQ ID NO: 940283 - DNA, 614 bp, Homo sapiens
ctgcagacctggtggtgaaagttacagctcttaaggcggcatgtctggagttgttcattcccccccggtcggttcgtggttttgctggcctcaggagtgaaactgcagaccttcacggtgactgtaacagctcataaaggcagtgcagactcaataagtgagcagcaacaagatttattgcaaagagcaaaacaaggtagattccatagcatggaagggaacaggagcaggttgtgcactgggctctggcagcctgcttttattcccttatctggccccacccacatcctgctgattggtccattttaaagagcactgattggtccattttacagagagctgactggtctgttctgacagggtgctgattagtgygtttacaatccctgagctagacaccgagtgctgattggtgcatttataatcctctagctagacataacagttttccaagtctccactaggttagctagacacagagcactgattggtgcatttacaaacttttagttagacacagagtgctgattggtgtgtccacaaaccccgagctagacacagagtgctcattggtgcatttgcaaacctccagctagacataaaagttctccaag

SEQ ID NO: 940284 - DNA, 593 bp, Homo sapiens
cagtggcattgcctacaatcatactgaaattctagaagcgaaaatggttaagttctagaaaacaatgacatgctgtgtttcatcaaatttaaatcagatgtcttggccatatagaactaacatttgtatggtgtgttctaatgtaggataattacataacaatagtaacaaaggctgttattcagtgatttctatattttagacattgcactaggtgctttaccagggattcattgaattctttcaacatcctttgagggaggtaccattattattttcattcattgaattctttcaatatcctttgagggaggtgccattattattttcattttatagctaaggaaactgaaacttgcaaagatttactaaaaatcattttcatataaattattatcttaattatacagaaactcatgttcaatgagatttaatgaccttccaaagagcactcagcrgaaaatgttagggtaggtctactggtagtaatcctgttatgttcaccacgctacactgagaatgcgttgtaagatgggaagagagagaaacatacatggagatttgactactgggcttgtgccagcccccgtttt

SEQ ID NO: 940285 - DNA, 887 bp, Homo sapiens
aggagatgatattggagtggtaccaggagtcagatctcataggacattagagttgcgatttcattctttattaaaaagttttcttctttattaaaaggtagtggcatcataagatttatctttttaagaccgtaaaggctgctgtgtagaaaacagatggaagggaagcaagcaaggtacagggaactcagttaggaaagagctggtggtggcttgaactagctgggtagctatgcatgtggtcaaattcaggttttatttggagccagagccatagaacttactaatggagaagatttgggatgtgaaagaaagaaatcagtcaataataactccaaggaatggaaaagcaagtttttgtatattcttaccatggagtactactggactacaaaaaggaaggaaccactgatagaaaaatgaggatgaatctcaatgacattatgctgagtgaaagacgccgaacatgcaaaaaaaaaaaaaaactggattattctatttatgtgaagttctggaatagactaaactaacctgtgatgataaaaatcatacaagtggttgcttctggygtgaggggatggcatggaaagaggctggaaagcaacacaagagaacttttggggttatgggaatgttccatcttgacaggaagggacttgcacaagcgtttttcaaagctgatagagtcatacacaaagtttgagcacataactgtgtgcaagttatacctcaataaaagaaattatagcacaggatggctccaggattgggtctctgcaagtggaaggacagcattgctgtaatggaaatagggaagacagtgggaaaaataagttataggttaggaaggggagagtcagaggattcccagtttggacacatgacat

SEQ ID NO: 940286 - DNA, 817 bp, Homo sapiens
aggggttgccacaggtgtgctcatacagagctcttaaataagaggtcagcccttgacaggtgcttcccttgggccaggtctctggccaagcactttataatctcctccttgaccactctccagaagagggaggcacagtgggaaatggaagtactgaggacagtcatggaaaagcttcctggagggatggtgcctgagccctaagtagctgcaggtgttggacaggagagaaaatgtgggaagggatgaccaggcccagggaacggccagagtaaaggctgagaccagatrgcgtgggccaagtgctgcaggcacttctgggtaatagaaacaaagtgcaaggcagggcctgatggatgctgaagggcccaggaggctggtggggccagcttatgggcctctggggacttctgagcaagtgtaaaacatgatcaggtcactgttttagcaagacgactcagagcaatggatggtttattgggagagaccagttaagggtcaactgtatgagttcagataaagaatcaagaggacctgaacttgggcaaggatgagaggaatgggaaggagggatggtagatggtgactgagtattctgtgtaggcacatgtgtgacctggccccactgaaccctgcctcctggtatttacaccctcatgcaatctcctctggcttacatctcatgaatagaatacagcaaaagtggtgggatgttactttctagaccaggtcatagagactgtgacttctgacttgctggcactatccctcctccctctctccccattaccctgcttcactggcacactctctcatg

SEQ ID NO: 940287 - DNA, 532 bp, Homo sapiens
tactctggccaaaatgggtctaattaacttctcttacagcagggtatagatcaaaaaattcttgcacgtctgcaagccctcgaggctgcttcggaatatgtgggggagcaacaagatgccctggcattccaacagcaattaaactgygactgggagcataaacatatctgtgtcacttctctatgatggaatcaatcgatacctagttgggatgaggtgaaacaacacttctggggaacctttcatgataatttaacagcagacataaagcaacttaaaactaaaattttagaattccttcacactatagatctacacacccaacaaacggccatatggaaggatgtgcaagatcacctctccgggttagacccccactcctggggtcactctttgattggaaaagaatgttgctaattatacttatgattgtcttattttatttactaattctaggatgcaaagccagaataagagcaatgaccaccacgcctgacaaacctgctgctgcatacatctgtgctctccaatc

SEQ ID NO: 940288 - DNA, 532 bp, Homo sapiens
tactctggccaaaatgggtctaattaacttctcttacagcagggtatagatcaaaaaattcttgcacgtctgcaagccctcgaggctgcttcggaatatgtgggggagcaacaagatgccctggcattccaacagcaattaaactgtgactgggagcataaacatatctgtgtcacttctctatgatggaatcaatcratacctagttgggatgaggtgaaacaacacttctggggaacctttcatgataatttaacagcagacataaagcaacttaaaactaaaattttagaattccttcacactatagatctacacacccaacaaacggccatatggaaggatgtgcaagatcacctctccgggttagacccccactcctggggtcactctttgattggaaaagaatgttgctaattatacttatgattgtcttattttatttactaattctaggatgcaaagccagaataagagcaatgaccaccacgcctgacaaacctgctgctgcatacatctgtgctctccaatc

SEQ ID NO: 940289 - DNA, 571 bp, Homo sapiens
taagtccacttgtttggttaaactctattaccagaaatagaaatttatgacattagctttctaacgtttattggtcatagtttttttctttcattttctttctataaatacaatcacacataaatctatttgattgctataagttgagtttcaagaagacaaacatattagaatttatccagtcacttcttttgctcttttttaagtcagtaaagtaagcaaccttaataaaatacttcatcacatcagcaaatatttaagaagcagcttgggaagtaatttcaacaaatacamctggtgattttattttttaaactgaagaaaaattattcatattgaggtgggcatattggtgagaaaatggaacataagtactttcaggtggctcaaagcaacacgaacagagccaaacaggttagaacataaatccatcccttagtagaagggaactgttacaataggtcacaacaatgaagacagattgcaaacatcctactttaggcacagataagaatgtaacaaagcagaaactggccacaactggttaaatccaagatggccaaaatcttga

SEQ ID NO: 940290 - DNA, 571 bp, Homo sapiens
taagtccacttgtttggttaaactctattaccagaaatagaaatttatgacattagctttctaacgtttattggtcatagtttttttctttcattttctttctataaatacaatcacacataaatctatttgattgctataagttgagtttcaagaagacaaacatattagaatttatccagtcacttcttttgctcttttttaagtcagtaaagtaagcaaccttaataaaatacttcatcacatcagcaaatatttaagaagcagcttgggaagtaatttcaacaaatacaactggtgattttattttttaaactgaagaaaaattattcatattgrggtgggcatattggtgagaaaatggaacataagtactttcaggtggctcaaagcaacacgaacagagccaaacaggttagaacataaatccatcccttagtagaagggaactgttacaataggtcacaacaatgaagacagattgcaaacatcctactttaggcacagataagaatgtaacaaagcagaaactggccacaactggttaaatccaagatggccaaaatcttga

SEQ ID NO: 940291 - DNA, 571 bp, Homo sapiens
taagtccacttgtttggttaaactctattaccagaaatagaaatttatgacattagctttctaacgtttattggtcatagtttttttctttcattttctttctataaatacaatcacacataaatctatttgattgctataagttgagtttcaagaagacaaacatattagaatttatccagtcacttcttttgctcttttttaagtcagtaaagtaagcaaccttaataaaatacttcatcacatcagcaaatatttaagaagcagcttgggaagtaatttcaacaaatacaactggtgattttattttttaaactgaagaaaaattattcatattgaggtgggcawattggtgagaaaatggaacataagtactttcaggtggctcaaagcaacacgaacagagccaaacaggttagaacataaatccatcccttagtagaagggaactgttacaataggtcacaacaatgaagacagattgcaaacatcctactttaggcacagataagaatgtaacaaagcagaaactggccacaactggttaaatccaagatggccaaaatcttga

SEQ ID NO: 940292 - DNA, 793 bp, Homo sapiens
tccctaactcattctatgaagccaacatcagcttgatacctaaatctggcagagacacaataaagaaagaaatcttcaggccaatatccctgatgaacatagatgcaaaaatcctcaacaaaatactagtaaattgaattctgcagcacataaaaaaattaatatatctcgataagatatatgttatttctgggatgtaaggctggttcaacatacgcaaattaataaatgtgattcaccacttaaacagaattaaaagcaaaaaccatatgatcatctcagtagatgcrgaaaaagcttttgataaaatccaacatcccttcatgataaaaaccctcaacagactgcaggcattgagcagatataccatgaaagaacatacctcaaaataattagggccatctatgacaaacccacagccaacattatactgaatgggcaacagctagaaccattccctttgagaactggaacaaaacaaggatgcccactctcactccacctattcaacagtgctggaagtcttatccagagcaatcagtcaggagaaagaaatgaaaggcatccaaataggaaaagaagtcaaactatttctctttgctgatggtattattccacacctagaaaaccctaaagactccacaaaaagactcctagaactgataaataacatcagtaaagttacagtatacaaaattaatgtacaaaaatcagtaccatttccatacaccaataacatccactctgagagtcaaatcaagaacatgattttatttacaatagccacagagaa

SEQ ID NO: 940293 - DNA, 732 bp, Homo sapiens
catctgtaaactgcagagaccccctcgcaggctgcatgagtattgagcccagtgctgaaatgcccagcacagggctggcccctccctgcccagtgttcctcctgccagcttcatgggtctccccagcctgccatttccccctcattgtgtgtgttggtggtggggggtggcggggtgcagatgaaggcagatcctcttccccagaatgaggagagcagggggctcacagcctgctgcactggcccacctccacagccctgtccccactggccgcctctctgtacttgcctctgccaactctctgggtctttggcctttctttccaagatgcagaacgtttgtaaaacgaaggggttggaccagaagaactcaraagtccattttgagaaggggaagctaaagttcagatgccttaaagttctgtgtcttttctaggaggtccaaactcccagcatatctgactgggctgcccccaggggactgggacatctgcttttgtgtcacctggctccatcatttctccctcctctcttttctttctcttacatgactgaagttgtttgagctcttaaacaatttgccgtgcattgtataggcattttacataatccatctgaattttttttttttttttaagatggagttttgctcttgttgcccaagctggagtgcaatggcatgatctcggctcactgcaacctctgcctcctgggttcaagcaattatcctgcc

SEQ ID NO: 940294 - DNA, 596 bp, Homo sapiens
tggagaagcaaattgtggtatatccttataatgaaatgttatttgcccataaaagtaagtaaaatactgatttgtgttataatatggacgaatcttgaacatgtactaagtgaaagaaactaggttcaaaaggccacttactgtatgatttcatttatataaaatgtccataattggcagatcaatagagacagaaagtggatgagtgctttccaaaggctgggggtggtttgagggtggggagcggctgctaataggtacggggtttcttttggggggtgataaaagggttccaagtatccaagattagataaattgtggtgatggttgtgcaaccctaragtatactaaaaactacttaagagtagaaatgaaacttcagaaactttaaagagtgttgagaggctgggtgcagtggctaacgcctgtaatcccagaactttgggaggctgaggtgggtggattgcttcagccagaagtttgagaacatcctaggcaacatgcaaaaccctatcttcacaaaacaaaaaaatacaaaaattagccaggcgtggtggcgcctggtcccagctatttgagaagctaaggtgggagga

SEQ ID NO: 940295 - DNA, 609 bp, Homo sapiens
agagagtggtaggggatgggggcaaaattcaagctcatgctgaggaattgagtatcgtggagggaatgcctgctctgttttaacaggaaacaattgggtcaggatgcaggcagatacagtttgtactttggatggcctaaagttgagggaagagttcccacctgcaaagctatggcatcaatttctctctggaaagatcacatctgagaatgatggaggaagattaggtggttaaatgagaaataggaaggtttggaacaaacttaatagactgtgggagagcagggtatagtcatgactaagactaaaccactggcttcatttttgacataatcttggttgggttttggtatcagaattatgttggacacaaaagataaattgaaatttgtctgtctttttctatgcttgggaatgaggtaaacraaatgataacactatattgttgaaaatttgacagcagtcacctgtaaactagccttatccttttttataatggttataggatggctcattttctttcatggctatcattttccagattaatattacttatttcacatttccgtgaacaccacaaattctattttaaatacatgtgaaactgtc

SEQ ID NO: 940296 - DNA, 709 bp, Homo sapiens
cactctgtcacccaggctggagtgtagtggcagaatttcaggtcactgcaacctctgcctcctgggttcaagcgattctcctgtctcagcctcccgagtagctgggactacatgtgtgcaccaccacacccagctattttttgtatttttagtagagatggagttttgccatattagccaggctggtcttgaactcctggcctcaagtgatccgcctgcctcagcctcctgggattacrggcgtgagccaccatgcccagccgccccacctcatcttgaaggatttttgggtgtctgcgtcactgcaggtcacctcttgcactgactccactcccgccgagttcttgagtgctccccttcccaccatcctcacccccttcaggataacttgcccatccttcatttccctggagttcttctagcccaaggctgtgtgtgtagccagctttagtgaaggttttggggaagcagagagagattctaagtcactgtagtacaggatgcaattttgtatgggctcctggcctcatcgttctcaggatccatctgacatccctgcaccatggggactgtgttgttgtctgggcctccccataggcattgtttgctactgtattttggcccttctccgcctggtcacagcctcactgtatgaccctgttctttccttactgccccttcccccaccccagtcttggccactccccag

SEQ ID NO: 940297 - DNA, 709 bp, Homo sapiens
cactctgtcacccaggctggagtgtagtggcagaatttcaggtcactgcaacctctgcctcctgggttcaagcgattctcctgtctcagcctcccgagtagctgggactacatgtgtgcaccaccacacccagctattttttgtatttttagtagagatggagttttgccatattagccaggctggtcttgaactcctggcctcaagtgatccgcctgcctcagcctcctgggattacaggcgtgagccaccatgcccagccgccccacctcatcttgaaggatttttgggtgtctgcgtcactgcaggtcacctcttgcactgactccactcccgccgagttcytgagtgctccccttcccaccatcctcacccccttcaggataacttgcccatccttcatttccctggagttcttctagcccaaggctgtgtgtgtagccagctttagtgaaggttttggggaagcagagagagattctaagtcactgtagtacaggatgcaattttgtatgggctcctggcctcatcgttctcaggatccatctgacatccctgcaccatggggactgtgttgttgtctgggcctccccataggcattgtttgctactgtattttggcccttctccgcctggtcacagcctcactgtatgaccctgttctttccttactgccccttcccccaccccagtcttggccactccccag

SEQ ID NO: 940298 - DNA, 609 bp, Homo sapiens
tccaacaaaggtctaaaatccagaatccataaggaactaaaataaatcaacaagcaataaacaaatgattccattaaaaagtgggcaaaggacatgaaccgatacttctcaaaagaagacatacacgcagacaatgaatatgaaaaaatgttcatcaccactagtcatcagagaaatgtaaatcaaaaccacaataagataccatctcacacccgtcagaacggtgattattaaacagacaaaaaacaatgatgctggtgaggctcgggagaaataggaatgcttatacactgttygtgagaatgtaaattattaatatttcagccactgtggaaagccatttggagattactcaaaaaacttaaaaacagagctacctttcaacccagcaatcccattattgggtatatgtccaaaagaaaataaatcattctaccaaaaagacacatgcattcatacattcatcacagtgctgttcacaatagcaaagacatagaatcaacacagatgccaatcaatggtggaacagataaagaaaatatggtgcatatataccttggaatactatgatgccaaaaaaagaacaaaatcatgtcctttgcagcaaca

SEQ ID NO: 940299 - DNA, 742 bp, Homo sapiens
  misc_feature 666: n = A,T,C or G
aaggcaggcggctgggaggtggaagttgtagcgagccgagatcacgccactgcactccatcttgggcaccattgagcactgagtgaaccagacactgtctgcaatcccggcacctccagaggccgaggctggcggatcactcgcggttaggagctggaggccagcccggccaacacagcgaaaccccgtctccaccaaaaaaatacgaaaaccagtcaggcgtggcggcgcgcgcctgcactcgcaggcactcagcaggctgaggcaggagaatcakgcagggaggttgcagtgagccgagatggcagcagtacagtccagcttcggctcggcatcagagggagaccgtggggatagggagagggaagtccaggattttcttttgtggtgatgaaaatgttttcgaactagattagaggtgggtataacattatgaattaactaaataccccgaattgtaaactttaaaataattaattttatatttggtgaatttcacctcaattaaaaaaaaaattagaaaaaggccaggcatggtggctcatgcctgtaattgcagcgctttggaaagccaaggtaggaggatcactttgtgcccaggggtttgagaccagcctgggcaacatagcaaaaccctgtctcaaaaaaaaaagaaaaagtttaagnaaaagaaattaaagagtgaaagaaaaaaagagagagaaaaaggtagaagaaatagggactaagaacattatatact

SEQ ID NO: 940300 - DNA, 557 bp, Homo sapiens
acaccagccctagccagaggagaactgcccactccaacagttggaacttgagtttcggcaagcctcaccaccatgggctaaagcgctctgggtccctaaataaacttaaaacgcagtttaggccttttaaggagtactgcaactcctaggcaagtgctggtgctgagttgggcttggagacagtgaacttggagggccatacaatttactgagacacaagctggggcagctaagggagtgcttgtgccactcctcccacagccccaggcagcacagcttgtggttctaaaatggaccccttccttctgcttgagaagagaagagggacaaagaggtcttcgtcttgcatcatagataccagctcagccacagyaggatagggcaccaggcagagtaatgaagaccccattccaggccctagctcccagatgacatttctagacatatctagggccagagggaacctgctgccttgaagggaaggacccagtcctagaaggatccatcacttactgactaaagagcccttaggcctggagaaatctacctggtgttct

SEQ ID NO: 940301 - DNA, 693 bp, Homo sapiens
tcttcaataaatgctgctgggaaaattggatttctacatgcaaaagaatgaaaatggatccttacctttcaccatacagaaaaacaaaatcaaaatggataaaagacctgatgtaagacctgaaaccataaaactcctagaagaaatcataggaggaaatcttgacattggccttgggagtaatatcttgactatcacactgaaatctcaagctacaaaagaaaaataagtaaatgagactrcataaaaccaaaaagcttctgcacagcaaaggaaacaatcaccaaaatgaaaagaccctaccaattgggaaaaaaaatttacagatccaagatttataaagagctcatacaattcaatagcaagaaaacatatgatctgatggaaaaaaggtcaaaggatctaaatagatctttattcaaatatgacataaaaatggcaacagatataggaaaaggtgttcaacatcactaattatcagagaaatgcaaaccaaaagcaagttgcgatatcacctcacacctgttaggatggctactatgaaaaagacaataccaaatgctggagaggatgtagagaaaacggaactaatatatacgttgttggaatacaaattagtacagccattatgaaaaacattaagggattgtctcaaaaatcccaaagtagaactatggtagaatccagcaattc

SEQ ID NO: 940302 - DNA, 629 bp, Homo sapiens
cttacctttcaccatacagaaaaacaaaatcaaaatggataaaagacctgatgtaagacctgaaaccataaaactcctagaagaaatcataggaggaaatcttgacattggccttgggagtaatatcttgactatcacactgaaatctcaagctacaaaagaaaaataagtaaatgagactgcataaaaccaaaaagcttctgcacagcaaaggaaacaatcaccaaaatgaaaagaccctaccaattgggaaaaaaaatttacagatccaagatttataaagagctcatacaattcaatagcaagaaaacatatgatctgatggaaaaaaggtcaaaggatctaaatagatctttattcaaatatgacataaaaatggcaacagrtataggaaaaggtgttcaacatcactaattatcagagaaatgcaaaccaaaagcaagttgcgatatcacctcacacctgttaggatggctactatgaaaaagacaataccaaatgctggagaggatgtagagaaaacggaactaatatatacgttgttggaatacaaattagtacagccattatgaaaaacattaagggattgtctcaaaaatcccaaagtagaactatggtagaatccagca

SEQ ID NO: 940303 - DNA, 735 bp, Homo sapiens
  misc_feature 13: n = A,T,C or G
caacttggtcccntcttcaattttgtcaaaagaaaataaatggaaaccatgagacatgaaaatgtatttgttacccagtcatttgtcattcactgtcttgattctgggaaatacaccaaaaagactgcccccaaacttctcagatgactgctaattatacctgctactcatttacttagagattccttgttaacatggaaaaggttaggaaaattaaaatactagtcattttaacacaactttgccaatacaatttttttttttgcctttcaaattgagatgtaattcacrtaccagaaagatcactcttttaaagtgtgcaatttagtgggttttagtatcttcagaaagttgtgcagccatcaccactgtctaattccaggacatttgcatctccccagcaagaaatttcatacctattagcagctactcttcattccccgctccaccctcacgattttcaatgaagttattttatctcatcatatgctttaagtacattttcatccaaatcatggcattttaggtgcagctcattcagttcatggaaatgcctgccatgtaacctatttggcaaagcagtccattcatcaagacagcagccaagccagatctagcttcagttaggaaaaaactgacttcaatttcaaagcaatgtgttaatatgcatcccttcccaaccatcttacttctgaattctaattctgagatgagagattgatgtacaaggcgtat

SEQ ID NO: 940304 - DNA, 735 bp, Homo sapiens
  misc_feature 13: n = A,T,C or G
caacttggtcccntcttcaattttgtcaaaagaaaataaatggaaaccatgagacatgaaaatgtatttgttacccagtcatttgtcattcactgtcttgattctgggaaatacaccaaaaagactgcccccaaacttctcagatgactgctaattatacctgctactcatttacttagagattccttgttaacatggaaaaggttaggaaaattaaaatactagtcattttaacacaactttgccaatacaatttttttttttgcctttcaaattgagatgtaattcacataccaraaagatcactcttttaaagtgtgcaatttagtgggttttagtatcttcagaaagttgtgcagccatcaccactgtctaattccaggacatttgcatctccccagcaagaaatttcatacctattagcagctactcttcattccccgctccaccctcacgattttcaatgaagttattttatctcatcatatgctttaagtacattttcatccaaatcatggcattttaggtgcagctcattcagttcatggaaatgcctgccatgtaacctatttggcaaagcagtccattcatcaagacagcagccaagccagatctagcttcagttaggaaaaaactgacttcaatttcaaagcaatgtgttaatatgcatcccttcccaaccatcttacttctgaattctaattctgagatgagagattgatgtacaaggcgtat

SEQ ID NO: 940305 - DNA, 643 bp, Homo sapiens
atgggaagctcgcagttcttcttcttcttcttcttcttctttttttgagacaaagtcttactctgtcgcccaggctggagtgcagtggtgtgatctcggctgactgcaacctccacctcccaggttcaagcgattcttctgcctcagcctcccaagtagctgggactacargtgcgtgccaccacgcctggctaattttttgtatttttagtagagatggggtttaaccgtgttagccaggatggtcttgatctcctgacctcgtgatccacccaccttggcttcccaaagtgctgggattacaggtgtgagccaccgcgcctggcctcagttctttttacatggtctctttatttatgacgtattttcagtgttgttggttttcaattatgagtggaaacaagtcaaaaatatatcatcaggacactgtgtgtttattttggaagaattttctggctagctaagtgggaggaatactacactaatcccaaaaataaaaatcgctactgtccattttgagctagggcttgggcttgggagacctgagctcagttctggaatgcagagtcctctcaagagggcagagcgtcgaccctgcctctgtggctcacagtcatcatgacctgaggattagggttctcct

SEQ ID NO: 940306 - DNA, 643 bp, Homo sapiens
atgggaagctcgcagttcttcttcttcttcttcttcttctttttttgagacaaagtcttactctgtcgcccaggctggagtgcagtggtgtgatctcggctgactgcaacctccacctcccaggttcaagcgattcttctgcctcagcctcccaagtagctgggactacaagtgcgtgccaccaygcctggctaattttttgtatttttagtagagatggggtttaaccgtgttagccaggatggtcttgatctcctgacctcgtgatccacccaccttggcttcccaaagtgctgggattacaggtgtgagccaccgcgcctggcctcagttctttttacatggtctctttatttatgacgtattttcagtgttgttggttttcaattatgagtggaaacaagtcaaaaatatatcatcaggacactgtgtgtttattttggaagaattttctggctagctaagtgggaggaatactacactaatcccaaaaataaaaatcgctactgtccattttgagctagggcttgggcttgggagacctgagctcagttctggaatgcagagtcctctcaagagggcagagcgtcgaccctgcctctgtggctcacagtcatcatgacctgaggattagggttctcct

SEQ ID NO: 940307 - DNA, 643 bp, Homo sapiens
atgggaagctcgcagttcttcttcttcttcttcttcttctttttttgagacaaagtcttactctgtcgcccaggctggagtgcagtggtgtgatctcggctgactgcaacctccacctcccaggttcaagcgattcttctgcctcagcctcccaagtagctgggactacaagtgcgtgccaccacgcctggctaattttttgtatttttagtagagatggggtttaaccgtgttagccaggatggtcttgatctcctgacctcgtgatccacccaccttggcttcccaaagtgctgggattacaggtgtgagccaccgcgcctggcctcagttctttttacatggtctctttatttatgacgtattttcagtgttgttggttttcaattatgagtggaaacaagtcaaaaatrtatcatcaggacactgtgtgtttattttggaagaattttctggctagctaagtgggaggaatactacactaatcccaaaaataaaaatcgctactgtccattttgagctagggcttgggcttgggagacctgagctcagttctggaatgcagagtcctctcaagagggcagagcgtcgaccctgcctctgtggctcacagtcatcatgacctgaggattagggttctcct

SEQ ID NO: 940308 - DNA, 642 bp, Homo sapiens
cagaaaaatggtggaatagaaagctccaaactcccaaactccccacaaaaacgtaaaacacaagccaaaactatcagaaccaactttgtcagaagtctgcagaacagtcaaaagtttacagcaaaccaaaagaaagctgaattaagaaaaacataacttagggccgggtgtggtagctcatgcctgtaatcccagcactttgggaggctgaggcaggtggtttacttgaggtcargagtttgagaccagcctggtcaacatggtgaaacctcaacttactgaaaatacaaaattagccaagtgtggtggcacatgcctgtagtcccagctactcaggaggctgaggcaggagaatcacttgaacctcaggggcagaggttgcagtgagcggagatcatgctactacattccagaaagtcttgactcatcacatacaagcgagcctcaataagataaactaccaatttctcatcagaaactatggaggccagaggcagtgggatgatccacttaaggtactaaaagaaaaaaaaatcaaataagaattctatacctggcaaagctgtccttcaaaaaggaagagaaaattaagatgttcccagaaaaacatagggagttcatgatcatgagacagttaataca

SEQ ID NO: 940309 - DNA, 567 bp, Homo sapiens
aatggcataccaggagattatatcccgtgcctgactcggagggtcccacatctatagagcctcactcattgctagcacagcagtctgagatcaaactgcaaggcgacagtgaggctgggggtggggcatccaccattgctgaggcttgaataggtaaacaaagccgccaggaagctccaactgggtggagcccactgcagcccaaggaggtctgcctgcctctgtagactccacctctcagggcagggcatagctgaacaaaaggcagcagaaacttctgcagacttaaacktccctgtccaacagctttgaagagagtagcggttctcccagcatggagtttgagatctgagaacggacagactgcctcctcaagtgggtccctgacccctgagtagcctaattgggaggcacctcccagtaggggggcgactgacacctcataaggccgggtgcccctctgagacgaagcttccagaggaaggattacgcagcaacatttgctgttctgcagcctccgctggatacccaggcaaacagggtctggcgtggaccgccagcacactc

SEQ ID NO: 940310 - DNA, 589 bp, Homo sapiens
aaaataataataattttacaggttagggggaagtaagatgacatattcaaagtgctgaaggaaaagaattgacaacctaaaatagtgtattcaacaaagctatccttctaacatgaagggaagataacgactttcctagacaaacaaaaggtgakaaaacttaccacatccaaacctgttttataagaaatactaaaggaagttactcaatctgatggcaaaggattctaatgtttaacaacgaaacatcagaaattttttataaaaatctctgctaatagaaacaatacaaattcagaatactctaatactgtaactgtggtatataaaggactcatatatttagtttgaagacagacaaaactattaaaaaataacaactagaaaaatttattatgcattaggcagtacaaaaatatagaaattgagatatctaaaagtcaaaatgtgaggagtaaagtataaagttttttttagttttgtttctcttttctttgtgaccaatgttaacttgtcatcaggttaaaataattagttacataagatgttttctgtaagcctcacggtaaccacaaagtgaaaacctata

SEQ ID NO: 940311 - DNA, 618 bp, Homo sapiens
caacagctagagaatatacattcttcaccatagcacatggaagattctccagaccatatattaggcgacaaaacaagttttaacaatttttttaattgaaatcatatgaagtatattttatgattacaatggaataaaactatgaatcaataacagaaggaactttggaaactgttcaaatacatgaaaattaaacaacatgttcatgaaaaaaacaatgcatcaaagaaaagaaagttttttaatttaaaaattccttgagacaaatgaaaaatgaaaatacaacatacaaaagcctatataatataggaaaaatggccctaaaataaagtttatagcaataaacacctacatgaaaaaaaactagaaagaactcaaataaacaacctaacattactcctcaaagaactaaaaaaaaaagaacaatccgaaaataagtagaaggaacaaactaataaaatcagagcagaaayaaacaaaaaagagattaaaaaatgtaaaagatgaacaaaacaaaaagctgtattttgaaaagataaacaaacttgacaaacctttagatagactaaaaataaaagtgaggaaattcaaataactaaaacaagagaagaaaagggt

SEQ ID NO: 940312 - DNA, 600 bp, Homo sapiens
ttgaaggtgccacctcttggcaggaggccaaccagcaaaaaactagttcattaaacaattacaattaaggatgcaacagagtcaatttcactcctctgcaacttccaccacagcaggtgctggtgtccatggctgagagacctgaagatgattcacatcacaggactctgtgcagacaccctcaagtaccagcccagagactaatagacctgcgtccagaagagaaataacaatcactatagttcagctcttaggaagctacatccctagaaaaagggttagggtattacatcgagggagcaccctgtgggacaaaagaatctatacagcagccttaagcccccagatctcccctctcacacagtctacccaaatgagaaagaaccagaaaaacaattctggtaatatgaaaaaacaatgttctttagcaccaccyaaaaatcatgcaagtttaccagcaatgaatccaaaccaagaagaaatccatgtagtgtctaaaaaaaaatttagaaagtcaattattaaactaatcaagtaggtaccatagaaatgtaaagtccaatttatggaaatcaatgaataatacaagatatgagggga

SEQ ID NO: 940313 - DNA, 602 bp, Homo sapiens
gctgtttccagtcagatgattcctactgactgggacactcttacttgagtttgtctaactcctgctcagttcttacaattgaaaacttggtgggcagatgaagcttccattcaggctgctaacaatggccaggcccatcctcaaattgatataactcagaccaacttttgggggttggcggctgggctggtttagatgcacaactggtcatgcaggatgatgccatagaacagcttagaggagtgtgcattaragcttgggaaaaaaatcacttcaagtggggaaaaatacccttcctttagtgctataaaacagggaccaagaaaaccatacattgattttatagctcggttacaggagtctcttaaaaagatgattgcagatttggctactcaggatatagtgttgcacttattagcttttgacaatgctaatcccgattaccaggctgctctgcgacctatcagagggaaagcacatttagttgattatatcaaggccagtgatggtattagaggtaatctgcataaagctactctggtagaacaggcaatggcaggactgagagtggataaaggaaataaatccattttctggagctt

SEQ ID NO: 940314 - DNA, 602 bp, Homo sapiens
gctgtttccagtcagatgattcctactgactgggacactcttacttgagtttgtctaactcctgctcagttcttacaattgaaaacttggtgggcagatgaagcttccattcaggctgctaacaatggccaggcccatcctcaaattgatataactcagaccaacttttgggggttggcggctgggctggtttagatgcacaactggtcatgcaggatgatgccatagaacagcttagaggagtgtgcattaaagcttgggaaaaaaatcacttcaagtggggaaaaatacccttcctttagtgctataaaacagggaccaagaaaaccatacattgattttatagctcggttacaggagtctcttaaaaagatgattgcagatttggctactcaggatatagtgttgcasttattagcttttgacaatgctaatcccgattaccaggctgctctgcgacctatcagagggaaagcacatttagttgattatatcaaggccagtgatggtattagaggtaatctgcataaagctactctggtagaacaggcaatggcaggactgagagtggataaaggaaataaatccattttctggagctt

SEQ ID NO: 940315 - DNA, 602 bp, Homo sapiens
gctgtttccagtcagatgattcctactgactgggacactcttacttgagtttgtctaactcctgctcagttcttacaattgaaaacttggtgggcagatgaagcttccattcaggctgctaacaatggccaggcccatcctcaaattgatataactcagaccaacttttgggggttggcggctgggctggtttagatgcacaactggtcatgcaggatgatgccatagaacagcttagaggagtgtgcattaaagcttgggaaaaaaatcacttcaagtggggaaaaatacccttcctttagtgctataaaacagggaccaagaaaaccatacattgattttatagctcggttacaggagtctcttaaaaagatgattgcagatttggctactcaggatatagtgttgcacttattagcttttgacaatgctaatcccgattaccaggctgctctgcgwcctatcagagggaaagcacatttagttgattatatcaaggccagtgatggtattagaggtaatctgcataaagctactctggtagaacaggcaatggcaggactgagagtggataaaggaaataaatccattttctggagctt

SEQ ID NO: 940316 - DNA, 426 bp, Homo sapiens
aaacgcagatacagcattacctggaaagaagctaaaactattatccagtgatgcccaacttgccaaatggtacattcctcttcttttacaggaggagttaatccttgaggattggaacctatagctctttggcaartggatgtcacacatgttccctcgtttgggagactagcttatgtacatgtatgtgtggacatcttttctcactttgtctgggctacatgccaaacaggagagtcttctgcctgtgttaaacatcatcttttgcagtgttttgcggtgatgggcattccagcttctattaaaacagataatgccccagactatactagccaagctctacctacatttttctctatgtggaatattaaacacattactggtatcccatacaattctcagggacaagccatagtggaaagaatg

SEQ ID NO: 940317 - DNA, 604 bp, Homo sapiens
ccttccgcagtgtttgtgtccctgggtacttgagattagggagtggtgatgactcttaacgagcatgctgccttcaagcatctgtttaacaaagtacatcttgcaccacccttaatccatttaaccctgagttgacacaacacatgtttcagaaagcacagggttgggggtaaggtcatagattaacagcatcccaaggcagaagaatttttcttagtacagaacaaaatggagtctcctatgtctacttctttctacacagacacagtaataatctgatctctctttcttttccccacacttcccccttttcttttcaacaaaaccgccatygtcatcatggcccattctcgatggttgctgtctcttcggagctgttgggtacacctgcagaaaggctgttgcttcacacttggaagattgaacagcggccaggcagaggtgctcctcacttcccagatggggtggcggccgggcagaggcactcctcacatcccagatgatgggcggctgggcagaggcgctcctcacctcccagacggggtggccgggcagaggcgctcctcacttcccagacggggtggccaggcagaggtgctcctca

SEQ ID NO: 940318 - DNA, 721 bp, Homo sapiens
ccacacttcccagacggggtggccaggcagaggtgctcctcacttcccagacagggcagccgggcagaggtgctcctcactttgcagatgaggtggccaggcagaggcgctcctcacttcctagacagggtggcagccrggcagaggtgctcctcacatcccagacaatgggcggccgggcagaggtgctcctcacttcccagatggggcggccaggcagaggcactccccacttcccagacagggtggccgggcagaggcgctcctcacttcccagatggggtggctgctgggcagaggcgctcctcgcctctcagacggggcggccaggcagaggcactcctcagttcccagacagggcagccaggcagaggtactcctcacctcccagatggggtggtggccaggcagaggcgctcctcacatcccagatggggcggccaggcagaggcactcctcacttcccagacagggtggcagccgggcagaggcattcctctcatcccagacggggcagcaaccgggcagaggcactcctcacatcccagacggggctgccgggcagaggcgctcctcacttcgcagatgatgggcagccgggcagtggcgctcctcacttcccagatgatgggcggctgggcagaggtgctcctcacttcctagacggggcggccaagcagaggtgctcctcacctcccagatgaagggcggccggggagag

SEQ ID NO: 940319 - DNA, 721 bp, Homo sapiens
ccacacttcccagacggggtggccaggcagaggtgctcctcacttcccagacagggcagccgggcagaggtgctcctcactttgcagatgaggtggccaggcagaggcgctcctcacttcctagacagggtggcagccgggcagaggtgctcctcacatcccagacaatgggcggccgggcagaggtgctcctcacttcccagayggggcggccaggcagaggcactccccacttcccagacagggtggccgggcagaggcgctcctcacttcccagatggggtggctgctgggcagaggcgctcctcgcctctcagacggggcggccaggcagaggcactcctcagttcccagacagggcagccaggcagaggtactcctcacctcccagatggggtggtggccaggcagaggcgctcctcacatcccagatggggcggccaggcagaggcactcctcacttcccagacagggtggcagccgggcagaggcattcctctcatcccagacggggcagcaaccgggcagaggcactcctcacatcccagacggggctgccgggcagaggcgctcctcacttcgcagatgatgggcagccgggcagtggcgctcctcacttcccagatgatgggcggctgggcagaggtgctcctcacttcctagacggggcggccaagcagaggtgctcctcacctcccagatgaagggcggccggggagag

SEQ ID NO: 940320 - DNA, 715 bp, Homo sapiens
gtggtggccaggcagaggcgctcctcacatcccagatggggcggccaggcagaggcactcctcacttcccagacagggtggcagccgggcagaggcattcctctcatcccagacggggcagcaaccgggcagaggcactcctcacatcccagacggggctgccgggcagaggcgctcctcacttcgcagatgatgggcagccgggcagtggcgctcctcacttcccagatgatgggcggctgggcagaggtgctcctcacttcctagacggggcggccaagcagaggtgctcctcacctcccagatgaagggcggccggggagaggctctcctcacatcccagacgatgggcggccgggcagaggcgctcctcaccccccagacggggtggccgggcagaggcgctcctcactttccagacagggtggccagccagaggcgctcctcacatcccagayggggcagttgggcagaggcgctcctcacttcccagatgataggcggccgggcagaggtgctcctcacttcccagacgggacggccgggcagagacgctcctcacctcccagacagggtggccgggcagaggcgctcctcacttcctagatggggcagccaagcagaggcactcctcacctcccagatgaagggcagccggggagaggctctcctcacatcccagacgatgggcggctgggcagaggtgctactcact

SEQ ID NO: 940321 - DNA, 586 bp, Homo sapiens
ctctgtctcccaggctggagtgcagtggcatgatcttggttcaccgcaagctccatctcccgggttcacgccattctcccgcttcagcctcccgagtagctggaactacaggtgcccgccaccatgcccggctaattttttgyatttttagtagagatgggatttcaccgtgttagccaggatggtcttgattctcctgacctcgtgatctgcccgcctcagcctcccaaagtactgggattacaggcatgagccaccacgcccagctctctcagttgtctttcttatgaaataactaaaactgggcactgtcacagacagctccttccaataaaggccactgaaatcttttagctggattctctccttccctgagccttaaggaacaagctcggtggcagggtcttagaacacaggtaacttttagatgggcaggggagggattttttttttttaaacatttatggagagtttgtgattgactgagcagtttacatgttttgcccatttatttctcaaaatgattcaataaggtagacacacttaccccattttctgacataggccataggactcagagaggcta

SEQ ID NO: 940322 - DNA, 585 bp, Homo sapiens
ggggaagaccaccttcccattccatcccccttctggctccccatccatttcactgagagctacctccaccactctataaaaccttgcacccatcctccaagcccacatgtgatccgatttttctgatacactagggcaagaacctgggatacagaaagccctctgcccttgtgataaggtagagggtctagttgagctgattaacacaagctgcctgcagacagctaagctgaaaagagcacactgtaacacaagcccactggggttttgggagctgtaaacaaccctagatactgcagtggggtcagagcccccaaacactccccatgacctgcctgtctgcatgctcccctctatgggtttgagcaggggagcactgaaaaagccagccacacccctgygagggggagaagagaacactctcatttcaacaggaggagctttttaggaggtttctgaaatacctttgaggcctttttcgacggtcttgggtatttgcacttggctccatttagttacacaaatctctccagcaagtgattgctctatagcttgcttgaattcctctcctgaaaatgttttttt

SEQ ID NO: 940323 - DNA, 710 bp, Homo sapiens
tgaattcctctcctgaaaatgttttttttttcttctctaccacatggctaggctgcaaattttccaaactcttattttccaaacttctgtgtgtattctcgttaatgataaattccaaatttaagtaattcctttgttcctgtatcttgccgtaggtgtttagaatcagccagacttcctcttgaatgctttgttgcttagaaatttcttccgctaggggaacatcacacaccggggactgttgtggggtggkgggaggggggagggatagcattaggagatacacctaatgctaaatgacgagttaatgggtgcagcacaccaacatggcacatgtatacatatgtaacaaacctgcacgttgtgcaaatgtaccctaaaacttaaagtataataataataaaattaaaaaaaaatttcttccgctagataccctaggtaatcaattttaagttcaagctttcatagatccctagaacattgacacaatgcagccaaatttttgctaaggcatgacacaagtatcttttgctccagtttccaataacatcctaatttccatgtgagacctgctcagcctggacttcactgtccatatttctgtcagcattttggtcacaaccatttaaacagtctataagaagttccaactttacctcatcttcccatcttcttctgagcccttcaaactcttctgatctctgcctttt

SEQ ID NO: 940324 - DNA, 719 bp, Homo sapiens
gcttgcttgaattcctctcctgaaaatgttttttttttcttctctaccacatggctaggctgcaaattttccaaactcttattttccaaacttctgtgtgtattctcgttaatgataaattccaaatttaagtaattcctttgttcctgtatcttgccgtaggtgtttagaatcagccagacttcctcttgaatgctttgttgcttagaaatttcttccgctaggggaacatcacacaccggggactgttgtggggtggggggaggggggagggatagcattaggagatacacctaatgctaaatgacgagttaatgggtgcagcacaccaacatggcacatgtatacatatgtaacaaacctgcacgttgtgcaaatgtaccctaaaacttaaagtataataataataaaattaaaaaaaaatttcttccrctagataccctaggtaatcaattttaagttcaagctttcatagatccctagaacattgacacaatgcagccaaatttttgctaaggcatgacacaagtatcttttgctccagtttccaataacatcctaatttccatgtgagacctgctcagcctggacttcactgtccatatttctgtcagcattttggtcacaaccatttaaacagtctataagaagttccaactttacctcatcttcccatcttcttctgagcccttcaaactcttctgatctctgccttttac

SEQ ID NO: 940325 - DNA, 719 bp, Homo sapiens
gcttgcttgaattcctctcctgaaaatgttttttttttcttctctaccacatggctaggctgcaaattttccaaactcttattttccaaacttctgtgtgtattctcgttaatgataaattccaaatttaagtaattcctttgttcctgtatcttgccgtaggtgtttagaatcagccagacttcctcttgaatgctttgttgcttagaaatttcttccgctaggggaacatcacacaccggggactgttgtggggtggggggaggggggagggatagcattaggagatacacctaatgctaaatgacgagttaatgggtgcagcacaccaacatggcacatgtatacatatgtaacaaacctgcacgttgtgcaaatgtaccctaaaacttaaagtataataataataaaattaaaaaaaaatttcttccgctagataccctaggtaatcaattttaagttcaagctttcatagatccctagaacattgacacaatgcagccaaatttttgctaaggcatgacacaagtatcttttgctccagtttccaataacatcctaatttccaygtgagacctgctcagcctggacttcactgtccatatttctgtcagcattttggtcacaaccatttaaacagtctataagaagttccaactttacctcatcttcccatcttcttctgagcccttcaaactcttctgatctctgccttttac

SEQ ID NO: 940326 - DNA, 634 bp, Homo sapiens
ccccacctccaacattgggaatcacatttcaacatgagatctggagagaacaaacatctaaaccatatcattccacacctggtccctgagatctcatgtccttctcacattgcaaaatacaatattcccttcttagtagtcctccaaagtcttaccttgttctagcagtaactcaaactctaaagtccaaagtctcatctaagactcaaggccgtgtttcttccacctatgagtctgtaaaatcaaacaagttgtttactcccaagacacaatggtggtacaggcattgrgtagatattcccattccaaaatggagacataggccacaataaaaggacaataggccccacaggagtccaaaacccagcagggtagacgttaaaccctaaagctccaaaataatccttggctccatgccttgcatcctggacacactggtgtgaggagtgggctccctagaccttgggtagctctgcctctgtggctttgcatggtgaagtccccatggtggctttcacgggtcggagttgggtgcctgtggcttttccagggttagtgttcaagcttccagtggctctaccattctcaggtctggagggtggcggctcccttcccataactctgccagagagtg

SEQ ID NO: 940327 - DNA, 609 bp, Homo sapiens
ctcaagctatcctcctacctcagcttcccaaagtgcttggattacgggtgtgaaccaccacgcctggccctcaaaacaacttactgtactatactcacacttctcatgaggatgtgagatgagaaaatgcctacatgatgagatgaagtgagttgaatgacattaggcatagtagtgacctagctttaggctactcccaaccttctgacaataggtcagacagagaactatctgcttggagagatcctgggtcatcaagccatgatgacgtccatggtgggatgtcaggagcagatgatatcaatgacttacgagaacagcatatacagtgtggacatgctggacaaagggataagtcacgtaccaggcaagatggcgtragacttcatcatgctactcagaacagcatgcgatttaaaacttatgaattatttctaaattttccatgtaatatattcaggccacagttgaccaaaggttactgataacaggggactactatatttcgttatagcagcccaaatgaactaagacaatgagtcaaagaagtagttatcaaaggaaatttttaaaaaatacctagaactgaatgaaaatgaaaaaacaaca

SEQ ID NO: 940328 - DNA, 585 bp, Homo sapiens
atctgctggcagcttgaccttgaacttcctggcctacaaaactatgagaaatcaatttctgttgttcataagctacctagtctatggtatttttgtcatagcaaactgaatggactatgacaccacccatatgaatctcctcaaatcatacttaatctttgaataaaggcaataacaagatccatacttccacctaacacaataaactatcttgcatacaaccaaaaatgcaccaaccctatcctcaaaagaagatgccaaatccttgggtgatgtttactctcgtcgatattccttaacttaaacactatgatgtaatgttagcagtacttaaatactatgatgcagagtsagtatatcttatgttatcagataaggtgataagagaaggaagaaaatgatattttctgaaatttgcatatggattgttgcttttatatgtatacacacatattaatagcaaaacaaggaagaaatacttatggcaattacagtcttctttttctttaattgatcacatggtcatagctggtgtttataactacctttttccatgacccaatccatatcccctttgccctcagc

SEQ ID NO: 940329 - DNA, 622 bp, Homo sapiens
gaatcaacctctctctctctctctgacctatcttccttttacttgcccaagacaggaatctaattgtgactcaaaagaccctaattccagagagggtcctgtcctattcctggagaaagggatgctgcacccagagtccaagaagaatctgatcggacaggccctgtcaggttttcccactcactctattagtatgcaattatattcttttcacccaatcacatttctacttggttgtgaatcatgcccaagtaacaaagtttccataaaaacccaaaaggacagtgttcacagagcttctgaatagctgaggatctggcagttcctggagagtggtgccccagggagaggatggaacctcagcaccccacccccaccttgtcytatgcatctcctcattgatatcctttgtaatactctttaggataaattggtaaatgtaagtaactgcttccctcagttctttgagctgctttggcaaattattgaagcacaaagagggagtcatgggaaccccaacttgcaaccagtcagctggaagttccagaggccagatttgtgactggtatctggggtatgggacagtcttggggactgacccttcaacttgtgggatctcagg

SEQ ID NO: 940330 - DNA, 651 bp, Homo sapiens
agaatgacacaccttcataagaacgaaaaatcaagtgagcactcacagtagctgattttaacttcatattactgaaagaggcagtaaagaaatagaaaaaacagtcctgaatcacctatgccacccgccctccaccccagcagcagacgtgtggtatggggwgtgtctctgggtgctgagggagcagaacacagcaattctgaggcattgatctcagtgctgtcctgttagagaagaaaggaaaaccagacgaaactcagctgatatccgcccaaggagggagcatttaaaccagccctagccagaagggaattgccaatcccagtggtccaaacttgagtgcctggaaaacctcgtcacctaaggccaaagtgcttttgtctctaagtaaacttaaaaggcagtctaggccataaggactgcaactcataggcaagtcctagggctgaactaggtccagagacagtggactgaggggacaggtcacaatctgagataccagttggggcaacgaaagaagtgctggcatcacccctccactaacccctggctgcccagctccaggctccaaaagagaccccttccttccacttgaggagagcagagggaagactggagaggactttgtcttgcattttggatactaactca

SEQ ID NO: 940331 - DNA, 651 bp, Homo sapiens
agaatgacacaccttcataagaacgaaaaatcaagtgagcactcacagtagctgattttaacttcatattactgaaagaggcagtaaagaaatagaaaaaacagtcctgaatcacctatgccacccgccctccaccccagcagcagacgtgtggtatggggtgtgtctctgggtgctgagggagcagaacacagcaattctgaggcattgatctcagtgctgtcctgttagagaagaaaggaaaaccagacgaaactcagctgatatccgcccaaggagggagcatttaaaccagccctagccagaagggaattgccaatcccagtggtccaaacttgagtgcctggaaaacctcgtcacctaaggccaaagtgcttttgtctctaagtaaacttaaaaggcagtctaggccataaggactgcaactcataggcaagtcctagggctgaactaggtccagagacagtggactgaggggacaggtcacaatctgagataccagttggggcaacsaaagaagtgctggcatcacccctccactaacccctggctgcccagctccaggctccaaaagagaccccttccttccacttgaggagagcagagggaagactggagaggactttgtcttgcattttggatactaactca

SEQ ID NO: 940332 - DNA, 555 bp, Homo sapiens
aaaaaaccatcaaaccacaaaggaagacagcaaccaagaaagaaagaagcaaaatacctacaaaacaaccagaaaacaattaatgtaatggtgttagtaagtttttgcttatcaataattactttgaatgtaaatggattaagttatctaataaagagacataaaatgactgaatggtttaaaaaaaaaaaagrcaagacccaactatatgttgccgacatgagactaactttacttttaataatatagactggggtcaggtgtggtggctcacacttgtaatcccagcactttgggaggctgaggtggggggatcgcttgagttcaggagttcaagacaagcctgtgccatgtagtcagattttgtgtctatctatcaaaaagaatatttaaaaaaatagaatatgtaataaaaccaaaagtagggaaaaagatatttcacacaaaggattcaaaagagaacaaggatagctattcttagataaaatatactttaaatttaaaactgtagaaaagcgatcaattcatcaagaggatataacaattgtaaatatt

SEQ ID NO: 940333 - DNA, 555 bp, Homo sapiens
aaaaaaccatcaaaccacaaaggaagacagcaaccaagaaagaaagaagcaaaatacctacaaaacaaccagaaaacaattaatgtaatggtgttagtaagtttttgcttatcaataattactttgaatgtaaatggattaagttatctaataaagagacataaaatgactgaatggtttaaaaaaaaaaaagacaagacccaactatatgttgccgacatgagactaactttacttttaataatatagactggggtcaggtgtggtggctcacacttgtaatcccagcactttgggaggctgaggtggggggatcgcttgagttcaggagttcaagacaagcctgtgccatgtagtsagattttgtgtctatctatcaaaaagaatatttaaaaaaatagaatatgtaataaaaccaaaagtagggaaaaagatatttcacacaaaggattcaaaagagaacaaggatagctattcttagataaaatatactttaaatttaaaactgtagaaaagcgatcaattcatcaagaggatataacaattgtaaatatt

SEQ ID NO: 940334 - DNA, 793 bp, Homo sapiens
ctgtcccatggagatggggattatgtctgtaagcccctgagtggggctgttacctttccttcagagatgccctgcccagtgaggaggaatctagagaagcagtctggccacagccactttgctgtgtccagcccagacctcccagctccttagtactgtcaggagaaaactgcctactaaagccccagtaatggcggacagccctccccccaccaagctcgatcatcccaggtcaacttcagactgctgtgctggcagtgagaatttcaagcccrtggttcttagcttgctgggctccatgggagtgggacccactgagcaagaccacttggctccctggcttcagcctcttttccaggggattgaacagttctgtctcactggggttcaggcgccactggggtatgaaaaaatagtcctgcagctagctcagtgtctgcccaaacagccacccaattttgtgcttgaaacccagggccctggtggtgtaggcatacgaggcaatctcctgatctgcagattgcaaaaactgtgggaaaagtgtagtaacccagccaggtagcacagtccctcatggcttcctttggcttggggaaggaggtccctggctccttgcaattcccaggtgaagcaatgcctcacccagcttctgttcatcctctgtgcattggacccattgcctaaccagtcccaatgagatgaagtgggtacctcagttggaaatgcagaaattacccaccttctgcattggtctctttgggagctagctgcagactggagctgttcctattcg

SEQ ID NO: 940335 - DNA, 628 bp, Homo sapiens
acggtggggaacaggataagaccagtaaattccatgtatcatcaccatagggaatctcagcagagaaatgaaatacacgcacacacacacgcgcgcacacacacacacatgaaccaaattgaaattcagagctgaaaagaacagttatctgaaatgaaaacatcaccatgtgcgtaggcttaaaagcatattggaaaatgaaaagaaaggagctgtgaatctgcagatagattaatagaaattatccagtctgagtaacagaaagaaaaaggattaagatgattaatttgyaggacataatctggggttgtgaaaaggggggctttctttttgttccacttttaggttcagcaggggatacgtcgtgcaggtttgttatataagtagattgcatgtcgtgggggtttggtgtacaggttatttcatcacccaggtagcgggcataatacccgataggtagtttttcgatcctcaccttccacccaccctctaatctcaagtggactccggggtctattgttcccttctttgtgtccatgtgtactcagtggttagctcccacttataagaaagaacatgcagtatctggttttctagtcctgcattaatttgcttagaacaatggcct

SEQ ID NO: 940336 - DNA, 656 bp, Homo sapiens
ggggggctttctttttgttccacttttaggttcagcaggggatacgtcgtgcaggtttgttatataagtagattgcatgtcgtgggggtttggtgtacaggttatttcatcacccaggtagcgggcataatacccgataggtagtttttcgatcctcaccttccacccaccctctaatctcaagtggactccggggtctattgttcccttctttgtgtccatgtgtactcagtggttagctcccacttataagaaagaacatgcagtatctggttttctagtcctgcattaatttgcttagaacaatggcctccagctacacctatgttgctgcaaaggacatgatttcattcttttttatggctrtgtagtattccatggtgtacatgtacattttctttatccagtctgctattgatgggcatctaggtggattccatgttattgctattgtgaatagtgctgcaatgaatatatgtgtgcatgcgtctttctttatattcctttgggtatatacccagtaatgggattgttgggtcaaatggtagctctgttttaagttctttgagaaatctccaaacggctttccacagtggctgaactaatttacattcccactagcagtgtataagtgttggaggctttcctgtggctga

SEQ ID NO: 940337 - DNA, 638 bp, Homo sapiens
ttcagaaaacatggaggccaaaatggagatgaatgacatattaaaaaatgctgaaataagaagaccttcaatgaaaaattatgtttccaaaagctatttttcaaaattaaaggtaaattaatattcccaaataaacaaaactgagatatcacactgctggcaaacaagaatactttgggaataaacaatgctggccaaaaagaatactttgggaataagcaaaaggataataagcaataactcaaataaagaaagaaaaaaagaaaggaagaaagaccagcaaaggtaattgcatatgtatatgtaaaagacaacaggaaagcacttctacttgtaactccttttcttctgattctaagacaactgcatttggtgataattataaaccttttcttatgggtttattatgtacgcataaatatgtaatttcttagacaataaataaagaacrggagaaaacagctatatttgaacaaaagctgttacactattgaaattaagttggtattaatttgaactaggattttaaattgttaattataattctcatggataaccattaagaatataactcaaaaatcttgtgaaataaattcagattaaatatttttttaacacatacagaaataaagcactaa

SEQ ID NO: 940338 - DNA, 577 bp, Homo sapiens
  misc_feature 541, 542, 543, 544, 545, 546, 547, 548, 549, 550, 551, 552,553, 554, 555, 556, 557, 558, 559, 560, 561, 562, 563, 564,565, 566, 567, 568, 569, 570, 571, 572, 573, 574, 575, 576,577: n = A,T,C or G
cttgggggtaatgctttcaacttttctccattcagtgtgatgttagatgtgggtttgtcatatatggcttttcattattttgagatgggtctcttctacgcctagtttattttcagcttttattataaagggatgctggatttcgttgaatgctttttctgcaactattgagatgatcttatggtttttrtttgaattctgtttatgtgaggtatcatatttattggcatatgtacgtgtgtgtatatatatatatattaaactatccctgcatccatgggatgaaacccacttgaacattatatattatctttttgatgtgctgttggatttggttagctggtatcttgttgaagacttttgcatctatgttcatcagggaaattggcctgtagttttctttttttgttttgtcctttcctggttttggtatcagagtgatactaggtttatcgaatgatttagggaggattccttctttctcaatcttttggaatagtttcagcaggattctaataccttttctttgagtgtctgaaannnnnnnnnnnnnnnnnnnnnnnnnnnnnnnnnnnnn

SEQ ID NO: 940339 - DNA, 674 bp, Homo sapiens
ttagttggccttcaatagagtcaggtgacagagaggtatgcttcttcaatgcctccccctttgtctctccagaaaggcagtagggatttcttcctttccctgtgttatagtggacatcattaatttataggctttttcctagttttccttagtccttctagcacacaagttagcaaatgtccgctgcaccaatctccatattctgattctgtgtcccaatgagggtctacacygggaactgcctgctggcctgtggggaattgttctctttcctctgttgtcagcctatcattgacctgagataccagagatcgccaaactctcaggatgcagttacggcggcacttctctcatttgaggttactgtctgatctagcagtaacattgtatctctccatgtcagatcaaaggattgtcctaacccttgtaaaacatcagtatagccatcaggattatctgataatttacctaggtctattttaatttgcttcaagtctgagacggaaaaaggttcatgcactctggaccgaattctccagaatacatcttagggggggttttgccttggggttggggggaacatttcccatctgaaacaagaacatagggatgccagcacctctagtcattttctgatgagcattagttctacagcgtcctctatggtcctaatg

SEQ ID NO: 940340 - DNA, 624 bp, Homo sapiens
catgatttcattctttaaatggcttcctagtatttgatggtgtatatgtaccacgttttctttatccaatctactgttgattttgtgtctttgttaatgtaaatagtgctgtgatcaacatacgagtgaaggtgtctttttgatagaacaatttatttttctttgggtattacccagtaatgggattgctgggttgaatagttctatttttagttctttgagaaktctggaagctgcttttcacagtgactaatttaccttcccaccaacagtgtataaatattccttgttttccacagcctagcaaacattggttgtttattgactttttaataatagccgttctgactggtgtgagataatatctcattgttttgatgtgcatttttcaaatgatttgtgatattgagtattttttcatgtttcttcgttacttgtaggtcttcttttgagaggtatcttttcatgtcattcgcccacttttccaatggggttgtttgttgttttcttgttgatttgtttaacttccttatagattctggatattagtccttttatttggatgcatagtttgtgaatatgtgctctcattctgtaagttgtatgtttatttgtggtttctct

SEQ ID NO: 940341 - DNA, 554 bp, Homo sapiens
acaccaggtagatttctccaggcctaagggctctttagtcagtaagtgatggatccttctaggactgggtccttcccttcaaggcagcaggttccctctggccctagatatgtctagaaatgtcatctgggagctagggcctggaatggggtcttcattactctgcctggtgccctatcctrctgtggctgagctggtatctatgatgcaagacgaagacctctttgtccctcttctcttctcaagcagaaggaaggggtccattttagaaccacaagctgtgctgcctggggctgtgggaggagtggcacaagcactcccttagctgccccagcttgtgtctcagtaaattgtatggccctccaagttcactgtctccaagcccaactcagcaccagcacttgcctaggagttgcagtactccttaaaaggcctaaactgcgttttaagtttatttagggacccagagcgctttagcccatggtggtgaggcttgccgaaactcaagttccaactgttggagtgggcagttctcctctggctagggctggtgt

SEQ ID NO: 940342 - DNA, 666 bp, Homo sapiens
aactaggaatgcaggactgttcctctggcagaaggcagcagagctcacatcatatttggtaacatcacaccactgtctgagatagactgaatgcttactggcctcctggactatggtgcacagtacatgggctcaagtttggtccattcatatttttgttaacattaactttttgcctagtatttggcctgccctccttccattcctgccattagctatacttccactgtctgctatgctatctttagagacccatttcatttaagaaaaagggaaagctacctagacataaaccctgcccctccacaactgcatactggaaggctccactgggaccaacctcagatagctcagagtctctttaaaattcatgacagaaggccaggcatgatggctcatgcctataatcccagcactttgggaggctgagrcaggcagatcacttgaggtcaggagttcaagaccagcctggccaacatggtgaaaccccatctccactaaaaatacaaaattagctaggtgtggtggtgggcacctgtaatcctagctactcgagaggctgagggaggagaattacttgaatctgggaggtggaagttgcagtgagccaagatctcacaactgtactccagcctgggtaacataattatactctatctccacaaa

SEQ ID NO: 940343 - DNA, 543 bp, Homo sapiens
cataaagggagcattcaaaccagccctagccggagagaagtcgcctatccccgtggtcagaacttgagttctggcaagccttgccatcacaggctgatgtgctctggagctctaaataaacttgaaaggcagcctaggccataaggaccacaagtccaaatactgagctgggcttggagatagtggaatttgggtgtacacagactactgagacaccaggtggggcatgcttataccacccctcccccaaccccaggcaacacatcttgtgcctccaaagaagaccctttccttcctcctgaggagagggaagagtaaagargactttggtcttgcatcttgattatcatcacaaccacaataggatagggcacagggcaaagtcatgaggcccccattcccgcctctagctcccagacaatatttctggacacactctgggccagaacggagcccgctgcctttaagacaaggacacagtactggcaggatccatcatctgccaactgaagagtccttgagccctgaatagcaagcagtaat

SEQ ID NO: 940344 - DNA, 528 bp, Homo sapiens
ataacactgaatgtaaatggactaaattctctaatcagaagacatggagtggctgaatggattaaaacacaagatccaatgatctcttgcctacaagaaacacactttacctataaaggcacacatagactaaaaacggaggaatgaaaaaaatttcatgtcagtcaaaaccaaaaagcaggagtagccatacttatatcagaaaaagtagatttcaagaccaaaactgtaagaagagacaaaaakgtcattacataatagtaaaggggtcaattcagcaagagaatatatcagttgtaaatatatatacacccaacactggagcaccagatatataaaccaaatattagagttaaagaaagagactgcaatacaataataggtggagacttcaacaccccatctttagcatttaacagatcattgagacagaaaattaacaaaggaacactggacttaatgtacactatagaccaaatggatctacatgtacagaatacttaatatttacagaatatttacaaaata

SEQ ID NO: 940345 - DNA, 789 bp, Homo sapiens
gctgctcgggaggctgaggcaggagaatcgcttaagcccgggaggcggaggttgcagtgagtggagatgacaccactacaccccagcctgggtgacagagagacatcccatctccaaaacaacaacaacaacaaaagatataaatggaaaatgaacattggatttggtactaggacggtcatgggagaccttgacaacagcagtctcagtagattagtcttgatcaaatctttactggatcaggttgaaggctgggtgagctggctcacacctgtaatcccagcattttgagaggctgaagtgggcggatcccctgagttcaggagtttgagaccagcctggtcaacatggtgaaacccmgtctctactaaaaatacaaaaactagctgggcatggtggtgcatgcctgtgatcccagctactcaggaggctgaggcaggagaatcacttgaacccaggaggtggaggttgaagtgagctgagatcacaccactgcactccagcctgggcaacagagcaagactctgtctccaaaaacaaacaaccaaacagaacaaaaagaatggaagtagtgatgatgaccagaaataattatttcaacttttttttcaggaagtgcagcagagagacaaggtagtaattgaaaaggaattcaggccaaggttagatatttttttgattgtagtttttatgtttttgttacttattgttatttaagaccggattattaaagtgtaattggaaaggttcagtagatagggaaagaaaatgatggcatagaacaaaggg

SEQ ID NO: 940346 - DNA, 433 bp, Homo sapiens
aaacaaggtgattctctcctgtgcctggcttagtggctcccatgcccatggagccttgcacactgctagcacagcagtctgagatcgatatgtgagacagcagcctggctgggagaggggcaactgccattrctgaggcttgagtaggtaaacaaaggggctgggaaactcgaacaagggggagcccaccatagctcaacaaggcctactgcctctagactccacctctgtgggcagggcatagccaaacaaaaggcagggggcaacttctgcagacttaaatgtccctgtctgacagctctgaagagaggagtggttctcctagcacagcgtttgagatctgagaatggacagactgtctcctcaagtgggtctgtgacccctgtgtagcctaactaggagacacctcccagtaggggctgacagacaccac

SEQ ID NO: 940347 - DNA, 568 bp, Homo sapiens
cacacacaggctcaaaataaagggatggaagaaaatttactgagcaaatggaaagaaggaaaaaaaaatcaggggttgcaatcctagtctctgacaaacagactttaaaccaacaaagacccaataagacaaagaagggcattacataatggtaaagggaacaattcaacaagaagagctaactattctaaatatatgtgcacccaatacaggagcacccagattaataaaacaagtttctaaaggcctacaaagagacttagactcccacacaataatagtgggagactttaataccccactgtcagtattagacagattaacaagacagaaaattaaaaagaatattcrggacttgaactcagctctggatcaagtggacctagtagacatctacagaactctgttccccaaatcaactgaatatacattcttttcagtgccacatggcacttattctaaaatcgaccacataatttgaagcaaaacactcctcagcaaaagaactgaaatcataacaaacagtctctcagaccacagagcaatcaaattagaactcaggattaag

SEQ ID NO: 940348 - DNA, 568 bp, Homo sapiens
cacacacaggctcaaaataaagggatggaagaaaatttactgagcaaatggaaagaaggaaaaaaaaatcaggggttgcaatcctagtctctgacaaacagactttaaaccaacaaagacccaataagacaaagaagggcattacataatggtaaagggaacaattcaacaagaagagctaactattctaaatatatgtgcacccaatacaggagcacccagattaataaaacaagtttctaaaggcctacaaagagacttagactcccacacaataatagtgggagactttaataccccactgtcagtattagacagattaacaagacagaaaattaaaaagaatattcaggacttgaactcagctctggatcaagtggacctagtagacatctacagaactctgttccccaaatcaackgaatatacattcttttcagtgccacatggcacttattctaaaatcgaccacataatttgaagcaaaacactcctcagcaaaagaactgaaatcataacaaacagtctctcagaccacagagcaatcaaattagaactcaggattaag

SEQ ID NO: 940349 - DNA, 640 bp, Homo sapiens
aaattcatgtatgcttcccttttaggcttagatatactgtatatacaaccagtccaaccaccaaagatcagcttcctttgtctttgaactggggccaaagaagttaagaagtttcccaatataggccctttgtagtcagccgctttccctagagctttggctgcaggcaactattggactcctttattcaatgtaatgtcatttgcttattccagaatttcaaataaatggaatctttcaataattctttattttgcttgttatcactcagcttaatattttaaagattcatgcatgctgttgggtatatgtggaatttatttattttttattgctgaagaggattctattttgtsgatatacttgatatggtttggctgtgtccccacccaaatctcatcttgaattgtagctaccataaatttctcatgttataggagggacctagtgagagataattgaatcatgggggtgattttccccatactgttctcatggtagtgaataagtgtcatgagagctgatggttttataaagggaaacccctttcatttggctctcacccttcccttgtatgctgctatgtgagaagtgcctttcaccttccaccatgattgtgaggcctccccagtcacatgga

SEQ ID NO: 940350 - DNA, 564 bp, Homo sapiens
ccactaccaccaagacgtggagactggtagtagccctgaatgccaggctgcgctgttatttattggatacaaggcaaaaggggcagggtaaggagtgtgagtcatctccaatgattaacaaggtcacgtgagtcacgtgtccactggacagggggcccttccctgcctggcagcccaggcagagagagagagagggagagagagaggacagcttacaccattatttctgygtatcagagacttttagtactttcactaattttgctactgctagctaaaaggcagagccaggtgtacaggatggaacctgaaagcgaactaggagtgtgaccactgaagcacagcatcacagggagatggttaggcctccagataactgcaggcaggcctgtccacaagaggtggaggagtagagtcttctctaaactcccccggggaaagggagactccctttcccagtcggctaagtagcaggtgttttcccttggcactgacgctactgctataccaccgtccgcttggcaatgggcatcttcccagacgctggcgttaccgctagaccaa

SEQ ID NO: 940351 - DNA, 611 bp, Homo sapiens
ataccctttatttctttctcttgcctgattgccctagccagaacttgcaacactatgttgaatacaagtgctgcgagagggcatccttgtcttgtgctggttttcaaagggaatgcttccagtttttgcccattcagtatgatattggctgtgggtttgtcataaatagctcttattattttgagataccttccatcaatacctagtttattgagagtttttagcatgaagcgatgttgaattttgtcaaaggccttttctgcatctattgagataatcatgtggtttttgtygttggttctgtttatgtgatggattacatttattgatttgtgtatgttgaactagccttgcatcccagggatgaagccgacttgatcatggtggataagcgttttgatatgctgctggattcagtttgccaatattttgttgaggattttcacatcaatgttaatcagggatattggcctaaaattctttttgttgtgtctctaccaggctttggtatcaggatgatgctagcctagtaaaatgatttagggaggattccctctttttctattaattgggatagtttcagaaggaatagtaccagctcctctttgtac

SEQ ID NO: 940352 - DNA, 611 bp, Homo sapiens
ataccctttatttctttctcttgcctgattgccctagccagaacttgcaacactatgttgaatacaagtgctgcgagagggcatccttgtcttgtgctggttttcaaagggaatgcttccagtttttgcccattcagtatgatattggctgtgggtttgtcataaatagctcttattattttgagataccttccatcaatacctagtttattgagagtttttagcatgaagcgatgttgaattttgtcaaaggccttttctgcatctattgagataatcatgtggtttttgttgttggttcygtttatgtgatggattacatttattgatttgtgtatgttgaactagccttgcatcccagggatgaagccgacttgatcatggtggataagcgttttgatatgctgctggattcagtttgccaatattttgttgaggattttcacatcaatgttaatcagggatattggcctaaaattctttttgttgtgtctctaccaggctttggtatcaggatgatgctagcctagtaaaatgatttagggaggattccctctttttctattaattgggatagtttcagaaggaatagtaccagctcctctttgtac

SEQ ID NO: 940353 - DNA, 657 bp, Homo sapiens
ttatccaaagtcattaggcaagtgcatattaaaactacaataagatgccactttactcccactagaatggataaaagactaaccatactaagtgctggcaaagacatgggcaactaaagttcttatacactgttggtgagaatgtaaaatggtacgaccactttgaaagacagttttttcttaaaagatgaaggatacacataccatataacccagccattcaacccatgcacaagtgtacatgaatgttcatagcaactttatttgtaataacagccaaaactgaaaacaacccaaatgttcaacagatggatggataaacacacagcagtatagtatccataaatgaatattactcaacaataaaaagaaataaattattgatmcatgtaaaaatatggtggaatctcaaaatcataatgctgagtgaaagaagccaaacaaaagaggctacatgctgtattatttcacttacataaaatttcagaggccaggcacggtggctcatgcctgtaatcccagcatttttgaaggccgagactggagggtcacttgaggacaggagttcgagaccagtctagccaaaatggtaaaaccccatctctactaaaatacaaaaattagccggacatggtggaacacacttgtagtcccagc

SEQ ID NO: 940354 - DNA, 657 bp, Homo sapiens
ttatccaaagtcattaggcaagtgcatattaaaactacaataagatgccactttactcccactagaatggataaaagactaaccatactaagtgctggcaaagacatgggcaactaaagttcttatacactgttggtgagaatgtaaaatggtacgaccactttgaaagacagttttttcttaaaagatgaaggatacacataccatataacccagccattcaacccatgcacaagtgtacatgaatgttcatagcaactttatttgtaataacagccaaaactgaaaacaacccaaatgttcaacagatggatggataaacacacagcagtatagtatccataaatgaatattactcaacaataaaaagaaataaattattgatccatgtaaaaatatgrtggaatctcaaaatcataatgctgagtgaaagaagccaaacaaaagaggctacatgctgtattatttcacttacataaaatttcagaggccaggcacggtggctcatgcctgtaatcccagcatttttgaaggccgagactggagggtcacttgaggacaggagttcgagaccagtctagccaaaatggtaaaaccccatctctactaaaatacaaaaattagccggacatggtggaacacacttgtagtcccagc

SEQ ID NO: 940355 - DNA, 760 bp, Homo sapiens
ctcatgagtggattaatgccattactgtgggagtgggttagtatgtcagaaggtcaatctcctttttctctctgtttcacttgtgtggttccttgacatgctatgcctttgccatgatatgatgcagcaagaagacccttaccacatgtggcccctcaatcttggattcccaggctccagaaccatgagccaaataaatatattttctttataaattactcagtttatggtattctatcatagcaacaaaaatggactaagacatacccagaagtggaattgtgggattgtatggtaattatgcctatttggggtcccttaagattccatatgcattttaaaatacattttacatatctgcaaacacattgttgggaccttgatagaattacattaaatctgcaaatcatcttgggtagtattaatatctcaataatactaagtcttttaatccgtgaacatgtgaagtcttcccatttatttatwtgtcttctgtaatttatttcagtaatgttttgtagttttcactaagtattatgcctcattggataaactcattcctaaatttggttatttttgatgttattataaattgaatggtttttctcaatttcctttttggaattttcattgctagtatttatttatctttaatctttattttttccttctttctgctagttttggatttagtttgttctttttctagtttcttatggtgtaaatctaggctgtttattcaaaatctttcttttttctt

SEQ ID NO: 940356 - DNA, 578 bp, Homo sapiens
acccactccagggcctcctttctgctaagagctgcatagatcatgggatgacttgtcagcagagaggagccagccaccccaggacctccctatctctactgagctgtttactgctcagtaaggctcctcttcttcttgctcacyttccacttatctgcatgcttcattcttattggttgcaggacaagaacttggggcctgctgaatggcaaggctagaagagctgtaacacaaactgggctcaaacatgccacttgctcaccacattgcaggagaagagatggggagaagagctgcagcccttcagggagcccagacctgggaacttcctgagctggggctgtgactccttctttggggccctgcatttcctggcatctctaagcttccagatgccactgcattccccagtgccagctggggaagctgcttgcagtgtgcctggtccagctgcagcctcgcagagagctggcacctgtgctggcacctggagctgcctgccccactgtaccagccagcagactgtgcacagtggccagaccccatgctctctccctcacacacccctcactgctcca

SEQ ID NO: 940357 - DNA, 832 bp, Homo sapiens
attttctttatctgatctgtcactgatgaatatttgggttgattccatgcctttgctattgtgaatagtgctgcgatgaacatttgcattatgtatctttacattattttatctttatgataaaataatttatatttctctgggtatatacccagtaatggaatgctgggttgaatggtagttctgtttttagctttttgagaaataccatactgctttctacaatggttgaactaatttacactcccaccaacagtgtataagtgtattscgttttctccgcaaccttacctgcatctgttattttttggcttcttaataatagccattctgactgatgttagatggtatctcattgtggttttctcattgcagccctgtagtatagtttgaaatttggtaatgtgatgcttccagctttgttctttatgcttgatattgccttggctattcgggctctttttgaatatgaattttaaaatagttttttctagttctgtgaagcatgtcattggtagtttgataggaattgcactgaatctataaattgctttgggcagtgtggccattttgataatattgatttttcctatttatgagcttggaatgtttttctatttgtttgtgccatctctgatttctttggatagtgttttattgtgattttagtagtagaactctttcacttccctggttagctgtattcctaggtattttattctttttgtggcaattgtgaatgggattgcctttctgatatggcttttggcttggctgtttgtgtataggaatgctagtgatttttgtacattgattttgtatcctaaacttt

SEQ ID NO: 940358 - DNA, 832 bp, Homo sapiens
attttctttatctgatctgtcactgatgaatatttgggttgattccatgcctttgctattgtgaatagtgctgcgatgaacatttgcattatgtatctttacattattttatctttatgataaaataatttatatttctctgggtatatacccagtaatggaatgctgggttgaatggtagttctgtttttagctttttgagaaataccatactgctttctacaatggttgaactaatttacactcccaccaacagtgtataagtgtattgcgtwttctccgcaaccttacctgcatctgttattttttggcttcttaataatagccattctgactgatgttagatggtatctcattgtggttttctcattgcagccctgtagtatagtttgaaatttggtaatgtgatgcttccagctttgttctttatgcttgatattgccttggctattcgggctctttttgaatatgaattttaaaatagttttttctagttctgtgaagcatgtcattggtagtttgataggaattgcactgaatctataaattgctttgggcagtgtggccattttgataatattgatttttcctatttatgagcttggaatgtttttctatttgtttgtgccatctctgatttctttggatagtgttttattgtgattttagtagtagaactctttcacttccctggttagctgtattcctaggtattttattctttttgtggcaattgtgaatgggattgcctttctgatatggcttttggcttggctgtttgtgtataggaatgctagtgatttttgtacattgattttgtatcctaaacttt

SEQ ID NO: 940359 - DNA, 816 bp, Homo sapiens
tggaccaagactatggggttttctagatatagaatcatgttgtctgcaaacagggatagtttgactttcttcatatttggatgcccttatttcattctcttgcctgattgctgtggctaggatttccagcactatatcaaataggattggtgagagaggaygtgtttgtcttgtgccagttttcaaggggaatgcttgcagcttttgcccattcagtataatgttggctgtgggtttgtcatagatggctcttattattttgaggtatgttctttcaatacctagattttttagagtttttaacataaaggggtgttgaattttattgctagcattttctgcatctatagggatacaatgttgcttcctttttaaatttattgaggtttgttttataacctatcctatggcctaccctgaagcatgttatatgtgtacttgagaaaaaggcctaaatatgtgtgttaggtctagttgttttatagtgttgttcaaatcttctatttccttgttggtcttcttgccaattgtttgtccattattgaaaatggggtaatgaagtttgcaactaaggaggactgtttttgaaatgctcagcttcagagatactaattgtattgatagaggcctcttttgaaactgcatctcagctcaacttctcccttttcccaaacctacttctttcacttttttataagtttgtttccaagggctctcccaacaaactctcagcatgaaatctctgtatcagtgtgtatttcccagggatttaaaatcttaaatggtcttagaaacaaacttaaagtaagattttgg

SEQ ID NO: 940360 - DNA, 769 bp, Homo sapiens
agcagccctgcacttccctaggaccgagctctcacagggaaaggcaagctacaatttctgctgtctcacaatctttgtcattgttgccttcaggctctggagggtgcatgatgactaagggcaggtgtggattcccagcacaatgcagccatcccacagaaaaagtggccagaccactttctacacaggtccccaatccacttctccttactgggtggggcctcctgacctgggactccagcaaaactaccctacccccacttgaacacatcagttgaagatggctatgcagttctctgaggaggaaatcccagatacaatccacaagccctcaccattggagctgcagtggtaccactctaactgccctcaggctggggaaggaaaaagggcctagtcactgcattgtcacctccagcacactgcagccaccatatggagaggaatccagtatctcttccctgtgagtacccccatccacccttcaccaggcaggacccccagctcatgaccacagatctgccaccccatccmtgactgagcacacctaccaatagtggctctgagttttcctggggaggggttcccagagccaacaaacagctcctctgccataatcacagcagcgattgtgtccctgctgccactgggctggggaagatacaaagagcctatggacttcacatgcactcctagcatgccatagtcaccctatgagaggagctaagtctctcctccctgtgagcccttgacactttgctcctcaaca

SEQ ID NO: 940361 - DNA, 559 bp, Homo sapiens
gccttttgcctcccaccatgattctgaggcctctccagccatgtggaactgtaaatccaattaaacctctttttgttcccagtttcagttatgtctttatcagcagcatggaaacagactaacacatatattatctcaaagttactttatattctgggatataatcaatactgtattaccgctcaagttgttacaactttggccattgggagctgtttagttaaatcccaaatcataaacctactttgaatcccaatcatagtttaaggcgaagtcttttaatataaatgtattctgtgaacttatttcaaattatgactctacgttttctccaggtctaaacttttcgaaactcaaaaatatatatccagctacwgatttacatttcctatacatgtaaaacagacaactcaaacttaatacttctgaaagcaaatgtcttgattctctctttttaaagttcttccctccaagtcttttcagactcagcaagtcgcagttaatatttttattctgtctttcaaggccaaatattcagataccttccctgaatcctttc

SEQ ID NO: 940362 - DNA, 559 bp, Homo sapiens
gccttttgcctcccaccatgattctgaggcctctccagccatgtggaactgtaaatccaattaaacctctttttgttcccagtttcagttatgtctttatcagcagcatggaaacagactaacacatatattatctcaaagttactttatattctgggatataatcaatactgtattaccgctcaagttgttacaactttggccattgggagctgtttagttaaatcccaaatcataaacctactttgaatcccaatcatagtttaaggcgaagtcttttaatataaatgtattctgtgaacttatttcaaattatgactctacgttttctccaggtctaaacttttcgaaactcaaaaatatatatccagctacagatttayatttcctatacatgtaaaacagacaactcaaacttaatacttctgaaagcaaatgtcttgattctctctttttaaagttcttccctccaagtcttttcagactcagcaagtcgcagttaatatttttattctgtctttcaaggccaaatattcagataccttccctgaatcctttc

SEQ ID NO: 940363 - DNA, 689 bp, Homo sapiens
tggtccccagaagcttggaggtgctaggaatcacagggccccatagagggagttacagcattggctagggaagctcccaggtctgggatccctgaagggccgcagcttttctctacttctcttcacttgcaatgaggtgaacaaggagcatgtttcagccttgtttgtgctacagctttattagccttatcattaggtgggtcttgagttcttgtcctgcaaccaggaagaatgaggtatgyagacaagtggaggatgagcaagacgaaggagagctttattgagggacagaacagctcagaggggaccctctttctgcagccagggtgtctcgatgagtgtttagctcttagcagagaggagaccctggagtgggaagctcctctttgcaggtaggtcatcccatcatctctgcagttctcagcagagagggtagctcctctgcaggtggtagtcctgttgtctctccgtcccctgctttggctgagcccggggtttttgtatgagcctcagaggggaggaagtgcgtgctgtttggtccatggccagcatggatgggcccggaaaaggcaccacaagttcccactccggtccccatgactgttagcctggaccccaaccttgaggccctccctggcctgaaggtgggacctcaccagggacctgccccttctgcccaggagcctgtt

SEQ ID NO: 940364 - DNA, 689 bp, Homo sapiens
tggtccccagaagcttggaggtgctaggaatcacagggccccatagagggagttacagcattggctagggaagctcccaggtctgggatccctgaagggccgcagcttttctctacttctcttcacttgcaatgaggtgaacaaggagcatgtttcagccttgtttgtgctacagctttattagccttatcattaggtgggtcttgagttcttgtcctgcaaccaggaagaatgaggtatgtagacaagtggaggatgagcaagacgaaggagagctttattgagggacagaacagctcagaggggaccctctttctgcagccagggtgtctcgatgagtgtttagctcttagcagagaggagaccctggagtgggaagctcctctttgcaggtaggtcatcccatcatctctgcagttctcagcagagagggtagctcctctgcaggtggtagtcctgttgtctctccgtcccctgctttggctgagcccggggtttttgtatgagcctcagaggggaggaagtgcrtgctgtttggtccatggccagcatggatgggcccggaaaaggcaccacaagttcccactccggtccccatgactgttagcctggaccccaaccttgaggccctccctggcctgaaggtgggacctcaccagggacctgccccttctgcccaggagcctgtt

SEQ ID NO: 940365 - DNA, 607 bp, Homo sapiens
aagataaaaactatataattattctgataggaaaagcctttgatataattccatctttgttcctgataaaactccttgtatttattatttagtaaaaacgccaaacacctcaaattaattaaaaaaaaacctcaaaaacttcaaacaatacttcagaagccwtttttaagcctctaaatctaatttccagtttgtaggaaatagaaatgataaagcagtaagttaaatatcacctgggaaaaacaatcagataaattcatttgggaaacatatgaaagtcaatttataaatatacaaatatagacacagagagagcaattatatcaatgtatatgattctcaggtgatcagtgatgacagttttagaaatgagaaaattattgccctagcaccgttgtttttttttttttcccacattttcttgcagatactagccaatccaattaagcaacacacaaaggaagaggcaaaaatgtttaaaacaagaaagaaaaaaaattattttcagacgttatgtgagaggtaacaattaaggctgattacctgcaggatcctagaaaggtctatggaaagcagatatgtctgtggtgatggtcacaggttcact

SEQ ID NO: 940366 - DNA, 492 bp, Homo sapiens
atgtgcctatcattttgacccccacattctcaccacctgtttctctgttggattagcaataaatagtgtgggatcccagagttcggggccttcgcagcctccacaatcgcgatggcctcctggtcccactttacctctcaaactgtctttttctcaatcctttgattctgccggactttgttacccccaygacctggtgttggatctgattaccccaacattcctggctgcccgatgtggggcaacaaagaccctggtgaaggaacactagagcgtgggaaagtggaggatgcatcgtcaaaggacactcgaggacgtctaaaagaaactcagcgggaaagctgagcactcggaagaaccagggtaacaatgagacaaagtgaaagcagactttctgcttatttaaatttcttaaggcatttatcacaaagagggggagtgaaagttagtactcagaatttgttatcactcactctttagtgcagtaaagca

SEQ ID NO: 940367 - DNA, 492 bp, Homo sapiens
atgtgcctatcattttgacccccacattctcaccacctgtttctctgttggattagcaataaatagtgtgggatcccagagttcggggccttcgcagcctccacaatcgcgatggcctcctggtcccactttacctctcaaactgtctttttctcaatcctttgattctgccggactttgttacccccatgacctggtgttggatctgattaccccaacattcctggctgcccgatgtggggcaacaaagaccctggtgaaggaacactagagcgtgggaaagtggaggatgcatygtcaaaggacactcgaggacgtctaaaagaaactcagcgggaaagctgagcactcggaagaaccagggtaacaatgagacaaagtgaaagcagactttctgcttatttaaatttcttaaggcatttatcacaaagagggggagtgaaagttagtactcagaatttgttatcactcactctttagtgcagtaaagca

SEQ ID NO: 940368 - DNA, 492 bp, Homo sapiens
atgtgcctatcattttgacccccacattctcaccacctgtttctctgttggattagcaataaatagtgtgggatcccagagttcggggccttcgcagcctccacaatcgcgatggcctcctggtcccactttacctctcaaactgtctttttctcaatcctttgattctgccggactttgttacccccatgacctggtgttggatctgattaccccaacattcctggctgcccgatgtggggcaacaaagaccctggtgaaggaacactagagcgtgggaaagtggaggatgcatcgtcaaaggacactcsaggacgtctaaaagaaactcagcgggaaagctgagcactcggaagaaccagggtaacaatgagacaaagtgaaagcagactttctgcttatttaaatttcttaaggcatttatcacaaagagggggagtgaaagttagtactcagaatttgttatcactcactctttagtgcagtaaagca

SEQ ID NO: 940369 - DNA, 560 bp, Homo sapiens
aattttgtgtgaacccttgtacgtgttaatcacatttttttgaatgctagctatactgcttattttgtttattgacatttagggatttaggtctaactgtctgtaaatgaaatttggggaacagtgccagaacttaaaggtcttagagtattcatttttcactgaatgaaaaaaagaattgaagagattgaagtgtgaggcatatctgtaacaaatgcctcagcacacgtccactgagtaaccatggccagttgggctaatatctatacatagaaacaggaagggcccaccagagaagatccccagacctttaaggatctggggtggtttgttctctttaacttcactgtgggtcactgacaacattttgagtgctatgcctctaactccaycttttttctcaataagccctgcggttttgtgatgagatttttctcaacataatgttttttagtagcacatgtgccataatagcaaaactaatcatacaaaaaatcctagatttatattaatttttactatttactttgttattttaaaaacaaaaaaaatgaaaaaaa

SEQ ID NO: 940370 - DNA, 741 bp, Homo sapiens
tggctgcctcctaaaatccaaagtcgcccaccaaaccatataacttttcataggggtaattgtttaccttaggatgctgcaaaccatgggactcctaaaatcttcatcaatatggcaggactttgatactgtaaatgatttatgtttcaccttcatgtgttttactatgacatccagagtaccggccactttctgttcaccaagtccaattagcataatgtcaacaacatagtataccagcatratatgtcaaggtgacagagagaaagagaatacatatagccttggggaaagacagtgaatgtgtactcaaatcctttcttaatgagacagaactgatcttgaccatccttcctgaggaggttggaagatgacttgtttgccagatggatagccacaacccaggaaccaaaggctgtgctgctctgttccagtaaagataccacatccaattaggtagctacatacaattgggacgcaacttagataacgttccggtagtctgctgttattcacgaaaatccatctgttttttgcagagaccatgtagatggattgaatggggatatgatgaggatgaccacccctgcatttgctaagttcttgggagtggcatcgatctcagccattccactggaatagggtatcgctttgattttctatctttggtgggaatgggcactttctgggtttccatttgtttcttccttcctggttcttatttcacaggtcaggaaacaa

SEQ ID NO: 940371 - DNA, 608 bp, Homo sapiens
tgggaagtcactgcatgtcactgataatggatccaagtgacagagcaagctagccatgcaggagccgtctgaacaggctttatttaagagaggaaccaggagggctgatgaaaactcagcagaggttgtgcagcctcttaagcaaccagccataggagatgtattcactgacatgatacaggagagctgatatagttgggctctgtgtccccatccaaatcttatcttgaattgtaatccccatgtgatgagggagggacctggtaggaggtgattgggtcatgaaggtggtttcccccatgttgttctcatgacagcgagtgggttctcacgagatctgatagtttaaaagtggtggttccycccaccgcctctctatctctctcctgccaccatgtaagatgtgtctttttttccctttcaccttctgccatgattgtaagtttcctgagcctccccagtcatgaagaactgtgagtcaattaaacctctctactttatacataaccccatctcaagtagttctttatagcagtgtgagaacaaactaatacagaaaacccccagaaataagacaaaggcaaagcggagtctccacctatgcacag

SEQ ID NO: 940372 - DNA, 643 bp, Homo sapiens
taaagcaggcagaagaacacggggggactagacttgctgagtcttctggcctccatctttctcctgtgctggattcttcctgcccttgaacatcagatttcaagttcttcagtgtttggactcttggacccacaccagtgctttgccaggggctatcaggcctttggccacagactgaaggctgcactgtcaacctccctacttttgaggtttttggacttgggctggcttctttgcccctcagcttgcagatggcctattgtggaacttcaccttgtgactgtgtgagtcaattctcctagtaaactccctttcatatattcatstatcctattagtcctgtccctctagagaaccctgactaatgcacaccttaataaaaaatgtcatcatcctggccaattccatctgcaaagaccctattccaagtaaggtcatattctgaggtttcaagtggatgtgtgttttttggggacactgttcaaccccaccacactgtctttgaatacatcaggctgcttcccagcccagggcttatgcctctgcagtgccctctgcctgggaccccgatgcccacatctctgtgtggctgcctcttcttcttcttctacactttgagcttaaatatcccttcttcttagca

SEQ ID NO: 940373 - DNA, 551 bp, Homo sapiens
tggtgtcactcttgttatcgatccttgtagccaaggataattatctcaaaacaattatttaatcctcctcatttttcctttaataaaaaacctttttctttttttaactccttgaatacgcacatagtttactgtggcacatgtattcccattgcaatatccattctcgaataaatagcatttttttaaggagagcctctctctatgttatttaggttgacaactctaatattgaagctttcttgcattattggaataaatcccaaatggcgatagttttttttttattgccatgctgggttctttttkatatcatttgtttaatattttgtaccgatattcatatagataactatacaggtttctgtgcattttttttcagatagtgaatcagtatttactcactttataaaaatgaactcagtagtttttttttttcttgctctggaacattttaaaacagcactggaattatatgatcttaaaaagtttagttaaattcccctagagctgtctggatctgggccttttgaagagttaggtctttactt

SEQ ID NO: 940374 - DNA, 626 bp, Homo sapiens
aggcttacttctaaaaataaaaggagggccgggagtggtggctcaagcctgtaatcccatcactttgggagccgaggtgggcggatcacctgaggtcaggagtttgagaccagcctggccaacatggtgaaaccttgtctctactaaaaatatgaaaattaggccaggtgcggtggctcatgcctgtaatcctagcactttgggaggcagaggcgggtggattgcctgagctccggagttccagaccagcctgggcaatacggtgaaaccccgtctctactaaaatacaaaaaattagccaggtgtggtggcatgcacctataatcccagctactcgggaggctgaggctggagaattgctagaacccgggaggcggaggttgcagtgagctgagatggcctcactgcacactagcctgggtgacagagsgagactccatctctaaaaaaacaaaaaacaaacaaacaaaaaaactgaaaagtagctgagcatggtggcatgtgcccgtagtcctagctactcgagagggtgaggtgggagggtcacttgagccctggaggcagaggttgcagtgagccaagattgtgtcactgcactccagcgttggcgacagagtaagactatc

SEQ ID NO: 940375 - DNA, 553 bp, Homo sapiens
gttgtttttgtgactcaagcatcacaagtagtttggtcatcaggaatgtgattttctaaagtgatgagccactcttggtaaagttccaaggaaaacagagcacaatctcttcttaatttacacaatggatatattcttggaaaagtcaatgaattttaaacccatgtaaaaatatcccttctatttacatgtaaagagttagattattggctcagatcattataagcaggttgctccatctatgtgaaaatccaagtgggcattcaaaattcatatgggatgaggggaagtttgttattttgtgggatgtctagcatccctattttcttcctaccaaatgccagaagcacccccaattgttgtagcaaatggttaaactcagagtctgattctgtcatggctkaattacaaagcaaattgaattcattaactcacaatttgtcttttgtgaaatttagagcactgactgggaagaagtgggattttgaaaactggagtatggacataggaagagatgcaagcaaactgggggcctcaaacccctaaattctac

SEQ ID NO: 940376 - DNA, 682 bp, Homo sapiens
ctcaaactacaaaacatagtccttcccattcttcccacccctttccaaaggcagaggagtcttaccccatagccactgccaccccagaccactgtgagttcaatgactcacaattactgcattctccctcctctagtgcctggagaggcactctgcattactgccagactggctagccaatgttcccrtaagggccaaagtctcttaactcagcatgtggtaaatactgcatggcctgggacacacccttcaggacagtgggcttctctttggcccagggcaggtccataaatgctatgactcaaatcctggaattagcgacccccaaaagcctgcttgttgctcttcacccctgtagctgtgctgctacctaagatgcaagacgaagtcccctttactcttccctctgcttttctcaagcagaagaaattttgccccataggcaccacatctggtaatgtcctgagtctcatctgaagccaataagtctcagatactcaccccaggccattaatgtagtacctgggtataactgctggttattcagggcctaagggcttttcagttagcagatgatgaatgctgtcaggactagggtctttccttcaagacagtgggttcccttctggcccagagtgtgcctagaaatgttgtctggaagctaggctttggaatggaggcc

SEQ ID NO: 940377 - DNA, 682 bp, Homo sapiens
ctcaaactacaaaacatagtccttcccattcttcccacccctttccaaaggcagaggagtcttaccccatagccactgccaccccagaccactgtgagttcaatgactcacaattactgcattctccctcctctagtgcctggagaggcactctgcattactgccagactggctagccaatgttcccataagggccaaagtctcttaactcagcatgtggtaaatactgcrtggcctgggacacacccttcaggacagtgggcttctctttggcccagggcaggtccataaatgctatgactcaaatcctggaattagcgacccccaaaagcctgcttgttgctcttcacccctgtagctgtgctgctacctaagatgcaagacgaagtcccctttactcttccctctgcttttctcaagcagaagaaattttgccccataggcaccacatctggtaatgtcctgagtctcatctgaagccaataagtctcagatactcaccccaggccattaatgtagtacctgggtataactgctggttattcagggcctaagggcttttcagttagcagatgatgaatgctgtcaggactagggtctttccttcaagacagtgggttcccttctggcccagagtgtgcctagaaatgttgtctggaagctaggctttggaatggaggcc

SEQ ID NO: 940378 - DNA, 682 bp, Homo sapiens
ctcaaactacaaaacatagtccttcccattcttcccacccctttccaaaggcagaggagtcttaccccatagccactgccaccccagaccactgtgagttcaatgactcacaattactgcattctccctcctctagtgcctggagaggcactctgcattactgccagactggctagccaatgttcccataagggccaaagtctcttaactcagcatgtggtaaatactgcatggcctgggacacacccttcaggacagtgggcttctctttggcccagggcaggtccataaatgctatgactcaaatcctggaattagcgacccccaaaagyctgcttgttgctcttcacccctgtagctgtgctgctacctaagatgcaagacgaagtcccctttactcttccctctgcttttctcaagcagaagaaattttgccccataggcaccacatctggtaatgtcctgagtctcatctgaagccaataagtctcagatactcaccccaggccattaatgtagtacctgggtataactgctggttattcagggcctaagggcttttcagttagcagatgatgaatgctgtcaggactagggtctttccttcaagacagtgggttcccttctggcccagagtgtgcctagaaatgttgtctggaagctaggctttggaatggaggcc

SEQ ID NO: 940379 - DNA, 682 bp, Homo sapiens
ctcaaactacaaaacatagtccttcccattcttcccacccctttccaaaggcagaggagtcttaccccatagccactgccaccccagaccactgtgagttcaatgactcacaattactgcattctccctcctctagtgcctggagaggcactctgcattactgccagactggctagccaatgttcccataagggccaaagtctcttaactcagcatgtggtaaatactgcatggcctgggacacacccttcaggacagtgggcttctctttggcccagggcaggtccataaatgctatgactcaaatcctggaattagcgacccccaaaagcctgcttgttgctcttcacccctgtagctgtgctgctacctaagatgcaagacgaagtcccctttactcttccctctgcttttctcaagcagaagaaattttgccccataggcaccacatctggtaatgtcctgagtctcatctgaagccaataagtctcagatactcaccccaggccattaatgtagtacctgggtatmactgctggttattcagggcctaagggcttttcagttagcagatgatgaatgctgtcaggactagggtctttccttcaagacagtgggttcccttctggcccagagtgtgcctagaaatgttgtctggaagctaggctttggaatggaggcc

SEQ ID NO: 940380 - DNA, 631 bp, Homo sapiens
gtgtcctttttatatagtgacttcttttcctctgggtagatacccaatagtggaattgctggaacaaataatagatctacttttagttctttaaggaatctccatgctgttttccacagtggttgtagcagtttccattctgaccagcagtgtgaaaatgttcccttttcaccacatccatgacaatgtctattaattttttgattatggtcattcttgcaggtataacatggtatcgcattgtggttttgatctgcatttccctggtaattagtgatgttgagcatttctccatatgcttgttggccatttgtatatcttctttgggaattgtckagaatcccggcactttgagaggctgaagtgggtggattgcttgagcccaggagtttgagtcagcctgggcagcatactgaaaccatgtctctacaattgaggccttgttccccataatttggaactttccttcagatttgaccaagtcaggtatagttaatcaaacctaaggggaaaaagatcaaaacaacaaaaacaacaaaaacaggaacaaaaaaaaaaccaaaaaagttaagcaaaacaaacaattgcacaatttataaaattactgggctttctaatggtaagaagaaat

SEQ ID NO: 940381 - DNA, 554 bp, Homo sapiens; identical to SEQ ID NO: 924138

SEQ ID NO: 940382 - DNA, 594 bp, Homo sapiens
agccaaagagggaaaagccgcttataaaaccatcagatcttgagagaactcacttactgtcatgagaatagcagcatggcagtaaccactcccatgatttaattacttcccgctgggtcccccccatgacacatggggttatgggaactataattcaagatgagattttggtgggaacacagagaaaccatatcattccaatcctggccccacccaaatctcatgtcatcacatttcaaaagaaaatttttccttcccaacggtcccccaaagtcttaactaattccagcattaacccaaaagtccaagtctaggatctcatctcaaacaaggcaagtcccttctgcctatgagcctgtaaaatcaaaagcaagttaattacttcctagctacaatggggatacaggcattgggcaaatacacatgctccaartgggagaaattggccaaaatgaaagtgctgcaggccccacacaagtccacaatccagcagggcagtcaaatcttaaaactctaaaatgatttcccttgactccctgtctcacatccaggtcatgctgatgcaagaggtggttcccatggttttaggtagct

SEQ ID NO: 940383 - DNA, 620 bp, Homo sapiens
agccaaagagggaaaagccgcttataaaaccatcagatcttgagagaactcacttactgtcatgagaatagcagcatggcagtaaccactcccatgatttaattacttcccgctgggtcccccccatgacacatggggttatgggaactataattcaagatgagattttggtgggaacacagagaaaccatatcattccaatcctggccccacccaaatctcatgtcatcacatttcaaaagaaaatttttccttcccaacggtcccccaaagtcttaactaattccagcattaacccaaaagtccaagtctaggatctcatctcaaacaaggcaagtcccttctgcctatgagcctgtaaaatcaaaagcaagttaattacttcctagctacaatggggatacaggcattgggcaaatacacatgctccaaatgggagaaattggycaaaatgaaagtgctgcaggccccacacaagtccacaatccagcagggcagtcaaatcttaaaactctaaaatgatttcccttgactccctgtctcacatccaggtcatgctgatgcaagaggtggttcccatggttttaggtagctccacccctgtggctttgcagggtaca

SEQ ID NO: 940384 - DNA, 600 bp, Homo sapiens
aagcaaggcaaagagatgctttattgagtgacagaacagctcagaggagatccacagtgggtagctgctttttgcaggcaggtcatcccatcccctagctgagtctggggtttttatgggcttcagaggggaggaagtacatgttgattggtccatgggtgtccatctgtaggcccagagaaagcaccataaattctcattctggtccacagaattggcagcacagccccaggccttaggctgtactcggcctgaaggtggggttttactgggaaccaactccttctgcccaggtgcctgtctgcctcctgcagccattatactgccatccacggtgcccagagtacccaggctgttcatgccaagaggcaactgcaggcctgcaccacaccattcttagcctctgcttgacctcycttcttgctcatcagtgcccaaagtccagacgggactgaggtggcagggagcttatgtgtcagtgttgctccaagcatttgcataccggccagcttgtgacagcacccaggctcagccataacttttctctgaaaccagagcaagtgccggaagcaggaagaggccaggcagtgggaataggca

SEQ ID NO: 940385 - DNA, 412 bp, Homo sapiens
ggccttaggctgtactcggcctgaaggtggggttttactgggaaccaactccttctgcccaggtgcctgtctgcctcctgcagccattatactgccatccacggtgcccagagtacccaggctgttcatgccaagaggcaactgcaggcctgcaccacaccattcttagcctctgcttgacctcccttcttgctcatcagtgcccaaagtccagacgggactgaggtggcagggagcttatgtgtcagtgttgctccaagcatttgcataccrgccagcttgtgacagcacccaggctcagccataacttttctctgaaaccagagcaagtgccggaagcaggaagaggccaggcagtgggaataggcacttctgatcctgtggtggcaggagggtccctgagagtgcccag

SEQ ID NO: 940386 - DNA, 678 bp, Homo sapiens
caggctgggcggagcgtggccacttccgccaggaggcgcctttgtgtcttctaagttaagcctattcagtggatttcttattcctggaacccaaacctgggcagtaaaccctccggggcttagaggccgctgcctccacagactggccgatcccgccctgaagtgccgctggtggaacagcccgggcggaaccgcccgggcggaaccaacgggctgccgcggggggtggggccacggtccccccccttctgccttcagtggaacggccccggcggaaccaacgggccacggggatgcactacgcgcaccgtcgtcctctccctctgcctgcagtggaacggcccgggcggaaccaacgtgcggccgcccggagcactcggcgcgccgtgtccctccccgtgtggctgcactgcarcggcccgggctggaccaccaggcggcagcggagaggcacttaaaagccccgtgttaccctagaccttaaaaaaaaaaaaaaaactgcgtgtttccacccccgtcggcctgcagtggaagggcccgagcagaaccaacgggggaggggacgctgagcgcgccgtgtttctcctcccgtctgcctggagtagaacggcccgggcggaaccaacgggcagccgcgggggcgttgtgggccgcggcgcgtttccccggctccgtggc

SEQ ID NO: 940387 - DNA, 690 bp, Homo sapiens
agagcagctttccctcaggctgggcggagcgtggccacttccgccaggaggcgcctttgtgtcttctaagttaagcctattcagtggatttcttattcctggaacccaaacctgggcagtaaaccctccggggcttagaggccgctgcctccacagactggccgatcccgccctgaagtgccgctggtggaacagcccgggcggaaccgcccgggcggaaccaacgggctgccgcggggggtggggccacggtccccccccttctgccttcagtggaacggccccggcggaaccaacgggccacggggatgcactacgcgcaccgtcgtcctctccctctgcctgcagtggaacggcccgggcggaaccaacgtgcggccgcccggagcactcggcgcgccgtgtccctccccgtgtggctgcactgcaacggcccgggctggaccaccaggcggcmgcggagaggcacttaaaagccccgtgttaccctagaccttaaaaaaaaaaaaaaaactgcgtgtttccacccccgtcggcctgcagtggaagggcccgagcagaaccaacgggggaggggacgctgagcgcgccgtgtttctcctcccgtctgcctggagtagaacggcccgggcggaaccaacgggcagccgcgggggcgttgtgggccgcggcgcgtttccccggctccgt

SEQ ID NO: 940388 - DNA, 740 bp, Homo sapiens
cctccccgtgtggctgcactgcaacggcccgggctggaccaccaggcggcagcggagaggcacttaaaagccccgtgttaccctagaccttaaaaaaaaaaaaaaaactgcgtgtttccacccccgtcggcctgcagtggaagggcccgagcagaaccaacgggggaggggacgctgagcgcgccgtgtttctcctcccgtctgcctggagtagaacggcccgggcggaaccaacgggcagccgcgggggcgttgtgggccgcggcgcgtttccccggctccgtggctctggggcactgaggagcggcgcccgcggggcagcgaggagcccgatgcagggttctgcgcgtcatttccggtcccgcgggcgccccgtgaagcccacctggatccgccagcgctgtgccactccccagtgccgagctccgagctgtctccgcggcctcgcgcccggcccctccaccgcgcgcctctyaggccccgcccgccagcgtccctttgttgtgaaggcgccggggcctagcgctatgcctgcggcggagactgcatcaggctctcggtgggttctgcgtgcggggtgctctgctcggtgatcggtgctgggtgctgcgtgctcggtgctcggtgctgggtgctgggtgccggtactgatgctgagtgtgcgggcgtccggggtttccctgcccggattcgctcctgggggtcctttcctatggctggcgctgtgcgcggaaaacgct

SEQ ID NO: 940389 - DNA, 740 bp, Homo sapiens
cctccccgtgtggctgcactgcaacggcccgggctggaccaccaggcggcagcggagaggcacttaaaagccccgtgttaccctagaccttaaaaaaaaaaaaaaaactgcgtgtttccacccccgtcggcctgcagtggaagggcccgagcagaaccaacgggggaggggacgctgagcgcgccgtgtttctcctcccgtctgcctggagtagaacggcccgggcggaaccaacgggcagccgcgggggcgttgtgggccgcggcgcgtttccccggctccgtggctctggggcactgaggagcggcgcccgcggggcagcgaggagcccgatgcagggttctgcgcgtcatttccggtcccgcgggcgccccgtgaagcccacctggatccgccagcgctgtgccactccccagtgccgagctccgagctgtctccgcggcctcgcgcccggcccctccaccgcgcgcctctcaggccccgcccgccagcgtccctttgttgtgaaggcgccggggcctagcgctatgcctgcggcggagactgcatcaggctctcggtgggttctgcgtgcggggtgctctgctcggtgatcggtgctkggtgctgcgtgctcggtgctcggtgctgggtgctgggtgccggtactgatgctgagtgtgcgggcgtccggggtttccctgcccggattcgctcctgggggtcctttcctatggctggcgctgtgcgcggaaaacgct

SEQ ID NO: 940390 - DNA, 471 bp, Homo sapiens
ctgccagccggctctcccttgccttcagggtcagcagcttaactatttctctctctggtaacgagtgcacctgtacagtgttggcagggcattatactttttacagacaatagtggtgtagagccaagtgatgaccttcccrttttatggcttgatagctgtttatacattatatatggaattgtgtgcctgtgctccaaactcactgagtcatgcaggatgtttacctcagcctctcctgcctggctgcagtgcagccatattcctcacaagatgctagcgaggttacagagaaaaaaggaatgcttttatactcttggtgggagtggaaattagttcaacaattgaggaagaccgtgtggtgattccttaaagatctagggacagaaataccatttgacccagcaatcccattactgggcatatacccaaaggaatataaatcattcttttacaaagacacttgcatgc

SEQ ID NO: 940391 - DNA, 633 bp, Homo sapiens
tttaacacaaaacccaatcttcaaaaaactcaccacgcacttcagtaaaagtgtattgcaataatacctcatttatctaacaccatcagttaatgagttgttttccataaaagtgaatcttccaaataactgtatttttcttttaaagcattctgtgtgaccatgttacattttagcctttctaaaacaattgcatacttccgtatcttttgatgttaagtaaacataactttttctttgtgaaaatgaattattgttaccagttaccgcctaggcttccagggctactgaggtgcctaagatgctttgatggtggtgttcaggccccttctttgccttagcatcttcccctgcttctcgtrtgcttatctgtaaatcctacttacctcttctcatcagagagaggtggagtataacaggctagagcaggagtttgggactttgacacacctggagtgaattccagctctgccactaactacctgtataaacttaattaacatctactgggcgcggtggctcacgcctgtaatcccagtgcttcggaaggcaggggtgggaggatcacttaaggccaggagttcgagaccagcctgggcaacatagtgagaccctgtctctacaaaaaaattt

SEQ ID NO: 940392 - DNA, 650 bp, Homo sapiens
gtaacaaatcacaggggggctctaattctttgccttctgctaaaatgaagaagggctaaacaaatttttcgctgatagatctttaaaaatacttttgcattgacagtaatttttggcacaaaagttgtataaaggtccaagaattaaacgtcataactgtaattaaaaagtgttttcattctcattcataaataaaggttttgtttgtttgttttagcgtttacctcarttaaaatgacaagaatagaagtaatatcaaactctaacttattctagcaataagtagcattcagatacagatctatgagggaaaaaccaaaacccgttaagagataattttgttcttttagatttaatgtatacttatcaatattttaatattttaattagttatattaaatgattcaataatagaatgtattttgatacattattaatacatgcttactactaatacttgtaatattacagaagaaatattttttaacatttacaacctgttaggaaattaaaaaattatatttcttttatatttttgctgcaaagaagtataacagggtcattagtagaagatttaagaataaaataaaattatattttgtgaattaaattatatgaaatttggataaaacttgatgcgaaagggaact

SEQ ID NO: 940393 - DNA, 581 bp, Homo sapiens
atagaaatggccaataagcccataaaagatgctctgtatcattagttgataggaaaatgtaagtcataaccacaatgagataccacttcacacccatgaagtggtgaagatgtggaaacatgggaaccattacatgttcctggtgggaatttatgactacagtgatatgaacttgggaataatttgacagattcttaaaatattagacgattaccacatgacctagctattccacttcctggtatatacccaagggaaatgaaaccatgtgtgcacagaaatgttgtatacaaatgtttatagtggcatttttcataatagccagtggaaacaaccctaatgtccttcaaatgatgaatgagtatataatagtaaataaaatgtgatacgttcatagaatggattatttttcagcaataaaaataaatgagstattgatattttctgcaacatggatgaattttgcaaaaatgctagatgaaataattcagtcaaagtagatcacaaattttcccagaataagcaaagctatagaaatcgaaagtacataacagttgcttagggctgaggaggggaatgta

SEQ ID NO: 940394 - DNA, 599 bp, Homo sapiens
gtaggggctaatgcaactgatgacttgaagtagaagccagtgctcatttaccatttcataaaccctagggtctttaagaattatactaaatctattctccctgtgctctagaaatggaacaacaaagcctggatgacaaaatgtacatttacagcatcatttactgattattttgactccactgttgagacctacttctcaaaaaaaaaaaaawttttttttcaaatgattgctgctcattgacagtgcacctggtcacccaagagctctgatggagaagcacaaggagattaatgttgttttcacgcctgctaacacaacgttcattctgtagctcatggatcagggagtcattttgattttcaagtcttattatttaagaaatacatttcacaaggcgatagctgccataaatagtgattcctatgatggatctggacaaagcaaattgaaaactttctgggaaggattcaccattctagatccccttaagaacatttgtgcttcaatgggcaaaataaaagatcaacattaacaggagtttggaagaactggctttgaggtgttcaagatgtcattgaaggaaatagctacagttg

SEQ ID NO: 940395 - DNA, 575 bp, Homo sapiens
ggctggctgctgtttgcctccaacacagtgtgtgcagtgcatgcagggtgggccctgagaaaggggtgagcaatgtctacaggatccagagcttggaggggctgaaagttagtgtattccatagagctccagagaagtgggcactgtggactgaactgaraagttgccaacccaaggcttacaggtctgcacgaaaaggagagccaaggtcatagtgacgcaaaaccagtacaaaaatgtttatagcacctttattcttaatagccagaaaccaggagcaacccaaatgtccttcaatgggtgaatggttagacaaatggtggtacatccacaccgtggaaggcaactcagcaaagacaggctactgatacacacaagacttggacaaatctccaggaacaatgttaagtgaaaaaagccaattctaaataattgcatattttattatttcatgtatatcacattcttgaaatgacaaaactataaaaatagagaatggattcgtgattgccaagggtcagggatgggggttagagggaggtatacgtggctataaaagggcaacacgaaggacc

SEQ ID NO: 940396 - DNA, 575 bp, Homo sapiens
ggctggctgctgtttgcctccaacacagtgtgtgcagtgcatgcagggtgggccctgagaaaggggtgagcaatgtctacaggatccagagcttggaggggctgaaagttagtgtattccatagagctccagagaagtgggcactgtggactgaactgagaagttgccaacccaaggcttacaggtctgcacgaaaaggaragccaaggtcatagtgacgcaaaaccagtacaaaaatgtttatagcacctttattcttaatagccagaaaccaggagcaacccaaatgtccttcaatgggtgaatggttagacaaatggtggtacatccacaccgtggaaggcaactcagcaaagacaggctactgatacacacaagacttggacaaatctccaggaacaatgttaagtgaaaaaagccaattctaaataattgcatattttattatttcatgtatatcacattcttgaaatgacaaaactataaaaatagagaatggattcgtgattgccaagggtcagggatgggggttagagggaggtatacgtggctataaaagggcaacacgaaggacc

SEQ ID NO: 940397 - DNA, 818 bp, Homo sapiens
atgttttcaagctaaaaccgggaacaaagcaagaatattcacttttacttctcccattcactatcaggaagtcttagccagagtaactaacaagaaaacgaaaaaagacatacagaatagaaaggaagaaataaaacygtccctattcataaataatatgactgttcacatagaaaaaaaacaataaattaatatgtgagtttaacaaggcctcaggatacaaggttaccacacaaaattcaatcttacttctatataccaaaacaaacactgaaaattaaaattttaaagactgatcgaagacagccaactagaagtagctagtatgtgccggaaacatccaggtgtgcacactgggaatcatcaaggaaataactcgatccacagagaatagagaggagccaggcaggacaaccacccatctgggagaggcaaggagccagaggaggctccccttccatgggaacagtgactgagtgagagatcccagggacccacgcttcttccacagacctttgcaacgctgaggtcaggaggtccccctcatgaacctactaccagggttcactctgacacacagagctaggtggagtctgggcagagccactgatcagggtcctaggagcctttggtccccgggcatcccaggattagcagccacagctctggcaaaggggtaggttaggctcccttaagggaaaggggctgaatccaaggggctgagcagagacagtctgcaggcctcacttccacggcacctggtggggtaagacccactgacctggaactccagccacatgtgaccatggtagcagctc

SEQ ID NO: 940398 - DNA, 589 bp, Homo sapiens
acctaggtccaactgaacatcagagaaacatgtttttcatctatttgctggagctcagaacataataccccaaagtataccatcttggcatgtggagtactttgaactaatggagtttggaagaacctcagaaactggatctttctgacctcccaygctcccgtctcctgcccttctttctctctgaaagcaaatcatagaaaccaaaactgctgtcctccagggcaggtcatagaaactaaaactcctctcccacaaagcaaaccataaaacctagaaagatcactctctctcttctcccttgaagacccccattcagaggggtcctgtcccatacccaggaggaaggaatgctacacagagagtctgagaaggatctgaacagatagggcttaatggatttcccccttagtctattcccattagatcatcctctttttgtccaatcacatttctacacagcttcattgaatctaagcataaaaatagacagttttccctgggcttttgggtcttcatttctgaagcctcctgtgtcacatagatcctaattaaataaatttgttatgcttttctcctgttaacctgc

SEQ ID NO: 940399 - DNA, 570 bp, Homo sapiens
ccccttggccaaacatctttgtgcagggaacaacacacaccattgtgcacagagtccctacttgatcccatgcacatctgtgacacattcattgttcttcccatcaccaaacacaaggaaactaggagagtccatcccagtgaaaccctcacctttgcccagattgcaatgattttatcagaacatcttaagacttaggcattaaggaaatccaggtttacagtggaattggcatgaacatgaaaatttcctgacctrcttttaaagcacctaacgtagatgatgtttgcttaacagctcttcacagtcctcagccctcacatgtatcccccttttctcaggcatttgttctgcaaagcaactcacacaactctgtctgtttgggagagctgttccattcaagcaccttgggatattgctggcatagtgtgccacatacgccaccttccatagcacagagctatagctcaggacctagatggcgagctttgccttgaccatgtggtctacacatgccatcaggagtgtcttttttaatgtgtgaaatgtgttgtttgtgggaggctgcac

SEQ ID NO: 940400 - DNA, 485 bp, Homo sapiens
ggaaaaaacgagcagaaaaactggaaactctaaaaatcagagcgcctctactcctccaaaggaacacagctcctcactagcaatggaacaaagctggatggagaatgactttgacgagttgagagaggaaggcttcagaagatcaaactactctgagctatgagctacaggastaagttcgaaccaatggcaaagaagttaaaaaccttgaaaaaaaaattagatgaatggataactagaataaccaatgcacagcagtccttaaaggacctgatggagctgaaaaccacagtgtgaaaactacgtgacgaatgcacaagcctcagtaactgacgggatcaactggaagaaagggtatcagtgatagaagacgaaatgaatgaaatgaagtgtgaagagaagtttagagaaaaaagaataaaaagaaacaaacaaagcctccaagaaatatgggactatgtgaaaagaccaaatctacgtctcat

SEQ ID NO: 940401 - DNA, 598 bp, Homo sapiens
gttccagttatctattctgaagaaaccatccccaaaagttggcagcttaaaacaactcattattacttgttgtttggcttagagagtcttggtggccagctcatctcacacacatttgcagccaagctggattgtgtgaaagcacagtggggtggtgwgcagggtggcccactagtggttgggagtggatgttgctggaggctcactagttgttgggagtcggtgttgctggaggctcagtgggggatgtcaatgcgtgtagctagtcatggactggccatgtggtttctatcatgaggtctcaggggagtgggatttcctgcctggtgactggctttctcctggataagtgttctgttttctcagcctggcttctgaagtccccaaataccacctttgtcaccttctgttggccaaacaagtcagtagtctgggcaaggtttaaggggaattggttctcacagagacaggagcaggaaagaatttgtcacctttagtctaccagaaatgagatttttataacaagtttgttccaaatacattccagttccccttgtgaatacttttttgactcacagggtatttcaaagtttattac

SEQ ID NO: 940402 - DNA, 621 bp, Homo sapiens
ttattctacagtttgccttttaccctgttggttgtgacctttgaggaacagaagtttttaggtttgatatatttttgcttttactgcctgagattttaatgtcatatcctaaaaattattgacaaattcaacgtcataaggcattttccaaatttgttttccctaggagtttgatagttctagttttacatttaggtttataattcactttgaattaattttaacrtggtgtaaggtaagcgtccaacttcattgttttgcatgtagatatacaattttcccaacaccatttgttgaagaaagtgtccttcgccattgagtggtcttggcatccttgtggaagatcattggaccatatatgccagggttggtttctgaggtctccgttgtgttggtccataagtgtgtcaagagtgtctttttgccatgaccacatatttttttttggcttattgcagttttgtaattgttttgagacctttaattttgttctgtttcaagattgatttgcctattcatgggccccatagattccatatgaattttaggataggattttctgtttatcaaaaatgtcattggaatctttataaggattgtattgaatctaggtcacttcga

SEQ ID NO: 940403 - DNA, 685 bp, Homo sapiens
gaggtcctcaaatggttaaacatatagttagcatatgatgcaacagtttcactcccagggataaaaataaaaacaaaaaagagaaatgaaaacgcacatccacataaacacctgtacagaaatgttcccagcagcattattcgtaacagctacaaagtagamacaacacaaatgtccatcaactggtagaataaatataatggggcatatccatacaatggaatgttatttggcaataaaagaaatgaagtactgatatatgctacaacatgggtgaaagttgaaacaatgatgccaagtgcaagaagccagttgcaaaagactaaatattttatggttccatttagatgaagggtccaggatgagcaaaactatagagacagaaagtagattagcagttgctgagggctgatggggagaggatgaagaattgagaggtgattactgaaaggtatggggtttctttttgggttgataaaaatgttctaaagttgattgtggtgataattgtcaactctgtgagtattaaaaactatgaaattgaaaattttaagagggtgaattgtacagtacatgaattacatctcaatgcagtgttacaaaatttttttaaattaaaaaagggtggatttggaattgagaggcaataaattgataactggcataaaatctcaaaaaatggaca

SEQ ID NO: 940404 - DNA, 685 bp, Homo sapiens
gaggtcctcaaatggttaaacatatagttagcatatgatgcaacagtttcactcccagggataaaaataaaaacaaaaaagagaaatgaaaacgcacatccacataaacacctgtacagaaatgttcccagcagcattattcgtaacagctacaaagtagacacaacacaaatgtccatcaactggtagaataaatataatggggcatatccatacaatggaatgttatttggcaataaaagaaatgaagtactgatrtatgctacaacatgggtgaaagttgaaacaatgatgccaagtgcaagaagccagttgcaaaagactaaatattttatggttccatttagatgaagggtccaggatgagcaaaactatagagacagaaagtagattagcagttgctgagggctgatggggagaggatgaagaattgagaggtgattactgaaaggtatggggtttctttttgggttgataaaaatgttctaaagttgattgtggtgataattgtcaactctgtgagtattaaaaactatgaaattgaaaattttaagagggtgaattgtacagtacatgaattacatctcaatgcagtgttacaaaatttttttaaattaaaaaagggtggatttggaattgagaggcaataaattgataactggcataaaatctcaaaaaatggaca

SEQ ID NO: 940405 - DNA, 661 bp, Homo sapiens
aaataatctgggaggtcctcaaatggttaaacatatagttagcatatgatgcaacagtttcactcccagggataaaaataaaaacaaaaaagagaaatgaaaacgcacatccacataaacacctgtacagaaatgttcccagcagcattattcgtaacagctacaaagtagacacaacacaaatgtccatcaactggtagaataaatataatggggcatatccatacaatggaatgttatttggcaataaaagaaatgaagtactgatatatgctacaacatgggtgaaagttgaaacmatgatgccaagtgcaagaagccagttgcaaaagactaaatattttatggttccatttagatgaagggtccaggatgagcaaaactatagagacagaaagtagattagcagttgctgagggctgatggggagaggatgaagaattgagaggtgattactgaaaggtatggggtttctttttgggttgataaaaatgttctaaagttgattgtggtgataattgtcaactctgtgagtattaaaaactatgaaattgaaaattttaagagggtgaattgtacagtacatgaattacatctcaatgcagtgttacaaaatttttttaaattaaaaaagggtggatttggaattgagaggcaataa

SEQ ID NO: 940406 - DNA, 605 bp, Homo sapiens
gaacagtataaattatgctcttgtgtttgaaaatttatccaaaatgttcactatttcaggaaactacataaccaatggcaactttgctcatatgtagtctatctccatcagtctatagctgccattgatggcgattctatatctaagtacaagcatgtgactattccattatgtcttctggtataatagttcccaaggattaattatatgtaaatacgtactatggactccccctcaaaatttggtttggatttcaagactgattacacactgaccaaaaaggatatgaaaagctatattactctcattgttggtgggattgcaaaatggtgcagccactttgggagactggcagtttcttgcaaagctaaatgkagtcttaccataggatccagcagtcacacccctaggtatttacccaaataaatgggaacttatatctacacaaaaacctgcatatggatgtttatagaagctttattcataattgccaaaacttagaagcaatcaagatgtccttcagtaggtgaatgaatgaacaaagtgtggcacagcagagcaacagaatattactcagcagtaaaaagaaatgagtcaccaagcca

SEQ ID NO: 940407 - DNA, 592 bp, Homo sapiens
atgtgtgctttgaattttaaaagtagaggagacagccaggcacagtggctcacgcctgtaatctcagcactttgggaggccgaaacaggaggatcacctgaggtcaggagttgaagaccagcctggccaatatggcaaaaccccctttctctactaaaaatacaaagatttgctgggcatggtggcgggcgcctgtaatcccagctactcaggaggctgaggtgggagaatcacttgaacccgggagrtggaggctgcagtgagccaagatcgtgccactgcactccagcctggatgacagagcaaaactccgtctcaaaaaaaaagtcttgatttccaaacttgccacctatcatctgtcccaagtgtcaggactccttgcatttatttaccagttcaaattacccagaactagtttctgcttttctggaacaaaagatagaaaacttgaacaggtagatgtagaatatgttaatgatacatttgtgtatctttatgcattgttctccatgttcaccagggtctcctctacagggaggtagactgcctctccattcagacaagagttatgtttatgtattttccaaagcaa

SEQ ID NO: 940408 - DNA, 605 bp, Homo sapiens
tggaagagggattgcggttgggatggaggagagttaggactggctgtgaggaatgaagggggtcaggggttgccagaggagctggagagaagaacacagatttggggacattaatgaggccaagccaggcaatgcaaagggcaagaagagcaagggggaggtcacagttcagatccctggggactggacaggcgggcaggcagagcccacaggcaaatagcagcccacccggggagcccgagggcaggtgcctgcctcagcagttgtccctagcaactctgtgagaagcagacagagctgccaattctttttttttttttttttttagacagagtctcgctctgtcacccaggctggagtgcagtggcgtgattttggctcactgcaacctctgcctcccaggttgaagcgattcttctgccttaccctcccaagtatctgggactacaggcgygtgccaccatgcccagctaattttttgtgattttaggagagatagggtttcactgtgttagctaggatggtctcgatctcctgacctcgtgatccgcccacctcagcctcccaaagtgctgggattacaggcatgagtcagcacgcccggc

SEQ ID NO: 940409 - DNA, 773 bp, Homo sapiens
aaccctaggccaggtgccatggctcactcctgtaatcccagcactttgggaagctggggcaggtggatcaccttaggtaaggagttcaagaccagcctggccaacacggtgaaaccctgtctctactaaaaatacaacaattagctgggcatggtggcggacgtatgtagtcctagctacttgggaggctgaggcaggagaatcgcttgaacccaagaggcagaagttgcagtgagctcagatcgcaccactgcactccaacctgggcgacaagagtgagactctgtctcaaaaaatcaaacaggctgggcgcrgtggctcatgcctgtaatcccagcactttgggaggccgaagtgggcagatcacctgaggtcgagagttcgagaccagcttgaccaacatggtgaaaccccgtctctactaaaaatacaaaattagccaggcatggtggcgcgtgcctgtaatcccagctacttggaaggctgaggcaggagaatcgcttgaacctgggaggcggaggttgaggtgagccaaaatcgcgccattgcactccagcctgggcaacaagagtgaaactccatctcaaaacaaacaaacaaaaacaaacaaacaaacaaaaaccctattactgactcagcacttactatgcgtcaagcacccagctaagtattttagacataacctcattttgtcttcataacatgcctatgtagtttatcctcatccccgtttaacagatgatgaaatggaggatcagaggagatcagcagca

SEQ ID NO: 940410 - DNA, 560 bp, Homo sapiens
tttgaaaaacagtctagcacttccacaaaagcctacacataaaattctcatatgacctaacaattccacttctaggtatttacccaagagaaaggaaaacctgtgtccacacaaagagttgtaaaggaatgttcataaccacatgataataatagccaaaaagtagaaataacccaaatgtctgtcagaggatgagtggataaatgaactgyggtatttccataatatgacagagtataacttagccataaaaatgaatgaagtacagatacatgctacaatacagacgaaccttgaaaacattacgtcactcacaatagaccacatatttatcagtgcatttatatggaatagccagaataggcaaacctatagagacagaaagtagattggtggtttcaagggcccagcaagtgttggggggcctgagaggtgttggctaagaggtatgcggcttaattttggagtggtgaaagtgtcctaaaattgattgtgagaatgattgcacaactctgaatatactaaaagccattgaattatacactttaaatgggtaaatt

SEQ ID NO: 940411 - DNA, 526 bp, Homo sapiens
  misc_feature 487, 488, 489, 490, 491, 492, 493, 494, 495, 496, 497, 498,499, 500, 501, 502, 503, 504, 505, 506, 507, 508, 509, 510,511, 512, 513, 514, 515, 516, 517, 518, 519, 520, 521, 522,523, 524, 525, 526: n = A,T,C or G
catgttctcagtcataggtgggaattgaacaatgagaacacatggacacaggaaggcgaacatcacacactggggactgttgtggggtggggggaggggggagggatagcatttggagataggcctaatgctaaatgacgagttaatgggtgcagcacactaacatggcacatgtatacatatgtaacaaacctgcacrttgtgcacatgtaccctaaaacttaaagtataataataaaataaaaaaatgtatatagggaatgattaaaaaaactgtcattaggcattagctagctgcatcaatcagagacacggaaaacaaacatatgagtacatgtgaaattttggagcaagggccagactaatgtaggaataggtggcattttcctaatatgcttattctatggcagatggttcctatattttacagcctgaatagttccatcactgtgaattctctatctctagtaaaatacaatcaatttgnnnnnnnnnnnnnnnnnnnnnnnnnnnnnnnnnnnnnnnn

SEQ ID NO: 940412 - DNA, 777 bp, Homo sapiens
cgctgtcagctgaggagagcatcaggaagtgccagggaagctcggatctgccttgctctgggaggggtaagtgaggtctctcagggcttcccacggcctctccatcacaattcaaatgaattcaatgcacacacatctttttgtttgtttgtttgttttttgttttctgctttttggtttttttgttttttatttttttattttattttttattattatattttaagttttagtgtacatgtgcgcaatgtgcaggtttgttacatatgtatacatgtgccatgatgatgtgctgcatgcattaactggtcatttagcattaggtatatctcctaatgctatccctccccgctgcccccaccacacaacagtccccagtgtgtgatgttccccttcctgtgaccatgtgttctcattgttcaattcccacctatgagtgagaatatgccgtgtttggttttttgtccttgcratagtttgctgagaatgatggtttccagtttcatccatgtccctacaaaggacatgaactcatccttttttatggctgcacagtattccatgctgtatatgtgccatatttccttaatccagtctatcattgttggacatttgagttggttccaagtctttgctattgtgaatagtgccgcaataaacatacgtgtgcatgtgtctttatagcagcatgatttataatcccctgggtatatgcccagtaatgggatggctgagtcaaatggtatttctagttctagatccctgaggaattgtcac

SEQ ID NO: 940413 - DNA, 618 bp, Homo sapiens
aatataaagcaggcagaaaaacgtgaaaaagcgagaccggcctagcctcccagcctacatctttctcccgtgctggatgcctgcccttcaacatcatactccaagttcttcagtttttcagttgtaagtttatcctgtatcattttcccccagcacacaacataccagtcactcttacctcctttctctttctcaccaagattctttctgtctcctaatcacaattactctttctttcaccagaaagtctctagycataactctttttatgggtgcctcattctctccttcagttttcactcagaagccatgttagaaagcccatattgtccattttatctaatgtgttattactttgaaaaacaccacctcatttactttcttcacaaatttcatcatgattaatcattgatttgtttctttatttctatatttcctttctcctctactaactctatgaaagcaacaactttatatctattgtgttgctgatgtctagtgcctatcaaagtgtgggtacagaataggcactcaaagaatactttctcaggaaaacagttttttatgcagtaggtttttatttaattatattatatgtggggggatattctgcagtct

SEQ ID NO: 940414 - DNA, 644 bp, Homo sapiens; identical to SEQ ID NO: 922130

SEQ ID NO: 940415 - DNA, 631 bp, Homo sapiens
agtggggaggatgtagtaatttcccagagtaagccagaatgatggttccaaattcaagaaatactaaatgtatttaactccactcgcaaaggaaacatttgggttatcaaatgactcattgtgtaactaagtgtcctgtttttaaaagtttttctctctctctttcctgccccgttccttgtcttgcctttaacaatgagataatagtctttgctctcactctttctcccaggcacccctttgcacagtgtttcccttatctaattacgtgtttgtttagaagttccagagactaaatctkaaagcaattcagtctactgtgggattctcccccacctggagattacttcaaggctgcagttaatttgcaacctggctgtcccagagatggcactagcccacacaccagatggggcaacagctcaagatagtcatcagaacaagtcacataggctgacccctatcaccactcctgcatgcccatcataccaaactcccctttagcctttacccttgacctagaaagctgaaacggtttctttaaggcactagctttggccatttttccactgctagctctggaataaagtaactttcctttagctgtagttcatctttgttattggctttg

SEQ ID NO: 940416 - DNA, 590 bp, Homo sapiens
ggtaaaataggagaaaatcttctccaccaagagcttggctgggagttctcaaacatgacaccataaacataatctacaaaaggaaaaattgatagattagacctcatcaaaattaaaatgttctgctttatgaaaagccctgtgaagaagaggaaaagacaccctacatgctgggagaaaatatttgcaaacygtttttcagatatgaaaaaggttcatgtctgaaaccttgaaaaagtttcaagacatgaaaaaggcatgatgtctggagtaaaaaactatcaacagtcaaccataagaaaacaaccaaattaaaatataggccagaaatgaaagacatttaaccaaataagatctaaagatgtccaataaggacacgaaaagatgttcaacatcactagacaatacgggaatgcaaatagaaaccacaatgacatgtcacaacacacctatttgaatggctaaaataaaaaatagtgataacaccaaattctggagaggatacaaagaaactgcataacccatacattgctggtaggaatgaaaaatgatataagaattctggaaaataatctggcagttcattataa

SEQ ID NO: 940417 - DNA, 630 bp, Homo sapiens
gctctgtcccagggagatgagagttttatctatatgcccctgactggagctgctacctttctttcagagatgccttgcccaaagaggagaactctagagaggcagtctggctaaagcggctttgccaagttgcagtgggctccacccagtttgaacttcccagtggctttgtttatactgtgagggggaaaaagcctactcaagcctcagtaatggcagatgcccctccccccaccaagctggagcatcccaggtcaacttcagactgctgtgttggcagcgagaatttcaagccagtggatcttagcttgctgggctctgtggggatggggtccactgagctagaccacttgtcttgctggtgttccaggcgccactggggtatgaaaagagactccctgtagctagcttggtgtctgcccaaatggccgcctggttttgtgcttgaaacccagggccctggtggcataggcatcasagtgaatctcctggtctgtgggttggaaagaccatgggaaaagtgtagtatctgggccagaatgtaccattcctcacagcacagtccctcagagcttcccttggctaggggagggaattcctcaaccccttgggcttcccaggtgaggtgat

SEQ ID NO: 940418 - DNA, 580 bp, Homo sapiens
  misc_feature 441: n = A,T,C or G
tcagggacaataacacacatggagctgtcatctcctatgataacaatgccttctcatggaatgcttcctgaacgaactgcctgaggctattttacagttaacattttttcttttaataccgtgtactcagaaagagtrtactctaaaacaaccataaaaattatagtatagaaaatatattaactagtaacagagtaatttcttatcatgatcaaatattatgtactgtacagaattgtatgtgctatgctatcttttctattaattgtttatacttaggagatggagtttagctcttgttgccctggctggagtgcaatggcatgatcttggctcactgcaacctctgcctcctggattcaagcgattctcctgcctcaacctcccgagtagctggaattataggcgcccaccgctacgcctggctaattttgtatattnagtagagatggggttttgccatgttgaccaggctggtcttcaactcctgacctcaggtgatccacccacctcagccccccaaagtgctgggattataggcacgagccaccgcgccctgccccatgtgctatacttttat

SEQ ID NO: 940419 - DNA, 586 bp, Homo sapiens
acctagaggaaatgaacaaatttctagaaaaaaaatacagcctaccaagattgaatcaacacaaaataggaagcttaaacaaaccaataatacaataaagaggttgaagaagacattaaaaacttttaaacaaagaaaagcctagagccagattacttcatggttgaattctgccaaatattcaaataattattgccaatccttctcaaactctttcccaaaataatgggatgttccaaaaacatcttacaaggctagaattacctttctacttaagctagagaaagatcccacaggaaaagaaaactggaagtcaatatgtctaatgaacattagtgtaaaaatactcaataaaacactagcaaaactaattyagcaacacagcaaaaaaattatgtctaatgaacattaatgtaacaatactcaatgaaacactagcaaaactaatttagcaacacgtcaaaaaaattatacatgatgaccaagtgtgatatatccctggcatgcaaagccagtttaatatatgcaaatcagtcactgtgatatatcacattaacagaatgaaaaataaaagcatgatcagctc

SEQ ID NO: 940420 - DNA, 731 bp, Homo sapiens
aagctaaggaatgctggatattttatgttaaggtatgagtaaagcgtagggctgaggaacaaagaggatatgcatacctcccctcctcagggagttcaggctccccattttttgctggttcctcgagagtgaggttttcatagaaaaatactctggtgcaccattttaattttcttgtcatttcttttattatatatttttgagttgtttttctagtggtttccctgaagattaccattagcaacttagtttataacaatctagttcaaattaataccaatttaattccgatagtacacaaaactttgctcctatttggctctgtacctctctctcctttatgctgctattaacacaaattatatctttatacatttttcccattgacatagatttatcgttaatgctttatgaatttttttaatcaaataagaaaaaatacgtttatactgtcttttatgtttacctacrtagttacgtttactggtggttttatttcttcatgtggattcaagttactatctagtgtattttcaatttagcctgaaggacctccttggtatttcttttaggttggatctgcttagtgacaaattctctcagtttttgtttatctagaaatgtcttaattcctccaacatttttgaagaccagttttgctggatatagaattcttggttgacacttttttcccttcagcgctttgactatgccatctcactgtcttctag

SEQ ID NO: 940421 - DNA, 597 bp, Homo sapiens
aagtttgccgccttccctgatgctatccccaaatctctctgctgcttctcttctctctgagaagcagagagcaccctgcttctcagtatctgtcaggctttggttcaaaagtaataacgtctttccaggacagttcaaatacttgggtgaaattctggaaagcctttatgtatctgtcagggtcatctgaaaatttgccaagattccccttcatttgccttaagtcctgtagagacaaggggacttggaccttactgaggccgtattcactaggcatctgttgtaggggcaggagtgagactggggcctrtctagagtgaggatttctaggagggggcaaacaagagagagaaactggagggggacgatggggtggacccagaggagcagggccagagaaagcttgttcccctgctagacatgcctctggggtttgttcctttagttccctgggattgtcccttggcagcctctcctgagatgacaaacaggagggctggatcaatcctgcaatgttggcaaaggtccgaattatactgtaaggtgaagaaagcctgcacatagaaagcctcagaccatttgcccttatgtttacag

SEQ ID NO: 940422 - DNA, 768 bp, Homo sapiens
gctgtgggctccgtgaagccagagggagccaggaattggtgagagtcctgcccgctactgagttggaggtgcaggagcccctactcctgggcacagccacagccaacctgctgcagctccaggccggcattcctgtgctcttggggacccagaaagccccctgtccttgttrgctagaaagtgcttgctccttctctctggcctctccccactcccagctctcccgggacagcaaagttgtgggcgagcccggacactgttgcaacccagttctgtgtgcgcaccctcagggcagcactgacacaccaggcccctgctgcctcagccctctccaaactctgggcactcaccagctaggtagggggtccaggggttgctgaaggcagcttggtcctggactgcaggatcctcatagcatggacagcctggacaccactgatggcatgttaaaggcagacaggttcctaggcaggaagcggcgagtccccagtgaaaccccaccttcaagccagggaaggcctgaaacctggaagctgggttgccagttccgggagaagtccttgccttggagtgagaacgtcattgatgatcattcagccattcagatactgctcttttcagactcacttgtggccgcccatagaccaatcaacatatacttcctccattctgagcacattaaaaaaacccagactcacacacttgtcaggacaacctccctgcagaaacgaactctccctgcggattttctctccaccaagagctaca

SEQ ID NO: 940423 - DNA, 768 bp, Homo sapiens
gctgtgggctccgtgaagccagagggagccaggaattggtgagagtcctgcccgctactgagttggaggtgcaggagcccctactcctgggcacagccacagccaacctgctgcagctccaggccggcattcctgtgctcttggggacccagaaagccccctgtccttgttggctagaaagtgcttgctccttctctctggcctctccccactcccagctctcccgggacagcaaagttgtgggcgagcccggacacwgttgcaacccagttctgtgtgcgcaccctcagggcagcactgacacaccaggcccctgctgcctcagccctctccaaactctgggcactcaccagctaggtagggggtccaggggttgctgaaggcagcttggtcctggactgcaggatcctcatagcatggacagcctggacaccactgatggcatgttaaaggcagacaggttcctaggcaggaagcggcgagtccccagtgaaaccccaccttcaagccagggaaggcctgaaacctggaagctgggttgccagttccgggagaagtccttgccttggagtgagaacgtcattgatgatcattcagccattcagatactgctcttttcagactcacttgtggccgcccatagaccaatcaacatatacttcctccattctgagcacattaaaaaaacccagactcacacacttgtcaggacaacctccctgcagaaacgaactctccctgcggattttctctccaccaagagctaca

SEQ ID NO: 940424 - DNA, 768 bp, Homo sapiens
gctgtgggctccgtgaagccagagggagccaggaattggtgagagtcctgcccgctactgagttggaggtgcaggagcccctactcctgggcacagccacagccaacctgctgcagctccaggccggcattcctgtgctcttggggacccagaaagccccctgtccttgttggctagaaagtgcttgctccttctctctggcctctccccactcccagctctcccgggacagcaaagttgtgggcgagcccggacactgttgcaacccagttctgtgtgcgcaccctcagggcagcactgacacaccaggcccctgctgcctcagccctctccaaactytgggcactcaccagctaggtagggggtccaggggttgctgaaggcagcttggtcctggactgcaggatcctcatagcatggacagcctggacaccactgatggcatgttaaaggcagacaggttcctaggcaggaagcggcgagtccccagtgaaaccccaccttcaagccagggaaggcctgaaacctggaagctgggttgccagttccgggagaagtccttgccttggagtgagaacgtcattgatgatcattcagccattcagatactgctcttttcagactcacttgtggccgcccatagaccaatcaacatatacttcctccattctgagcacattaaaaaaacccagactcacacacttgtcaggacaacctccctgcagaaacgaactctccctgcggattttctctccaccaagagctaca

SEQ ID NO: 940425 - DNA, 873 bp, Homo sapiens
gctgtgggctccgtgaagccagagggagccaggaattggtgagagtcctgcccgctactgagttggaggtgcaggagcccctactcctgggcacagccacagccaacctgctgcagctccaggccggcattcctgtgctcttggggacccagaaagccccctgtccttgttggctagaaagtgcttgctccttctctctggcctctccccactcccagctctcccgggacagcaaagttgtgggcgagcccggacactgttgcaacccagttctgtgtgcgcaccctcagggcagcactgacacaccaggcccctgctgcctcagccctctccaaactctgggcactcaccagctaggtagggggtccaggggttgctgaaggcagcttggtcctggactgcaggatcctcatagcatggacagcctggacaccactgatggcatgttaaaggcagacaggttcctaggcaggaagcggcgagtccccagtgaaaccccaccttcaagccagggaaggcctgaaacctggaagctgggttgccagttccgggagaagtccktgccttggagtgagaacgtcattgatgatcattcagccattcagatactgctcttttcagactcacttgtggccgcccatagaccaatcaacatatacttcctccattctgagcacattaaaaaaacccagactcacacacttgtcaggacaacctccctgcagaaacgaactctccctgcggattttctctccaccaagagctacacacttgctgggatgacctgcctgtagagagggactacccgttacaggtctcctctctgctgagagcttgacacttggtgggatgacctgcctgcagaaaggagct

SEQ ID NO: 940426 - DNA, 802 bp, Homo sapiens
aaacctggaagctgggttgccagttccgggagaagtccttgccttggagtgagaacgtcattgatgatcattcagccattcagatactgctcttttcagactcacttgtggccgcccatagaccaatcaacatatacttcctccattctgagcacattaaaaaaacccagactcacacacttgtcaggacaacctccctgcagaaacgaactctccctgcggattttctctccaccaagagctacacacttgctgggatgacctgcctgtagagagggactacccgttacaggtctcctctctgctgagagcttgacacttggtgggatgacctgcctgcagaaaggagctacccactatgcgtctcctctcctgagagctgttctgtcacacaataaagcacctctctgccttgctcatcctccagttgtccatgtacctcatttttcctggacaaggacttgggaatggatgacccgccaaagggttgaactgaaagagttgtaacacaaacagggatgaatcatgcccccactctcaccatgctggaggcaatgagaagaagagaagagctgcagccctttgtggagcctcgactaaggagcttcctgagccagrgctgaaacactctctttggggctctgtggttcctggcatcttgcaagctcccaggtgcctccatgttcccctcgtccagatgttggttcccacagcagaagccacttgtggtacatctgatccagccacagccttgcacagagtcagcacctgtggtggtgcttggagctgctcaccctgccac

SEQ ID NO: 940427 - DNA, 659 bp, Homo sapiens
gcggctcacacctgtaatctcagcactttgggaagctgaagcggatggatcacttgaggtcaggagttcgtgaccaccctggccaacgcagtgaaaccctgcctctactaaaaatacaaaaattagccgggtatggtggtatgcatctataatcccagctacccgkgaggctgaggcacgagaatcgcttgaacctgggaggcagaggttgcagtaagccgagatcgcgccactgcactccagactgggcaacagagtgagactttgtctcaaaaataagtaaatagataaaaaaagccaggtctagaaactcaaatattgcttggtctcattcacatgtgggagctaaacaagctgatttcatagaagtagagagtatagtggtagttaccagagactagggtggctagaggggtagggtataggaagatgctggtcaaaggatacataattacagttagataggaggagtaaatttcaagatatctattgtatagcaaggtgactatagttgatggtatattgtattattgaaaaatgtaaacagtggaagttatgtgctctcattacaaaaatgacagctatgtgagttaatgtatttttaaactagctagagttgttaaccattctacaatgtatatatacttcaaaacatcatg

SEQ ID NO: 940428 - DNA, 659 bp, Homo sapiens
gcggctcacacctgtaatctcagcactttgggaagctgaagcggatggatcacttgaggtcaggagttcgtgaccaccctggccaacgcagtgaaaccctgcctctactaaaaatacaaaaattagccgggtatggtggtatgcatctataatcccagctacccgtgaggctgaggcacgagaatcgcttgaacctgggaggcrgaggttgcagtaagccgagatcgcgccactgcactccagactgggcaacagagtgagactttgtctcaaaaataagtaaatagataaaaaaagccaggtctagaaactcaaatattgcttggtctcattcacatgtgggagctaaacaagctgatttcatagaagtagagagtatagtggtagttaccagagactagggtggctagaggggtagggtataggaagatgctggtcaaaggatacataattacagttagataggaggagtaaatttcaagatatctattgtatagcaaggtgactatagttgatggtatattgtattattgaaaaatgtaaacagtggaagttatgtgctctcattacaaaaatgacagctatgtgagttaatgtatttttaaactagctagagttgttaaccattctacaatgtatatatacttcaaaacatcatg

SEQ ID NO: 940429 - DNA, 659 bp, Homo sapiens
gcggctcacacctgtaatctcagcactttgggaagctgaagcggatggatcacttgaggtcaggagttcgtgaccaccctggccaacgcagtgaaaccctgcctctactaaaaatacaaaaattagccgggtatggtggtatgcatctataatcccagctacccgtgaggctgaggcacgagaatcgcttgaacctgggaggcagaggttgcagtaagccgagatcgcgccactgcactccagactgggcaacagagtgagactttgtctcaaaaataagtaaatagataaaaaaagccaggtctagaaacwcaaatattgcttggtctcattcacatgtgggagctaaacaagctgatttcatagaagtagagagtatagtggtagttaccagagactagggtggctagaggggtagggtataggaagatgctggtcaaaggatacataattacagttagataggaggagtaaatttcaagatatctattgtatagcaaggtgactatagttgatggtatattgtattattgaaaaatgtaaacagtggaagttatgtgctctcattacaaaaatgacagctatgtgagttaatgtatttttaaactagctagagttgttaaccattctacaatgtatatatacttcaaaacatcatg

SEQ ID NO: 940430 - DNA, 659 bp, Homo sapiens
gcggctcacacctgtaatctcagcactttgggaagctgaagcggatggatcacttgaggtcaggagttcgtgaccaccctggccaacgcagtgaaaccctgcctctactaaaaatacaaaaattagccgggtatggtggtatgcatctataatcccagctacccgtgaggctgaggcacgagaatcgcttgaacctgggaggcagaggttgcagtaagccgagatcgcgccactgcactccagactgggcaacagagtgagactttgtctcaaaaataagtaaatagataaaaaaagccaggtctagaaactcaaatattgcttggtctcattcacatgtgggagctaaacaagctgatttcatagaagtagagagtatartggtagttaccagagactagggtggctagaggggtagggtataggaagatgctggtcaaaggatacataattacagttagataggaggagtaaatttcaagatatctattgtatagcaaggtgactatagttgatggtatattgtattattgaaaaatgtaaacagtggaagttatgtgctctcattacaaaaatgacagctatgtgagttaatgtatttttaaactagctagagttgttaaccattctacaatgtatatatacttcaaaacatcatg

SEQ ID NO: 940431 - DNA, 585 bp, Homo sapiens
ctgttattatcatcattctacagacaaccttttgaagaggagcagagattgccttaccactgactaaggagtgtcttcctcctacttagggttcggtaatgacgtgaaaagcatttttaaaaagacagtaaatggagcatatttggggtatgcattttactattgctggtgccgatatgtgctacagcaaaacctctgccaagagaggataaaaggagtcagctcatagtgggtggatactagaactagacagaggttcrgattgacattgtttagggggatggggagatctaacaggaaaaggagatgactcagaaagaacttccccaacagtttaggatgccccctaatgatgggaacattctaagatatccgctagagaaaaagtccaggaaggtatggcatagatttctcattgctgcttcaacattcatttaccctttctttattagtaagagagctccaattttatttagggtggcaatgtgcctagctaaaataatgcatttcccagcttatcttgagattaaagtggccacttcactgagctatgaccagtgagaagtaaacaaaagctattagaat

SEQ ID NO: 940432 - DNA, 758 bp, Homo sapiens
ctgttgctacatcagggaaatgaccttagattttcccgcctgtccaccgaattatctatactctattctagacagctcaggtcctgagttgagtgaatttggtaactattttagtttgctgaaagaccctggctgcctgcagccgaggtcggtcagtgattttccccaaaggtgtttgtagggtccctagctgggggactccatgtccacccactcactggctcttcctccttggtcccccattccgctaatgctgcctgggcacctgccttccacccaggggcaccgggcaccgaggagatgggcgggagcaaactgggacatttcttcccttgagagtgatattctctccagggagggaccacataggggaaccagaagacacaaaaggccattacacttcaaaaaatagatttaggggtccagggcattccattaacgttgcatggtggtgaggtctgtgccgttagtgtagccatcacctaagcagtatacatttgtacccattaagcagtttctcgtcccgcatccccctcccacccttccaagtctccagtgcctctcactccacrcccggcatccatgcgtatgcattgtttagctcccacttataagtgagaacatgcggtctttgaccctctgcgtctgctatatttcacttaagataatggcttccagttccatccatgttgttgcaaaagatgtcagtgtgctatgagcgaagccagcagcgcacctgcgcaagcacactgtgggca

SEQ ID NO: 940433 - DNA, 710 bp, Homo sapiens
tgtggcacatacccccacccttgctccctctctcaccggttgatgttcctgctgtccgttcaccttccatcatcagtaaaagccccctgaggcccctccagaagtggagcagatgtggcacctgcttgtacaacctgcagaaccatgagctaattaaacttcttttctttataaattacctggctcgagtactcctctcctctcctctcttttcctttcctttcctcttttttgtttcactcttgtcacccaggctggaatgcaytggcgacatcttggctcactgtaacctccacctccagggttcaagcgattctcctgcctcagcctcctgagtagctgggattacaagtgcgtgccaccacccccagctaatttttgtatttttactagagatgggtttcaccatattggccaggctggtcttgaactcctggcctcaggtgatccacccacctcagcttcccaaagtgctgggattacaggcgtgagccacctcgcccagcccctgaggatttctttacagctacacaagaacggcctaacacaggagtcataggctgaaatcctaatccccacggcgatggcaataggaggtggggccttggaaaggtgatcaggtcatgaagccttcacaaatcggattgattagtgcccttataaaaaatgccccagagaacacattggcccctctgccatgtatgaacaca

SEQ ID NO: 940434 - DNA, 603 bp, Homo sapiens
gtggcatgtgcttctggggaggcctcaagaagctttcaatcatggtggaaggcaaagagggaacaggcacatcacatggtgagaatgagaacgaaagggagaaagtggaggtggggagggggtgctacatatttttaaaccaccagatctcatgtgaactcagagagctcaccatcaaggggatcgcccaagycattcatgaggaatctgctcccatgatccaaacacctcccaccaagccccaacttcaacactggcaattataatttaacatgagatttggtaggggtatactttctttcttttccttttcttttttttttttttgagacgaattcttgctcttattgcccaggctggagtgcagtgatgcaatcttggctcactgcaacctccacctcccaggttcaagcgattttcctgcctcagcctcccaagtagctgggattacaggtgtgcatcaccacgcccggctgatttttgtgtttttagtggagacagggtttcaccatgttggccgggctggtctcaaactcctgacctcaaatgatatacccgcctcagcctcccaaagtgctgggattacaggcatgagccactgca

SEQ ID NO: 940435 - DNA, 637 bp, Homo sapiens
gatgtgatttgaatgtagggtagcaagatgaagttgaatacatttgtgaaatctgaatttcatattaacaatgaataaattttttactataagtatatcccattgtcagaggcattttaactagaacaactccatcttgaatagggggtaggtaaaataaggctaagacctgccaggctgcattcccagtaagttaaggcattattactcacaggatgagataggaggctggcacaagatacaggtcataaagaccttgctgataaaaacaggttgcagtaaagaagccagctaaaacccaccaattcaagatggcaataacagtgacctctggccgtcctcactgcctcactcccaccagcaatatgacagtttacaaatgccatggcaatgtcaggaagctacactaggtggyctaaaaaagggaggcataaataatccaccccttgttaagcatgtaataaaaaaaaagccataaaaatgggcaaccagaagccctcagggctgttctgtctatggagtagccattcttttattcctttactttcctaataaacttgctttcactttactgtatggattcgccctgaattctttcttgtccaagatccaagaactctctcttggggtctggacc

SEQ ID NO: 940436 - DNA, 569 bp, Homo sapiens
cctcaatctacagtacgtatcaagcaattcacctttttcttgtaatgccatgatttttctctgcttcttgggagcacttccggcatcactagtggcacttaggtgtcatttgaggtttatagtatcgtactaaacataatgaaaccgcgagagatcactttttactggaatatacaatttattggaaagatgaactgcttgcttggagatgattaatgtcacatggtactttaagcaaatattcactcttgagctcacctcattaacaacaggaggtggctacaaaattatttcaatagtacagggtgtagtacagttaaatttatgtagttaygatttaatactgcatctttactcttttgagacagggtttctctcagtgtcaaatgccaccatgtgtggctaagtgtgtggtataagttgtgacaatttttaactttttataatagatttgtatatatttgtagtagtaaatgataaaatagactagtatctacatatattttaagcactcatgacatacctcttactttctatttttcttttcttttcttttttttttttttttt

SEQ ID NO: 940437 - DNA, 620 bp, Homo sapiens
agcaagactcttctgggtagtcgactcaaagtcccacaaatcatgaggttttccagtctagttggtgttaacaggcagcatacccaccagtgggctctgttctctctaatccttgggtgagtctttctatagacttgagtcatcttctcccaagcatgtgccagtcacttctcagctgaatactcaagggggccacctgcaaatctccagagccctctctgtctctatgtagctctcttccgtggtccccagtcttgcaaactcttgctgccttggtctcccaagactcagctaagcctccttagctgaggccatcctctgtgctccktctgtgccacagtaggcaatgggaggtggtcagatggggcgatcttggggcttgcttcttttgtttcccatctctcaggggggtcactgatcttcattgcctgatgtccaaacatgtcttggccacttttatttggtccctttaaaaaatttgaaccaacacattggctcccctgggtccttgttgacacattctgctgatcttaggacttggcctccataatcccgtgagccaattccttataataaatctctttctacataagtatatattgatatatgcatcatattgg

SEQ ID NO: 940438 - DNA, 600 bp, Homo sapiens
gtctccagagaatgtcagaggttttcacaagagcccctcctatcacaggcttggaggtgtagaaggaaagaatggtttcatgggcagggctgttggccttgctgctttgtgcagtcttgggacttggtgccttgcatcccagccatggctaaaaggggtcattgtacacctcaggccattacttcagagggtgcaagccccragcctcggcagcttacatgtggtgttgggcctgtggctgcagagaagtcaagaattaaggtttgggaacctttgcctagatttgagaggatgtttggaaatgtctggatatctaggcaaaggtgtgttgcaaggtcaaagccctcatggataacctctgctagggcactgcagaagggaaatgtggggtaggagctcccactcagagtcaccactggggaacttcctagtggggctgtgagaagacggccaccatccccagaccccagcatgaaagatccactgacggcttacactgtgtgcctagaaaagccacagcaactcaacaccagcccgtgaaagaagccaggagagtagctgtaccctgcaaagtcagggggtggagcttcccaagaacat

SEQ ID NO: 940439 - DNA, 600 bp, Homo sapiens
gtctccagagaatgtcagaggttttcacaagagcccctcctatcacaggcttggaggtgtagaaggaaagaatggtttcatgggcagggctgttggccttgctgctttgtgcagtcttgggacttggtgccttgcatcccagccatggctaaaaggggtcattgtacacctcaggccattacttcagagggtgcaagccccgagcctcggcagcttacatgtggtgttgggcctgtggctgcasagaagtcaagaattaaggtttgggaacctttgcctagatttgagaggatgtttggaaatgtctggatatctaggcaaaggtgtgttgcaaggtcaaagccctcatggataacctctgctagggcactgcagaagggaaatgtggggtaggagctcccactcagagtcaccactggggaacttcctagtggggctgtgagaagacggccaccatccccagaccccagcatgaaagatccactgacggcttacactgtgtgcctagaaaagccacagcaactcaacaccagcccgtgaaagaagccaggagagtagctgtaccctgcaaagtcagggggtggagcttcccaagaacat

SEQ ID NO: 940440 - DNA, 629 bp, Homo sapiens
aacgtctaaaaaaatttttttaaagaacggaatatcaaataattgtcggccaactataaaaggtataacctacatgtaatgggactatgacagggagaaaaaggagagaaaggaacagaagcaatagttgaggtaataatgactgagaatctcccccaatttttttgtttttttgtttttttgtttttgagacagggtctggttctgtcacccagactggagtgcaatggtgcgatctcggttcactgcaacctctgcctcctgggctcaagccatcctcctgcctcagcctccctagtagctgggactacaggcatctgctaatttttgtatttttttgtagagatggggtttcgccatgttgtccaggctagtcttgaactcctgagctcragcaatttgcctgccttggcctcccaaagtgctaggattacaggtatgagccatcatgcccagtcaaatttccccaaattaatgtcagacaccaaaccacagatccaggaaactcagagaacaccaagcaggataaatgccaaaaaacccacaaaatgacacctagacatattcaaactatacctagacatattcaaatttcaggaaatcaaaaataaaaaatcttaagagaagtc

SEQ ID NO: 940441 - DNA, 668 bp, Homo sapiens
gcataagacttgacatttgactgaagaataaatatgcatttatgcacatgaaaagatgctcaacatctttttaccattaggaaagtgcaaattaaaatcacaatgagataccactatatacccactagaatggctgtaatcaaaaagtattggtgaaaatgtgtagaagctggaaggaaccctcatacattgctgatagacatgtaaaatggtatagctactagctttgcaaaagcattttggcagtttcctacaaagttaaacatactcttagcctataacctagcaattttattcctgagtatctacctaagagaaatgaaaacatgttcacccatagatttgtrcacagttcatatctgtattattcataatagccaaaaaaatgaaaactatttaaacgtccattaacattttgtaaatgaatacacaactgtgttgtatccatgtgagaatactactgagcataaaaaggaataaactactgataatgcagccatgtagatgaacttcaaaaataccatgctcaatgaaagaagccagacccaaaagaccacatattatgttgttttatttatatgaaatttgtagaaatagcagaactagagaggcagaaagcagatttgtggttggctggggagttggagtgggagcagagattgactgca

SEQ ID NO: 940442 - DNA, 659 bp, Homo sapiens
agagcataagacttgacatttgactgaagaataaatatgcatttatgcacatgaaaagatgctcaacatctttttaccattaggaaagtgcaaattaaaatcacaatgagataccactatatacccactagaatggctgtaatcaaaaagtattggtgaaaatgtgtagaagctggaaggaaccctcatacattgctgatagacatgtaaaatggtatagctactagctttgcaaaagcattttggcagtttcctacaaagttaaacatactcttagcctataacctagcaattttattcctgagtatctacctaagagaaatgaaaacatgttcacccatagatttgtacacagttcatatctgtattattcatamtagccaaaaaaatgaaaactatttaaacgtccattaacattttgtaaatgaatacacaactgtgttgtatccatgtgagaatactactgagcataaaaaggaataaactactgataatgcagccatgtagatgaacttcaaaaataccatgctcaatgaaagaagccagacccaaaagaccacatattatgttgttttatttatatgaaatttgtagaaatagcagaactagagaggcagaaagcagatttgtggttggctggggagttggagtgggagcag

SEQ ID NO: 940443 - DNA, 664 bp, Homo sapiens
aagaaaaccaaacaccacgtgttctcactcatagatgggaattgaacaatgagaacacttgcatacagggtggggaacatcacacaccggggcctgtcatggggttgggggtggggaagggatagcattagaagaaatacctaatgtaaatgacgagttaatgggtgcagcacaccaacatggcacatgtatacatatgtaacaaacctgcatgttgtgcacaggtactctataacttgaagtataatttaaaaagaaaagaaaaatattcacctccaaaaaaaaatgttacgttaagtgaaagaagccaggcacaaatrgccatattttgtataattgcacttatatgaaatgtttagaatagataaatccatagagatgatagagacagaaagtagattagtggccaccaggtgctgtggaaagggagaaatgaagagtaactgttaattagtaaggaatttattttgcaggaggtgaaaatgttttaaaattagttaataatgatggttgcaaaagtatgcattataaaaaccaacgtgggtaaatacataagaatgaaaaaaataagaaaataaaataattctacactttaaaaaggtgaattttatggtatgtgaattatatcttaataaagctgttattacaaacattatagaaatca

SEQ ID NO: 940444 - DNA, 619 bp, Homo sapiens
gaattgaacaatgagaacacttgcatacagggtggggaacatcacacaccggggcctgtcatggggttgggggtggggaagggatagcattagaagaaatacctaatgtaaatgacgagttaatgggtgcagcacaccaacatggcacatgtatacatatgtaacaaacctgcatgttgtgcacaggtactctataacttgaagtataatttaaaaagaaaagaaaaatattcacctccaaaaaaaaatgttacgttaagtgaaagaagccaggcacaaatagccatattttgtataaytgcacttatatgaaatgtttagaatagataaatccatagagatgatagagacagaaagtagattagtggccaccaggtgctgtggaaagggagaaatgaagagtaactgttaattagtaaggaatttattttgcaggaggtgaaaatgttttaaaattagttaataatgatggttgcaaaagtatgcattataaaaaccaacgtgggtaaatacataagaatgaaaaaaataagaaaataaaataattctacactttaaaaaggtgaattttatggtatgtgaattatatcttaataaagctgttattacaaacattata

SEQ ID NO: 940445 - DNA, 640 bp, Homo sapiens
gcacccagattaaagggcgagtctccctttcccagaccactgattcaaatgttaatctcctttggcaacaccctcacagaaacacccaggatcaatactttgcatctttcaatccaagcaagctgacactcagtattaaccatcagaagtccaycccttgtcaactggaacctatacacaactcctgagatcatatataatcttcaaataaaggcaataataaggtcataattatacctaacataatacaactatccttcatgcaaccagaaatgcaccaatccccaacccaaatactattacataaagttaacaatgcttaaatactgatatgaagtcaataaatcttatgtcacatgataaaggaaataaaatgaagatattttcttaatacaagtatatacatgcacaaacatgttttaacaaaagaaggaggaaatacttatgacagttacagtcctcgtttctgcatctggtcacgtggtcatagctggtattgattactgccttcttctactacccattctgaattccttttgcctttagcaaacgcctcagcaggtcgtggtttttttcctggtggagtgacccaaactttcattcctgaagggcctgggccatttgtagtcctgcctggatt

SEQ ID NO: 940446 - DNA, 609 bp, Homo sapiens
accttctaggttcaagcgattctcctgcctcagcctcccaagtagctaggattacaggtgcccatccccacacccagctaattttttgtatttttagtagagacggggtttcaccatgttgtccaagctggtcttgaacccctgacctcaggcgatccaccggcctcagcctcccaaagtgctaggattagaggcttgagccaccacgcccagyctcaaattagtcttttgtccattcaacctagaagttttccactcctataaattaagtaggaatgcagtaggcttcgtatcaatttcacttctaggaactatgattaattagccaatgccacagccctatacaattcagactattctgattgctgctttgcctctgctgtctattatggtagctacgcccacctttgatggttgagtgctgccacttggcccctgccccctcagaatccaattattcccattgtatttaaattttgtagttgagtgactgtagttcccactgttagatctgacatacagagaagagcaatgacagggtccttcaaagatgcaggtgttgccctcacaaatctatttcacaagacattggtcaagtgtatatcttct

SEQ ID NO: 940447 - DNA, 629 bp, Homo sapiens
aggtctaaattgactaatccactccaccatcccaatttccctaagcctttggatcccttcctctacattaatccaagggagatcaggcatttccagctcattcacagtgggccctcttttaatgcatctttcagctaaccaagcaaatgaaccattagaaccctttttaactcttcgagatgcaacattaaatgcagagtccctacttagtgggcccaaatcaataaattcagcctgattcaactctactttccttccaccattatcccacccctaatatccattcccatgcctgttctccagatttctgtttacataaactagaaaactcaagcagttctttttgagtatagcacacctcctcatgggtcacactctcaacctcaccctataggggcctgctgggactttagtctagttataggtctagaagcaaactcgggtgttgagggtggctcctgaggagaatcaactttatcttgccyggcaactgcctcaggggaggccatcactgctgccttaggcagtgcagggttcgtttccttagacaaaggtggaaaggctgatggcagcctgggtcagggaggggatgttgccactactgggaatggggaagctgtttcttctgg

SEQ ID NO: 940448 - DNA, 634 bp, Homo sapiens
cctctggaaggtacaggctataagctttggcagagtccacatggcgctaactctgcaggcacacagagcactagagccatggaggtatgcctatctccacctagatttcacaggatgcatcagagagccttgggtgccaggcagagaactgcattggggtggggctgctgcagaggtcgcctactagggcaatgcccagtggagccatggggtcagggtcaccacagagaaccccacagtacagcagtgtctagtggagccatgggaatggggtcacccctgagacaccaaacctgtagacccaccaacatgcaactctagcctgggagagccacaggcacaagactctaaccmttgagaactgccatgtgagctgtgcccagtgaggccatggaggcagagtccctggagccttggtgatccaaccccagcccagtgtatctgaaaggcaggacatgtagttgaagattattctaaagcctcaagatttaatgctgtttgccttggtgggtttttgagttatttgagacctgttgtccatttcttcttttctgttgctcccttttgaaacgggaatgtctatcctatgcctgccctacctttgtatattggaagcacataacttgttggatgt

SEQ ID NO: 940449 - DNA, 629 bp, Homo sapiens
cagcaaccagaagcaaccagaagcaccagcacacctggagcccagaccctagcttctaataccaccctccaataaaaggagccagggctggctgggcgccgtggcttacacctgtaatcccagcactttgggaggccaaggcgggcagatcacgaggtcagaagattgagaccatcctggctaacacggtgaaaccccgtctgtactaaaaagacaaaaaattagccgggcgtggtggcgggcgcctgtartcccagctacttgggaggctgaggcaggagaatggcgtgaacccgggaggcggagcttgcagtgagccaagatcgcgccactgtactccagcctgggcgagagagcgagactccgtctcaaaaaaaaggccagggctttttggagaaatgactgattcaaggactagggcagaagatgtacaagataatcctggagtatcttgtagtgagtgccacaaagaaagcaagaaagaaacacctcaaaaacaaaaacccgcaatgatggggatgtgtcaaagggacacaggagtcacgtgaaacagctcccagaggcaaaaaaaaaacaaacaaaatctagtagtatactatttgattataactcaaagtatggaataaatc

SEQ ID NO: 940450 - DNA, 560 bp, Homo sapiens
acaggagtggtgagagaggacatcctggtcttgtactggttttcaaagggaatgcttccagcttttgcccattcaatatgatattgtctgtgggtttgtcataaatagctcttattattttgagatatattccatcaacacctagtttattgagagtttttaacatgaagaatgttgaattttatcaaaggtcttttctgcatctgttgagataatcatgtggtttttgtctttggttctgtttatgtgatggattacrtttattgatttacgtatgttcaaccagccttgcatcccagcgataaagccaacttgatcgtggtggataagttttttttttatgtgctgctggatttggtttgccagtattttatggagggtttttgtatcaatgtttatttggcttattggcctgtagttttctttttttgttgtgtctcttcccagttttggtatcaggatgacactggcttcataaaatgagttagggaggagtccctccttttcaactgtttggaatagtttcagaaggaatgggactagttcctctttgtatttct

SEQ ID NO: 940451 - DNA, 617 bp, Homo sapiens
acataatgcaactgtcccttgtaaaactgaaaacacgctacactaaccttcttttcaaaatatgacacaaagtctcttttgtacctcctctttgggtgaggttcattcctttcctagctgagtcaaattccttcttagacctcttatttaaattctgaatgataaggttagctactgttaacaaatcctatgttagatggtaggggaatgagagaggaggagaagaagtaattaacatatgcacaaatattttcatatcaaaataaggaagaaatactcactgtctattactgtcctcttttcttcaactggtcatgtggttgtagttggtatttataatttccttctgctgcccatttcttatcccatttgctctcagcaagaaccttggcctattatggttccttgcatgattgagtgactcaaaccttccctgtttaaggatctaggctgttrgctgtcctgagtcttatgggtggttgtagttttcattgatgttatcacagggcatgcatatactaacaggtgcctgttgggatatcttccattcaaggcatcttcttacttatttccattttatagtaataacctatatttctccttgatattcaggatta

SEQ ID NO: 940452 - DNA, 415 bp, Homo sapiens
caaaatgcaggtgcacaacatacattttattcagtatatccatgggaaaacaggctctcctagccccttttctgcgcatgcctagattcccccatgcaagcacacctacaaagggtcataaaatggcacataagcaggctacttgtgccagtggcaggttctccatgatcctccacatgaggccaagacctacatstgtcactcactgcagttgttgattttttatttatttatttatttatttttatttttttattatactttaagttttagggtacatgtgcacattgtgcaggttagttacatatgtatacatgtgccatgctggtgcgctgcacccactaactcatcatctagcattaggtatatctcccaatgctatccctcccccctccccctaccccaccacagtccc

SEQ ID NO: 940453 - DNA, 415 bp, Homo sapiens
caaaatgcaggtgcacaacatacattttattcagtatatccatgggaaaacaggctctcctagccccttttctgcgcatgcctagattcccccatgcaagcacacctacaaagggtcataaaatggcacataagcaggctacttgtgccagtggcaggttctccatgatcctccacatgaggccaagacctacatctgtcactcactgcagttgttgattttttatttatttatttwtttatttttatttttttattatactttaagttttagggtacatgtgcacattgtgcaggttagttacatatgtatacatgtgccatgctggtgcgctgcacccactaactcatcatctagcattaggtatatctcccaatgctatccctcccccctccccctaccccaccacagtccc

SEQ ID NO: 940454 - DNA, 600 bp, Homo sapiens
ggagaaggctctgcaacaggtccagactgctgtaaaagctgctctgccacttgggccatatgacccagcagatccaatggtgcttgaggtgttagtggcagatacggatgttgtttggaccctttggcaggcccccattggtgaatcacagcagaggcctctagtattttggagcaaggctcttccatcttctgcagataactactyttcttttgagacagctcttggcctgttactgggctttggtggaagctgaatatttggctatgggtcatcaagtcaccatgcaacctaattgcctatcatgaactggctgttttctgacccatttagctataaagtgggtcatgtacagcagcatttcatcatcaaatagaagtggtatatatgtgattgggctcgagcatgtcctgaaggcccaagtaagttacacgaggaagtggctcaaatgcccatggtctccatttctgccacccttcattcacttccccagcctgcactgatggcctcatgaagagttccctgtgatcagttgacagaggaacagaagactaggtcctggttcacagatggttctgcacgatatgcaggcaccacccg

SEQ ID NO: 940455 - DNA, 642 bp, Homo sapiens
aacgtctaaaaaaatttttttaaagaacggaatatcaaataattgtcggccaactataaaaggtataacctacatgtaatgggactatgacagggagaaaaaggagagaaaggaacagaagcaatagttgaggtaataatgactgagaatctcccccaatttttttgtttttttgtttttttgtttttgagacagggtctggttctgtcacccagactggagtgcaatggtgcgatctcggttcactgcaacctctgcctcctgggctcaagccatcctcctgcctcagcctccctagtagctgggactacaggcatctgctaatttttgtatttttttgtagagatggggtttcgccatgttgtccaggctagtcttgaactcctgagctcragcaatttgcctgccttggcctcccaaagtgctaggattacaggtatgagccatcatgcccagtcaaatttccccaaattaatgtcagacaccaaaccacagatccaggaaactcagagaacaccaagcaggataaatgccaaaaaacccacaaaatgacacctagacatattcaaactatacctagacatattcaaatttcaggaaatcaaaaataaaaaatcttaagagaagtcagacagaaaaaag

SEQ ID NO: 940456 - DNA, 746 bp, Homo sapiens
taataaaatagcctgtggtttgtggggtggcaaactcctgtaattccagcactttgggaggccaaggctggttagatggcttgaggcaaggagtttgaaccagcctggtcaacatggtgaaaccccgtctctaataaatatacaaaaattagccaggtgtggtggcacacacctgtaattccagctacaccagaggctgaggcagaaaaatcgcttgaacctgagacgcagacgtttcagtaagctgtgatcacgccactgtactccagcctgggtgacaaagcaagactctgcttcaaaaaaacaaacaaacaaaaaacattaacaatgataataaaataggataattagaacaatattatatttaaaagttatgtaactatagtctgtctctttctcaaaatatcttattattacacacgcaaatttaatacctttccacttaactaagcacttgtcatatactgtggycacaacttaacttttgtagtttgagttgtgacagcaaagctagcaagaatttatttttccttcttcacaatttttgagatagaagattcatgcatactgtagatcttagcaaccacgccatacatttttttctttgcttattaggtaatgaactttcaccttttcaattgaaggaagcattttatggcttatctttggcatatcagaattgccagcatcactactcttgcattttggggccattattaagtaaaacaagggttacttgaatacaa

SEQ ID NO: 940457 - DNA, 655 bp, Homo sapiens
aacaagcacaaaatcatttttataaaacttaaccagaactatatatttggattctctagtctcccttttggtcaggctgtcaccttgagagtgtatcgaccacatcagcctagggctaccattggggggaaaatgacatatcatgcccaggaatggtcgggcagaatcctgaatattcagtatagggccttataaccagccccactccttttgtcctgattattattcagaaagctgctgagaggaaatgatcccattctgaagaaagctaaatccaatgaaaaartcatcttactgatgtgtgtggatcaagagaagataagaaaattagaatgaaaaattatttgagataattttttagaagatacccaataacaataacagatacttttgaatggagaaaacttgaggtgccataatacctggactatcagcttactcttgagtcacttttgtgataaaaaaaaaaatgttccattttcagactgcaaatggtccagaaagctgaatacgtgacacctgctagttttaaaggccatactgacatgaccagaatcagctaataagactagaacagaaactctgtaacctgaaaaagtgtcatcagcagtgaaataaaacccttagctttgagaaggattcaaatatccaacat

SEQ ID NO: 940458 - DNA, 566 bp, Homo sapiens
tcaccacgttgaccaggctggtctcgatctcctgacctggtgatccacccgccttggcctcccaaagtactgggactacaggagtgagccaccacgcccagcagaccctattttcaaataaggtcacattccgagatactgagggttagggcttgaacatattttttggtagtggcagggacacaattcaacttatwatcatcatcatctccacttcattagctacactgctgccatttctaccatcatcatcaactacatcttctggggttctggtggagggtggaaagggaggtggttaagagttcaggctttgggtcagacagaagtggattaaagtccatctttccatgggctaggacttctttcttagtcttcccagaggaggcgatgcccatgcaaagtcttgaaaaagtaggaagtggccagtgggagacagaacacgcatcacggtagaaagtgcaggagcagggccctgggagagaaggccccacccgcacgggggaagggagagcaagggagagaaaggtgctgaggaaggacagcagctcagaaaagagtgtttc

SEQ ID NO: 940459 - DNA, 713 bp, Homo sapiens
taggagaaagactgaaaataataaggagggccaaggaagatatacaaaagaccaaaactgaacttctagagatgaaaattacaatgtgtgagatgaaaactacacttctacactagatagctgaaatagcagattagacactgcggaaaaaagattgctaacttgaggaagtagaaatacagattatccaaaatgaaacacacagagaaaaataataatataaaaaatgaacacagcgtcagtgaactataggaaaacttcaaggtgcatgtaattggagtatttgaaaatgagtggggatcagaaaartatttgaagaaataaaaggccaaatttcttccaaatgtgattactactataaatccatagatccaagaagctcaacaaacttcaagcacaagagacatgaagaaaagtatactgagggacagcatagtaaaatttctcaaagacagtgataaagagaaaattataaaagcaaccagaagaaaaggacacattacttacagaggaccaacaataaagagggcagcagatatctcatcaaaaataatgccagtcaagtgacagtgagcaatatctttaataaactgtctatagtcagtgaaaataattttcatcagtgaaggcaaaataaaaatgtttttagatatacagaagctgaaagaattcatcactagatgaaatgtggaacaggaaatgttaaaggcagg

SEQ ID NO: 940460 - DNA, 773 bp, Homo sapiens
cccactaaacaggatggtctgtccccaggagcagacccagaggtgtccacgtggctgacgtggctggtgcttccttcacacggatttttttttgtgtgtgtgtgtgtgtgtggagtttcgctcttgttgtccaggttggagtgcaatggagtgatctcggctcactgcaacctccgtctcctgggttcaagcaattctcctgtctcagtgtcatgagtagctgggattaagrcatgtgtcaccacccacacctggctaatttttttgtacttttactacagatggggtttcgtcatgttggtcaggctggtctcgaattcccgacctcgggtggtctgcccgcctcggcctcccaaagtgctgggattacaggcgtgagccactgtgcccggcccacactgctttctccattccagtctcgcctcagccaggccacagagccttggcctgggtcaaactcacccctcactgtggccaattagttttaacttgtcataaattttttaacgaattgctgatcgataagaacttggcagctactactgagcctcaaagtcaaggggtaaaaagaatctaaatgatgtctgccaggttgttgtattaacctggctccatgcttattgcctgttgttttgagttaattacctggtgcctaagtgtatcacttctacatctcaagcactgctcttacaatcaattcatatttaattaacgcgactctgattgaatggcaatggtgttacggtgtgcgacacagaggaggagcgtttcct

SEQ ID NO: 940461 - DNA, 804 bp, Homo sapiens
tgataaaaccaagaacaccacatgatttcctagtgtttcaattctgaatgctgctagacagatggatttctcccttaacactatgaatataatgaatatcttacagtgacacatctgaaaacaggtatgtgtgtgtgcatgtgttggtttgtttgtacttgcatttacttttaggattgggttgggggaccatggactattgcttccctttgagtgtcactggctgttgtattctcactttttctgtgtcttccactcagaataaaggctgctgggtaggtgctccctatttatcaggatgcagctgtgcatttaaccagacccttctcttgagctgaactctctatcctgggttcttgtgacttctttcttggtatcacagggctaggtaatccaaagattaagtctgatctttggggctttatgctctgtaaaaaaatatattttcttttttcccctaatttttatkttagaatcagggagtacatgtgcaagttttgtcacaaaggtatattgcgtgatgctgaggtttggagtacaaatgaattcatcacccaggcagggtagtgagcatagtactcaacaggcggtttttcaacccttaccctcttcctgtctcccctgtctagtagttcccagtgtctgttgttcccatctttatgtccacgtatacccaatgtttagctcccacagataattgagaatatgcagtatttggttttctgtgtctgctttagtttgcctaggatattggcttctagctgcatccatgttgcagcaaaagacacaattttattctatttt

SEQ ID NO: 940462 - DNA, 662 bp, Homo sapiens
aagcttttttctattgtaaaaagttttcctttttttttttttttttttagttttaaaactcttttactaaaaactaagacacaaaccttcacattaacgtaggactatacggtatcaaggtcactaataccactgtcttccaccttcacatcttgtcccactggaaggtcttcaggggtaataacatgcttggagccgtcatctcctatgatagcaatgtcttcttttggatacctcctgaagaatctgcctgaggctgttttatagttaacttttttttgtaagtagacggagtacactctaaaataattatgagaaatatagtataagaaaygcctaaaccagtaacttagtcatttattatcattctcaaatattatgtactatgcatatatcaaatactgtgtgggccaagggttggacaagcttgctttacaccatcatcaccacaaacatgtgagtaacatgttgcgatgatagctacaatgtcagtaggtgataggaatttttttcagctctattataatcttagggtaccacttacatatatgtgttctgcctttgactgaaaatgtcagtggcacatgactatattgttattctgtgatcacttagtgaatctgtatactttgttgggagcacaagtcccatcacgtcacagt

SEQ ID NO: 940463 - DNA, 662 bp, Homo sapiens
aagcttttttctattgtaaaaagttttcctttttttttttttttttttagttttaaaactcttttactaaaaactaagacacaaaccttcacattaacgtaggactatacggtatcaaggtcactaataccactgtcttccaccttcacatcttgtcccactggaaggtcttcaggggtaataacatgcttggagccgtcatctcctatgatagcaatgtcttcttttggatacctcctgaagaatctgcctgaggctgttttatagttaacttttttttgtaagtagacggagtacactctaaaataattatgagaaatatagtataagaaatgcctaaaccagtaacttagtcatttattatcattctcaaatattatgtactatgcatatatcaaatactgtgtgggccaagggttggacaagcttgctttacaccatcatcaccacaaacatgtgagtaacatgttrcgatgatagctacaatgtcagtaggtgataggaatttttttcagctctattataatcttagggtaccacttacatatatgtgttctgcctttgactgaaaatgtcagtggcacatgactatattgttattctgtgatcacttagtgaatctgtatactttgttgggagcacaagtcccatcacgtcacagt

SEQ ID NO: 940464 - DNA, 792 bp, Homo sapiens
gtggctcagaagaggtaggtgggagaagaggccacatagtatctccctgggcctcctggtgaaaaacttgtgtgtgatttttcaggcctgaccacaaacttggggaaagctgacccctaccccagacttggggcacagcccatgcrtggcagtctctggagggagctctcaaggtctcaggtctctctggctggtcgtagtcatcacatatttgcattcctagcccctgagccttcattcctgggtttatcagaagccttggggagaggtgttctttaggcgcctctgctgaggccttctttgggtggggcagggaagggagagaaatcttgaagccgcttttccccacaatgactcagaatctagtacttccactcctagccttccccctcccttgctctcggccccagagtccataaaacttccagagccttttgttcagggctctgtcagcagtgagaccaccccaacccgacattcctgctgatctacttgaccctgggcccctgtgtgttccatgggggaaatggaacagggagagtccacgctttctctggtttcagatacttgcttataccattgcaggacatgactgaaagcttgactcttttgttttgggcttgttgccttaattgactattgtgacacctggcagctcagcgctccctctcccagttcaactgagctcctgacagagggactccaccttcaacttgccagggacaggcactcaaaggacgggcttcatttctgttgaaggctctggcttctcctaatatgtttctaattcat

SEQ ID NO: 940465 - DNA, 637 bp, Homo sapiens
tctgcccccaggcagctctgctctggaggcaggttcttaaccaacccaattctgatgcctttccctcctcagtgtgtctcctcaagtcttgagtgctctgaacatttcttttttctctttgatcacatttctatttaaatgtctcagtcccctgcaaagactagctgaatgttttcatctataccatttaagcttcttgtttttaggcatggagagtaaaatgcacamaaaaaaaaaaaaaatcccagaaatcctcttagtgatttttttttttttagtaattttatctgacaacatttaagtgtttttaagaaaattacattgaaggtacatgccttgaaggaggaaaaaacagaatgcttattatgtgcccgggaagtttacctatattatttcatataatctggacaatcaccctatggtatggattttattacctctattttacaagcaaggacactgagattcagagaggcacagaggctcaccaaggccactcagccagaaggtaacaggactgggaggcaggcccggcactgtgagcccagagcccctgctccttcctatgtggaagatacccagagagagcgtcgagtgttatttaggaaaatgagtgctagacgcatgatatgtaaca

SEQ ID NO: 940466 - DNA, 619 bp, Homo sapiens
gattttaaataaaaaactaattcctttgtgtcctctttaaaatgaaaacattaattttgaaaaggaaataaataaatagtggctatttacattagaagtagttaatgtccattaccttatgagaaagaaactttccatcacctaacggctttccggttgatgcctcaaagaggaagattacttgaaaaaaagtagaacattaattaatgtgttatattagaatttttactggtaaaattcagtgaaactattataatccttataagaaattatttaactctctagaccacagasagagcagcagcatccaattttaatttattaatgtggtcacatttcttatgaaaacaataaaactgaatacttcttcctaaaacacattccctaattagaatttttattaatggtatggcattaatgctccacaggctcacaatgggaagtccaaatgtgaatgtaatttataattctgataactttgatttaaactaatataacaccatagtgtagaggccaaaggaaaacttcctctttgtcctttgaaggttaactgaaaatcaactcacaaaaggcagattaataggagaaatggcatacaaatttattagcttgcatgggg

SEQ ID NO: 940467 - DNA, 600 bp, Homo sapiens
cttctaatgttttcttcacttactaactgcaatagttttagaaaaagaagtatcttctcattacctatttggttaccctggggtatatatatcaaaggcaggataaattcttgattatttccagttagttgccatcatgtgttgcttaatgaaggggatgcattctgagaaatgggctattaggtgatttcatcatgtgaacatcatagagcgtacttatacaaatatagataatatagcatctagactatatggtatrgcctattgctcctaggctacaaacctatcaagcaccttactgaatactataggaaactgtcacacaacgatagtagtgtacctaaacatacctaaacacaaaaaaggtataataaaatacatcattaaaacataaaaaatggtataactgtacgtgacacttacatgaatggagcttgcaggcttggaagttgttctgggtgagtcaggaagtgaatggtgagttaatgtgaaggcctgaaacactactgcatactactatcaattttataaacactgtatacttaggctactaaagttattaaaaaaatttttctttcttcaataacaaattaacttcag

SEQ ID NO: 940468 - DNA, 486 bp, Homo sapiens
gaattagtaatatatggaaactcctcagtaaataaagattatacatgaaaagctcacagctaacatcatactcaatggtgaaagactaaaatcttttcctctaggatcaggaataagatagcaacatctcttcctgccacttctattcatcacagtactggaatttctactcagaataattagtcaagagaaagtaataaaaaggatgcaaattggaaaggaaaaagtacaaaattttgttcacagacaacaggatgtaatgggtaaaaatcctgaaattyccaaaatactggtaaaataatgaaattcaacaaagtttcaggatacagtaacacacacaagtcagttgcatttccataaactaacaatgaacaatctgcaaataaaattttaaaaagagaggccaggtgcagtggctcacacttataatcccagcactttgggaggccaaggtgggcagaccacctgaggtcaggagttcgtgac

SEQ ID NO: 940469 - DNA, 724 bp, Homo sapiens
ctataacattttatatttctggaaacccttcaatataaagttattacatgtaaaaataaaaagtctgttttagcaaacttttcttcacaaattatcttttcctagttccctattgggcaatttttgtaggctccatatgctattaatttatattcacttttagaagaattttcatcaaaagcaaaagtcttatgtaaattgtttatatgctatttgtacttctatgtatatatacacacatagccacatacatatatgtaactccggaggcctgcctggactgttaaataactgtattgaacaaaagcaagaaaaagctgttcaaatttcaaacaacaagttgaactgaagagctcacatctttgaatgaaatagacactagtagcctttaaaaattaaacatttctactgttttaaaaattatagccatcatagtatgaggaaaaatgtaataatcttttttaattcttaccrttttattaaccagagtccttatgccctgacttcattggtacccctttgacattaaacagaacacttaatttaaaattctgataaataaattaattacatcatttacttgaggtactctttcacctttcaagaaatattttgagaattcattagctaaacattgctataatgcaggctagtaataaatggaaataatgatttcattgtaaagtttaaactaatgatggtatgatctggaatttttgttaac

SEQ ID NO: 940470 - DNA, 556 bp, Homo sapiens
aagtcacaattacaatgccaactaggtgacaatactttgcagggatggggaaaacttctccaaaggtcgtatatgctctgaatcagcgtccaatatatggtactgtttcttccataaccaggattcatgggtgcaaraatcaaggggtggaagtggaagtggcaccactcaccatcacccctagtgatccactagcaaaatttttgcttcctgttcccgcgatattatgctctgctggcctagaggtcttagttccagaaggaggaacgctgccaccagcgttatatactgatttgtgggatgcagccagtggtttggctggatgatcaggaagacaatccgggagacaacgggagacaaaacaatgattccattaaactgcaagttaagatagccacctgaacactttgggctccacctacctctaagtcagcaggctaagaagggagctacagtgttggctgggattgactgaaccggactatcaagatgaaatcagtccacaatggaggtaaggaagagtatgcatggaatacaggagatccactagggtgtc

SEQ ID NO: 940471 - DNA, 605 bp, Homo sapiens
tgctgtgcttctgtgttgtttggggcatgcagacatccattttgcatgcattcatttacaggccaatttgatggaaacaatcctggttatcgaacagcagcaccattacttaagtgtcttcttgtcctactgtgcacaaattttcaaaccagtcaggagtttcactggcttcctcaggtcaatgtggctttaattcattaacagctcctggaatatcatcagctggaagacatgccaatgcaggaaataatgcattgttaacctaaagttttcattgttgctgtgtcacaaggccaattcactcacctggatttgctgccaaatgcactgggctaaacagggaaaacaaatgttattggtaacactttgaaattcacttttagaagccaagcttacagtccacctaacaygatgcgactatcccgtgatcacaatttttgggatttgagagcttagggatttacactttagggatttcaacctttaagattatggctttcagaattgtgtctttgggaatcacgctccgcacaccatgtaacaacagaggcagagattggagtgatgtaccagcaagtccagaagctccaagctggctccagtag

SEQ ID NO: 940472 - DNA, 629 bp, Homo sapiens; identical to SEQ ID NO: 926173

SEQ ID NO: 940473 - DNA, 629 bp, Homo sapiens; identical to SEQ ID NO: 926174

SEQ ID NO: 940474 - DNA, 572 bp, Homo sapiens
tcgtcttttcatgtagtcccatatttcttggaggctttgtttgtttctttttattcttttttctctaaactttccttctcgcttcatttcattcatttcatcttccatcactgataccctttcttccagttgatcgcatcrgctcctgaggcttctgcattcttcatgtagttctcaagccttggctttcggctccatcagctcctttaagcacttctctgattggttattctagttatacatttgtctaaatttttttcaaagtttttaacttctttgcctttggtttgaattttctcctgtagctcggagtagtttgatcgtctgaagcattcttctctcaactcgtgaaagtcattctccgtccagctttgttctgttgctggtaaggaactgcgttcctttggaggaggagaggcactctgctttttagagtttccagtttttctgctctgttttttccccatctatgtggttttatctgcttttggtctttgatgatggtgatgtacagatgggtttttggtgcggatgtcctttctgtttgttagttttccttctaacagacagga

SEQ ID NO: 940475 - DNA, 578 bp, Homo sapiens
acactaaactagtggcaggagttttttgcttgcttgtttgtttgtttttgtttttgttttcatactccagtggcacctggaaccccagtgagacagaaccgttcattcccctggaaagggggctgaagctaaggagctaagtggtgtcactcagcaggtcccactaccrtggagcccagcaagctaagaatcactggcttgaaattctcgctgccagcaaagcagtctgaagtcaacctgggacgattgagcttggtttggggagggccatctgccattactgaggcttgaataggaggtttttccctgacagtacgaaggaggccaggaagcttcgactgggtagaactcaccacagtgcggcaaagtggctgtggccagactgcctccctaaattcctcctcactgtgaagagcatctctgaaagaaatccagcagccccagtcaggtgtttatagataaaactcccatcaccctaggtcagggcacctgggggaaagggtggctgtggacgcagttcagtggacttaaatgttcctgtctgctggctctgaagaaagcagcagatcctgacaaaa

SEQ ID NO: 940476 - DNA, 578 bp, Homo sapiens
acactaaactagtggcaggagttttttgcttgcttgtttgtttgtttttgtttttgttttcatactccagtggcacctggaaccccagtgagacagaaccgttcattcccctggaaagggggctgaagctaaggagctaagtggtgtcactcagcaggtcccactaccgtggagcccagcaagctaagaatcactggcttgaaattctcgctgccagcaaagcagtctgaagtcaacctgggacgattgagcttggtttggggagggccatctgccattactgaggcttgaataggaggtttttccctgacagtacgaaggaggccaggaagcttcgactgggtagaactcaccacagtgcggcaaagtggctgtggccagactgcctccctaaattcctcctcactgtgaagagcatctctgaaagaaatccagcagccccrgtcaggtgtttatagataaaactcccatcaccctaggtcagggcacctgggggaaagggtggctgtggacgcagttcagtggacttaaatgttcctgtctgctggctctgaagaaagcagcagatcctgacaaaa

SEQ ID NO: 940477 - DNA, 787 bp, Homo sapiens
taactagcattttcaatagggcaccctgatgtctggatgaacttcagggcaacaaaatagggggaaggtgagcagttgaagacacctggacactgggcctgaccaaggtggggtggtggggatggcacaggacgatgcagaatgtgagttagtgatggcaggggctatgtcttgctcattgataagtccctgacccatagatggtgatcggtaatggtgcacagccctgtgactcagagtacagacgagcttgggcagtgcctccacacatgggagatgcggggatgggcgcayaggcatgctccactcatggagaaagaaggtggcccagcaattccacccccaagcaaacccaatggaagggaaaacagacatccatataaagacatgtacacaagtgctcacaacagcatgattcatagtagccaaaaagtggagtgactcattgtccataagccagcaggcagataaactaaatgtggtctatccatacagtgcaatactattcagccttagaaaggatgtggtggctcacgtctgtaatcccagcactttgggaggccgaagcgggcagatcacttgaggtcaggagtttgagaccagcctggccagcatggtgaaactccatctctactaaaaatacaaaaaaattagccaggcatagtggcacatacctgtagtcccagctacctgggaggctgaggcaggagaatggcttgaacctgggaggcagaggttgcagtgagccaaaatcgtgccattgcacttcagcctgcacgacagagca

SEQ ID NO: 940478 - DNA, 817 bp, Homo sapiens
gagctcccgggtgtaactggggcttatggattctccatctgccatctctgccatgtcaggaaagtagtcactggggatctctggccgtgtcagctgggcccgagcctgctgctcaccccagcactgcctgaataggacccaggcaggccttggaattggcgccgggagcgcattcccacggggaaaaagacgttctgtcctggttttggctgggcagcgtgcatcatccctttgagtctcggcagggagggagcragaacacactgaggcccaagaatcatccaggtatctatagagagcacaaacactgaaacagacactgagctccattgtccgcgcagaaaaattctcacagcctccccgcggttaacttactcttcttcatgcagcctcttctgttgaaaacattaaacgtacactcgggtctcaaaacaactgtgagaatggaaagtttatagtcacatcttttttcccttgctgatctttagtgtccactatgaccccacaaccaaatctggtcattttcaccacctagaggcatagaaaacttctctgtccattacagttttcatgataaacaggagtcggaggagacgggagggtagggccccctgcagatcacctcttggggatgaccagaagccaaacccaataccatgtgtagtgggtcagtatagcaaataaagtcccctgcaaggtccttcatgaacatgtctgccaaggcctttcatggccactgtcctcccagccacacccacttaggctgggatcttcttcctccctccctgcagccaggtgtctggagagggtgtggtta

SEQ ID NO: 940479 - DNA, 687 bp, Homo sapiens
aggcgcccgccaccacacccggctaattttttgtatttttagcagagacgggatttcaccgcattagccaggatggtctcgatctcctgacctcgttatccacccgcctcggcctcccaaagtgctgggattacaggcgtgagccaccacgcctggccagaaatctgtatttttaataaacttaggagttgatttattttttatttttatttattttatttttatttttatttatttattttattttattttattttttgagacagagtttcactcttgctccccaggctggagtgcaatggcacaaccttggctcatcacaacttccacctcctgggttcaagcgattctcctgcctcagcctccagagtacctgggattacmggcgcccaacaccacgcccggctaattttttatatttttagtagagacggggtttcaccatcttggccaggctggtctcgaactcctgacctctggtgatccacctgccttggattcccaaagtgctgggattacagacgtgagccaccacgcccagccaggggttgatttttaatcaaccaggcttagtccaggttgcaaggagcagcaaaatggtcccatttcagtgtgcctaagaattacccggtggggttgcttaaaatgtccatcccagcacccaccttcagaaggtcgaattcagtc

SEQ ID NO: 940480 - DNA, 855 bp, Homo sapiens
ttgggaagttttggtttatgacattgtgacgtttttattttgtgccattttttcttaatgggggagaaaacaaatacttcttggctccctataatagcacaggcattataacaagtactttctgagccttctgtcctttattccttgcarccatccttattgtacccattttactcacaaggaaaccaagtcataaggccaataaacagcaaaaacacggctgaagtccagatccaactccaggcctgcatccttacctctgtgtggcattgcagcttctagggttgttatcttcgggcctttggcccccgcctttttttttttggagagagtgtaacgttctgttacccaggctggagtgcagtggcaccatctcagctcactgcaacctctgcctcctgggttcaagtgattctcgtgcctcagcctctccagttgtgtccagggttagttcctgccagtgggttcgtggagggttcctggcctcgctgacttcaaaatggagccacggaccttcccggtgagtgttacagtgcttaaagatggcacggaaccaaagagccagctggagcaagatttattgtaaagagcaaaagaacaaacgtcacacagcggagaaagggacctgagcgggttgtcactgctggctggggtggccagcttttattcctttatttgtcccctcccatgtcctgtttctgtcctatcagaatgcccttttcccaatcccccacgagtggttacttttagagtcccactgattggtccattttacagagtgctgattggtccattttacagagtgctgtttgggccattttaaagagtgctgattggtgcattttacagaccgct

SEQ ID NO: 940481 - DNA, 680 bp, Homo sapiens
tgcctgatgcctgtaatcccagcactttgggaagccaaggcaggtggatctcttgaggccaggagtttgagaccagcttggccaacatggtgaaaccctgtctctaccaaaaatacaaaaagtagctggtcatgggggctcatgcctgtaatctcagctactcgggaggctgaggcaggagaatcacttgaacctgggatgcgggggttgcagtgagccaagatcacaccattgtactccamtctgggcaacagagtgagactccctctcaaaaataaatacataaaataataaagaacaaaagaacaaatgctcaaacaaattctcaagacaccaggcagaaaaaccaaaacatctacaagggcaataaataaataaataaatctgatctccagtgtccctacagcagcactcagtgctggaaggcaatggagcagtgccgggggggagttctaaggaagctcagcccggggcactacagcagtcacgagggtgggaagaaaggcaccaaggcagccatctgcagacacgtcagggggcaggcactacgattaaaggctgccgtgagctaatacagaacactgtggtcaccaataaatatgaacgtcacaaacctgcactgagtaaaataagagtatgattaacaaaaataaggagccacaggcaggagacaaggcaga

SEQ ID NO: 940482 - DNA, 680 bp, Homo sapiens
tgcctgatgcctgtaatcccagcactttgggaagccaaggcaggtggatctcttgaggccaggagtttgagaccagcttggccaacatggtgaaaccctgtctctaccaaaaatacaaaaagtagctggtcatgggggctcatgcctgtaatctcagctactcgggaggctgaggcaggagaatcacttgaacctgggatgcgggggttgcagtgagccaagatcacaccattgtactccactctgggcaacagagtgagactccctctcaaaaataaatacataaaataataaagaacaaaagaacaaatgctcaaacaaattctcaagacaccaggcrgaaaaaccaaaacatctacaagggcaataaataaataaataaatctgatctccagtgtccctacagcagcactcagtgctggaaggcaatggagcagtgccgggggggagttctaaggaagctcagcccggggcactacagcagtcacgagggtgggaagaaaggcaccaaggcagccatctgcagacacgtcagggggcaggcactacgattaaaggctgccgtgagctaatacagaacactgtggtcaccaataaatatgaacgtcacaaacctgcactgagtaaaataagagtatgattaacaaaaataaggagccacaggcaggagacaaggcaga

SEQ ID NO: 940483 - DNA, 801 bp, Homo sapiens
atacatttgctactatataataattatgatgtttcagcctgattacttttttttttttttgagacggaatctcgctctgtcgcccaggctggagtgcagtggcgcgatctccgctcactgcaacctccgcctccccggtcgattctcctgcctcagcctcctgagtagctgggattacaggtgcacaccaccaggcccggctaatttttgtatttttttttttttagtagagatggggtttcaccatgttggtcaggcttgtctcgaactcctcctgaccttgtgatctgcccgcctcggcctcccaaagtgctgggattacaggggtgagccacctagcctggccgattacatttttatggaagtgtttctaagtgccttctatttttatgcacagggagctgtctgagaccatgttcacctaatggtaacaatagcaatttctgagtgtggaattggygtgattaaaaactgttacctttctacttactacatttttttgtacttgatattattatacatatatcacttttataaaaagcaatgtagtgatttttcttacaaaaaaaaaaaaaaaaacctggaagccaaatatgccaagatgttaatagtggttaaatctggtgggaatatggaatattaggggctttatcttttttcctttatcattaaaaaaggagttttaagaagattctagtagagttcatagctgctctaaaacagttaaaatctcctgactttgacaaatttcagcctgaggagtcacaggctggaatatctagttgagataactgaaccgat

SEQ ID NO: 940484 - DNA, 854 bp, Homo sapiens
tggagaaaatggcagtcagagtcctcccagaggtctatttaagggttcctagcaaaggggagctatcatctgaggctccagttgcctgaccatttggagtttgatggcttctaggcatgagagaaaaaaacaagttttataaggtcaagtatgcataagttaaacatgtgtattatacaaggaaagaatttagtgccaacagagataagtgaaatatactaacaacaacattgtactccaagctgtttcaccctggtgaaagaaattaaaccttgtaygggggcagataaactttagaagagagagaactgttcttgccatatctttagaagttaacaggtgcaccctggaatacctgtatctcctctctctttcccaggcctccctgtctcaatcataaaagaccaaggtggccattttcaggaggtcctctaatgtactttctggacccagggcccctttctgcaacttcctcctgatatcgggcagcttgagtaataaatttatcccttttatttttttgagatggagttttgcttgtcacccaggttggagtgcaatggtgcgatctaggttccctgcaaacctctgcctcccagattcaaacaattctcctgcctccacctcccgagtagctgagattacaggcacctgccaccacacccagctaattttttttgtatttttagtagagacagggtttcaccacgttgacaaggctggtctcaaactcttgacctcaggtgatcctcccacctcagcctcccaaagtgctgggattacacgcatgagccaccatgcccagccaaattcatcctttaggattagctgtcccttgactgaatcaggagata

SEQ ID NO: 940485 - DNA, 784 bp, Homo sapiens
acacatgtctagtgaagttcccacagtccctggagctcaggattttcagacttggcagagatgaggtgacagacagggcaagagcgaggcagagactcacctgagagaccgcccaggctgtgctgcactgtgcctgttgggttttgctgggctcaggaggtgcggtttgtgctaaccatggccctttcattcttggggcttacatattttttaggaagaattttggtgcctaatgcttccaattaagggaatgtttacaagcattaggcttccccgtttcttgagccagtctcagctttggtgaggtttgtcttacctaagggaaagcagcatgagtgtggaggaagccgtgggcagtgcctgggctcygtgtctttaaccggaaaggccatgtctccagagcttcttatctgtaaagtgaaattaactaggaaattaagactgcacaattagaaaactgggtttgaaatgtacatgtaaacattcctcagcatatatgcaacaaacaagtccaccactttttaaataatagatacaaaagtgctttgaaatgcacttgctgctgtctctatagcatgtgtgcttattatccaagtgccaccaggtacccagtctcttccatgcatagatggtgatccctgcagcactgaatatggatgtggtgcatccaactgcagaaatcacgctcataaccatgaccacacacaactggcttcaggggctaatatttccaacccaagaaaacaggttggcacctgctatttgggattacaggaagcatgta

SEQ ID NO: 940486 - DNA, 695 bp, Homo sapiens
aggctcaaaggataaacccagtacttgaagttttaacactttcacatttccagggactgttcatcatcacagatttcttctcccattttttgcttgcaccctctctctctctctgaaattttaacatttaaacaagttcaaatctctcctatcgtcaaagcaaaaagcaaacaaaaaaatgcctcaactgcaatgttccttctagccaccatccccctgtctcccacttaacatcaagcttctcaagagaactgtctgtattcatttttgttgactcacatctcactgactctccatgcagtccacacagatttctgccttcattagctccccaggagcatattccctcgagtcatcaatgctctcyatgtaactggtttcagtggatggttgtcagactccttctgattttctcatacttctcctggtttccctaactccacattctcttagttgtcctcctctatctctggctactccttctcagttttctttgccagtccacctttttctaactgtctgtatatgtacagacgactcaagggccagtccttaataagctcctcatcttcaaactccatcttctcttcccagggggttctcattcataacaacattcattaccatggttacctggctagatgctcaccaacctctgttcctcttgtgggacacatagaccaactataattccc

SEQ ID NO: 940487 - DNA, 787 bp, Homo sapiens
ctgccggccagagtgagcacctacaactgcctctccagcatggctacttggccagacttctgactgaagggcttagggtccccagagagaccatttcaagagacaggaggtggaagctgccaggtttttaaggcctggggctggaaaatggcacagtacctctaccatcttctgtgggtcacagcatctgcccaaataaaggggagggcacacagaagccccccttgttgatggggagtggggagagtctggctgcccatgtaatgggctgattctagagtgttagggatctttgtcatcagtcacctgcacatgcatggaagccttctcctgaggggatgtcagcttagagacacagaactgggacacacagcargtcatttctggtggggaggtgagtggttaagtttgggccctgggtggagggagcagtcagaggaggatgagaagggcatgcaggaggacaggtgaggccactgcttctgcctcaggtttgccccagggcaggtggcatgagtggtttgaatcatgggtctgtcgccaaccataccaccttggggaagccactttaaccctggaatctccattttctgatctgtaaaaggaggacgacaataaaatctcttccttagagatggtatgagggaaaaatgaacttcatcagtaacatctactggaatacagtatcgacttctttccatatggggatacaataggtgctcattaaatatttccttccttccttcttgcgatcctgggcaaggccatggggcctacttcattctgg

SEQ ID NO: 940488 - DNA, 755 bp, Homo sapiens
acatttcttttactcaaataagatctcacatgactgtttataatcaaacattcccctttccatctgattaaagagcttctgcacagcaaaagaaactactgttctgtaaacagacaacctacagaaatgggaggaaatattctcaaactatgcaactgacaaaggtgtaatatcaagcatctataaagaacttaaatcaacaagcaaaaaacaaccccattaaagggtgggcaaaggacataaacagacacttctcaaaagaagacatacaggcagacaacaaacacatgaagaaatgctcaatatcactaatcatcagagaaatatgaatcaaagccacaatgagataccacctcatgccagtcagaatggctactattaaaaagtcaaacaacaacaacaacaacagatgccggtgagactgtggagaaaaagaaatgtttatatactgttggtgggaatgtaaactagttcagccactgtggaaagcagtttggagatatttcaaagaactaaaactagaactacctctcaaccagcaatccattactgggtatatatccaaaggaaaagaaattgttctaccaaaaaracaagtgtacttgcatgttcatcacagtactagtcacaatagcaaagacatggattcaacctaggtgcccatcaacagtggactggataaagaaaatgtagtgcaatatatatcatgacatactatgcagctataaaaaagaacaaaatcatgtccttggcag

SEQ ID NO: 940489 - DNA, 755 bp, Homo sapiens
acccggctgtccccagcgcaccagtggctgtacagggagattggggacagccacctgctccggtatctctcctggactgtgtaccctgtggccctcgtctctttctcttcaggcttctctcagagcatcacaccctcctctggaggtgagtccacagtcgctacgccagtccccactggccaaaaccttctcagatcccaggggggagtcgggaaggggcagcctcatttcacagacaaaggcccaggaagagtcatgtggcttgcccraagggacacagcaagaaggccagatcttgacttttgggtcactgctggccctacctgctttccaggggctccgctgggacttgatgggaggcctggtgggaggatcttctgcgaagcctgttccagtggccagtgccagggaggggccagtggaggaggcacagctcccccaggccgctcagccctgcctcctgctccaggccagcagaggggagctcaaagctcactcagtggtggcctgagatttcatccgggcttcccctatcctgccacagccttctgccaggcctggcgggaggaacgtgaacaactcacattccctctgtgatgctcggtgtccaaatctgctaaatgagtttaaggaccttaccctaggctgggtgcagtgactcatgcctgtaatcccagcactttaggaggctgaggcaggaggatcacttgtgcctagagtttgagaccagcctgggcaacacagggagaccctgt

SEQ ID NO: 940490 - DNA, 828 bp, Homo sapiens
cagtaagtgggcaccacagcgtctggccccgagggctgcagaggctgtgggtgcctccctgatacccggctgtccccagcgcaccagtggctgtacagggagattggggacagccacctgctccggtatctctcctggactgtgtaccctgtggccctcgtctctttctcttcaggcttctctcagagcatcacaccctcctctggaggtgagtccacagtcgctacgccagtccccactggccaaaaccttctcagatcccaggggggagtcgggaaggggcagcctcatttcacagacaaaggcccaggaagagtcatgtggcttgcccaaagggacacagcaagaaggccagatcttgacttttgggtcactgctggccctacctgctttccaggggctccgctgggacttgatgggaggcctggtgggaggatcttctgcgaagcctgttccagtggccagtgccagggaggggccagtggaggaggcacagctcccccaggccgctcagccctgcctcctgctccaggccagcagaggggagctcaaagctcaytcagtggtggcctgagatttcatccgggcttcccctatcctgccacagccttctgccaggcctggcgggaggaacgtgaacaactcacattccctctgtgatgctcggtgtccaaatctgctaaatgagtttaaggaccttaccctaggctgggtgcagtgactcatgcctgtaatcccagcactttaggaggctgaggcaggaggatcacttgtgcctagagtttgagaccagcctgggcaacacagggagaccctgtctctacaaca

SEQ ID NO: 940491 - DNA, 617 bp, Homo sapiens
accttggtcaagtcaccaaaactctgagccccagctttctcctccaggcagtaaacggaggagttaagagtgggcttggagccagcctgtgctctctgagaactgggacaaccagtgctcctctgggcctctgtcccctccccgtccctcttggggcaggaggactaagtgcaggcttcccccagggccaaggctccttgaagccctcagtagtaacctgggcttctagaaaggtggttgctcrtgcctggtgctaagtttcagatccggctctgacgcttctagctgtcatttggagtaagtttctgaacgtctgagtgcctctgtttccttatttgtaaaatggggacaacaagacccactccctagggctgctgtgaggattctgtgaggtgcctcgtgcacagccctcggtgtggtaagcgctcgattcccgcccccactgtgctcactctctccttcctgctcctggcactgccgggcaatgggcaaggcaaggatcactgccccattttgcagatgaagaaacttaggctgagaaaaggaaggggcttggccgaggtcacactgcctttggtgatgggcagccatccagaatcagctccactctgcccacc

SEQ ID NO: 940492 - DNA, 588 bp, Homo sapiens
actctctccttcctgctcctggcactgccgggcaatgggcaaggcaaggatcactgccccattttgcagatgaagaaacttaggctgagaaaaggaaggggcttggccgaggtcacactgcctttggtgatgggcagccatccagaatcagctccactctgcccacccccgccccctggaccctctgggctgtaccttggagctggacgatgccttgggggctgttctcggggtgcagctcctcttcgtccagcgaggaccaagcgctcagtgtggcctctgtgatggcaaactgctcggcgacccctgggggaacagcgagatccagctcaggggggcatgggtggggacggcctcagtgcctgatggagctgctccaggacaggcgggagggtggccacctctctgggctgccaatccacaccccagtggtcaagagtgctcacttaatacycacccaccctatgccattattttttcctgcccagacaatgcccatgcagtgatctgggcccccaaggacccagcttcacccccacagagccctggccagtccccctcctcgctgacctgcagcaaagcgggcct

SEQ ID NO: 940493 - DNA, 573 bp, Homo sapiens
aaaaataaaataaaatgtatcaaagaactgataggtcagtaagtaatactgagaggtcaaaacacatctaaacaagggttgaaatccagagagcaagtggagctttgaaaccaggtttcaagaaaagacatttgcagaactgggcaagcttgagccccaccctccaccccatccccagagggaggtctcactgaaccttggtggaaagaagacaatacagaaactgcctatatcaaatcttggtgctgaacagaggagggaaaaatcttccctgagaatgtataatgattagcagtcccccaaaaggactacagcccaaatttacaccttatgaaacacatatttcaggcagatgaaagtgatcccagaaagaaaagtattaaatgcaagaaggaaggaagaacaatgaaagtagtatatatrtaagtgagcaaacctaaacaaatgctgaactaatgatgctcataaaagttgtaaaaggactggcacagtggctcacacctctaatcctagcactttgggaggccaaagcaggaggagtgcttgagcccaggagttcaagaccagcctgtc

SEQ ID NO: 940494 - DNA, 606 bp, Homo sapiens
aaagagacaatgtaccagaatctctgcaaggcaggctaaaggattgttaagagggaaacttacagcactaaatgcccacatcaaaaagctagaaagatctcaagttaacaacctaacatcacaactaaaagaactatagaaccaaaaacaaacaaaccccaaagctagcagaagatgagaaataayaaagatcagggctgaactgaaggagacagagacacaaaaaaccattcaaaaaatcaacaaatccagaagttggctttttgaaaaaatgagaaaaatagagagactgctagctagactagtaaagaagaaaagagagaagaatcaaataaacacaataaaaaatgataaaggggatatcatcactgaccccaaagcaatacaaacaaccatcagagaatactataaatatctctatgtacataaactagaaaatatagaagaaatggataaattcctggacacttacacactcccaagactgagccaggaagaagttgaatttttgaacagaccaataacaagttctgaaattgaggcagtactaaatagcctaccaaccaaaaacaaaacaaaacaaaacaaaacaaaagccaggaccag

SEQ ID NO: 940495 - DNA, 499 bp, Homo sapiens
tccattgtcagtagttggtcctagtttgcaatttgcttttcccacacttcagaggctgccttattgtgccctctcagagatcctagcagcaactggcacctcccactccctgcagagctctgagtctcagctccttgtggcctctcctccaagcttygaaattctaataatcctgaggggaaaaatggcagataggagacaaaactaacttgcagcttccactcagatgtacagagcagcatgtgaagactcacattgtgattttctgctccaagaactaccacaggaacataccaggaaaggccagagaatccgcagaccctttcaaggaagcagcttgccactgcaggtgccatgagaacagccaaaaaactgggagtgcccaaagtgtgagagggtgagaatctgctcccaaatgcacatcctcactggggaacctgaaggtctagatcacaggagaaggatttgaccttaccaggagctgagattaatttagaga

SEQ ID NO: 940496 - DNA, 564 bp, Homo sapiens
atcagccatcttggcccctccccctctttctgcacttcaaatacataattccactgccttctgtcctgcaaggtttctgctgagaaatcagtttataaagttattgagaatttcttgtacacaatgagttgcttttcttgctgctttcaagattccctctttgtttcttaagactgattttaatcttagtgtgggtccctttggctttttcaacttagagtttgtttagcttcttggatttgtagattcatgtctttcatcaaatttggaaagtttttggccattatttctgcaaataatctttcaactcctttcttcttctgagactctcaaaatgtatatgttggttcacttgagggtgtctcacaactcttttagactctgtttgttyattttcttctatttttattggcctatctatcttcaagtttgaaaattctttctgctgcctgcgaaatctgctgttgaatcccgccagtaaaattttcaattcagttctagtactttcagctcccaatttagcatatttaagatagttgttttaaagtgtttgtctttaatgtt

SEQ ID NO: 940497 - DNA, 582 bp, Homo sapiens
gcagggcaccaagtccctaggctggacacagcatggggaccctggtcccggcccatgaaaccattttctcctaggcctgcgggcctgtgatgggaggggctgctgtgaagatttctgacatgcccaggagacattttcmccattgtcttggggattaacatttggctacttgtcacttatgcaaatttctgcagccagcttgaatttctcctcagaaaacaggtttttcttttcttttttctttctttctttctttttttttttttttattatactttaagttctggggtacatgtgcagaacgtgcaggtttgttacatgggtatacatgtgccatggtcgtttgctgcacccatcaacccatcatctacattaggtatttctcctaatgctctccctcccccagccccctaccccccgccaggccccagtgtgtgatgttcccctccctgtgtccatgtgttctcattgttcagctcccacttatgagtgagaacatgtggtgtttggttttctgttcttgtgttagtttgctgagaaggtttttcttttcatattgcattgtcaggatgcaaattttcg

SEQ ID NO: 940498 - DNA, 607 bp, Homo sapiens
cctgactgttagaaggaaaactaacaaacagaaaggatatccacatcaaaaccccatctgtacgtcaccatcatcaaagcccaaaggtagataaaaccacaaagacggggaaaaaacagagcagaaaaaatggaaactctaaaaatcagagtgcctctcctcctccaaaggaatgcagctcctcaccagcaatggaacaaagctggatggagaatgactttgatgagttgakagaagaaggcttcagatgatcaaactactacgagctaaaggaggaagttcaaacccatggcaaagaagttaaaaaccttgaaaaaaaattagatgaatggctaattagaataaccaatgcagagaagtccttaaaggacctgatggaacagaaaaccaaggcacgagaactatgtgacaaatgcacaaacctctgtagccgattaaatcaactggaagaaagggtatcagtgatggaagatgaaatgaatgaaatggagtgagaagagaagtttagagaaaaaagaataaaaagaaatgaacaaagcctccaagaaatctgggactatgtgaaaagaccatatctacatctgattggtgtacctgaaagtgatgg

SEQ ID NO: 940499 - DNA, 607 bp, Homo sapiens
cctgactgttagaaggaaaactaacaaacagaaaggatatccacatcaaaaccccatctgtacgtcaccatcatcaaagcccaaaggtagataaaaccacaaagacggggaaaaaacagagcagaaaaaatggaaactctaaaaatcagagtgcctctcctcctccaaaggaatgcagctcctcaccagcaatggaacaaagctggatggagaatgactttgatgagttgatagaagaaggcttcagatgatcaaactactacgagctaaaggaggaagttcaaacccatggcaaagaagttaaaaaccttgaaaaaaaattagatgaatggctaattagaataaccaatgcagagaagtccttaaaggacctgatggaacagaaaaccaaggcacgagaactatgtgacaaatgcacaaacctctgtagccgattmaatcaactggaagaaagggtatcagtgatggaagatgaaatgaatgaaatggagtgagaagagaagtttagagaaaaaagaataaaaagaaatgaacaaagcctccaagaaatctgggactatgtgaaaagaccatatctacatctgattggtgtacctgaaagtgatgg

SEQ ID NO: 940500 - DNA, 730 bp, Homo sapiens
ctttcagtcatatacttgcaacagttccacaatggagcctttctctttaaaatatggaaaattatcaggtgactcattacatgcaaaaatacgtctgataacactacccaaacaagcaaaccaactgtatctgacagtcgcagctcatctcgaggcaaagtgcaataacatttaaaacacttgagattttggccgggcttggtggctcatgcctgaaatcccagcactttgggagtacaaggtgggcggatcacttgaggtcaggagttcgagaccagcctggccaaaatggtgaaacctcattctctactaaaaatataaaaattagccaggtgtggtagcacacacctgtagtcccagctactcgagagactgaggcaggagactcacttgaacctgggaggcagaggttccaktgagctgagaacataccattgcactccagcttggacaacagcgggagactctgtctcaaaaaaaaaaaaaaaaaaaatgagattttattcatgcttcattcagataattgggtgtctagtatgtgccagggactgctagagggttgtgttttactcactgatgtatctcaaagatctaccctccaccccaacctacaggtcttactttggagagcggggaaggaggtgatgagggcaggcttctttttcgatcaaagttctctattaaccaaaacagaaaaattacaattaaatcattctatgataagatcagg

SEQ ID NO: 940501 - DNA, 594 bp, Homo sapiens
tgcccctgggacttgtccggctcatccggagtgaggagggcctggagatgctcattcaatgagcgggaggcatctctcccttcccgtaacttctcccttaactgggtcagctctcgttcctgagagtgaaccaggactttatattgcctaaggtgagacggtagagaaaatttaacagtgaaaagcattgagtgatccgttcaaatattgcaacagagatttctgagacaatgttctcaaggagaccttcaagcagaaggtcagcacatgttgaaaggaatgtctgtggccaagagaaagaayagaaaatggtctacaggctttccctctatcagagagggctcctgcaagatcctcgatgatgttccattcatctttcccttctgtaaataaaagtaggtgtcttcctaattccgtttcaaaaagacatcctttcagttcctcactctggccatggacatttccatgtgaaaatacacatagtgcatcttgcggccactagatacaaagccatgtacagaaatgaggccaggtgcagatggggcgaattgaaaagacgaaagaagaaaagaatgacagggtcgagaaggcaac

SEQ ID NO: 940502 - DNA, 734 bp, Homo sapiens
actagcctctgtaaaattctctgaaccaaaacaagaaggctccttctttggtatatgtgtcttttccattccctctgcctgaaagttctagtgttctagtccgtttgggctgttacgacaaaaataccatagaatgggtggcttataattaacagaaatgcatttcttatggttctagaggctaggaagtccaagatcaaggtgctggcacattcrgtgtctggtgagggtcccctttctgtttcatagatggctctcttctcaccatgctctgttatggagaaggggcaaagggagctctctggtctctttcataagggcactaatttcattaatgagggctctgttcaccttcatgacctaatcgcctcctagacaccctccttcctaatgtcatacctttggcgataggatttcaactaagaattttagaggaatataaactgtcagtctatagcaccctgatagacaaaggacttgctctctcacctccttcagatctctgctcaaagctcaggtaccagtgaggctttccttgaccccctctcccactgcttacaacagcagctcctctttccccatgccccatcccagggcccattttccctcatagttttgtattcatgtttctctattgcagtattataccactgcctgctatatttttatttattccaccccaccccttgaatataaggccccaaagaatccatatttttcttttgttgcattca

SEQ ID NO: 940503 - DNA, 657 bp, Homo sapiens
gctgtgtttaatgctgcttagaggttgaggttgagtgagaggaggttctcactggccttggcaaaagcatttttagtaggtaatagggacaaaagtctgtttgaggtagattcaagagagaatggcagatgaaaagcagggctagtgaatatagacatctkttttgggagtttaatgtaaagaggaacagagaacagggtgagagcagaggggatcgtgagatcaagagtaattttttttaaaggcatgagatcttatagcaagaatgtatactagcgggaataattcaatagaaaggagaaatggtgatgctggagagaaaggaggttccagggagaggatggaatacaaactacaagagtggtattgatcctagattcatccagggagagttcatctatggttattggttggaagtcaggttgtatgagtacagatgaaggtaagcctagagatttaatcaaataaaatattgaactgttctttttatatttttgaattaaattttgatttcctggaatgaaatattttcttatactttaagacaaaacattggcccttggaagaggacctgtcctaccaaatggacaatgactggccaacagagatggaaaatgttttgcatctgtgcagccagaggtcctgcaagtgctttct

SEQ ID NO: 940504 - DNA, 657 bp, Homo sapiens
gctgtgtttaatgctgcttagaggttgaggttgagtgagaggaggttctcactggccttggcaaaagcatttttagtaggtaatagggacaaaagtctgtttgaggtagattcaagagagaatggcagatgaaaagcagggctagtgaatatagacatcttttttgggagtttaatgtaaagaggaacagagaacagggtgagagcagaggggatcgtgagatcaagagtaattttttttaaaggcatgagatcttatagcaagaatgtatactagcgggaataattcaatagaaaggagaaatggtgatgctggagagaaaggaggttccagggagaggatggaatacaaactacaagagtggtattgatcctagattcatccagggagagttcatctatggttattggttggaagtcaggttgkatgagtacagatgaaggtaagcctagagatttaatcaaataaaatattgaactgttctttttatatttttgaattaaattttgatttcctggaatgaaatattttcttatactttaagacaaaacattggcccttggaagaggacctgtcctaccaaatggacaatgactggccaacagagatggaaaatgttttgcatctgtgcagccagaggtcctgcaagtgctttct

SEQ ID NO: 940505 - DNA, 607 bp, Homo sapiens
ctcttggaactgtacacccattggaacccttagagtaaaactaactagggaaaattctcccaagaagaagatggcatccttgatgtgaacagcttttcccaagttcacagataaagatttctattatcatgaaactcttatctttgaatattgtatcttgcttatgcctctaggacaaagagaagtggaaaasaggtctgttacgtgcacttatggggtgtactcttatttgtgaagaactttgcagccagccttatacatggataagcttacactttgatagataaaagacgaaggcccaatgtaggtaagaaactttaatggtacatacattgactcataatcagtgaaaaacaaaacgttggttcactcctcttaacccacaccatgggttaaagaaaacattgccaggaggccttcactcttttagaagagcatcatttgtcaagtcctttttccatggttcagagtaaagaagcaatgaatagaaatgtatcccccatgataggctctgtagaaaattctgctgtaaaggctacagttacacaacagattttaaattctcttgtgaaagttatgatagaattgactgaacaaagaagtatct

SEQ ID NO: 940506 - DNA, 596 bp, Homo sapiens
atgggcttatcaaacggcacaccaggagattatatctcgcaccgggcttggagagtcctatgcccacggagcctcactcattgctagcacagaagtctgagatcaaactgcaaggcggcagccaggctgggggaggggcgcctgccatttgctcaggcttgactaggtaaacaaagtggccaggaagctcraactgggtggagcccaccacagctcaaggaggcctgcctgcctctgtaggctccacctctgggggcagggcacagacaaacaaaagacagcaataacctctgcagacttaaatgtccctgtctgacagctttgaagagagtagtggttctcccagcacgcagcttgagatctgagaacgggcagactgcctcctcaagtctgtccctgacccccgagtagcctaactgggaggcaccccccagtaggggcggactgacacgtcacacggccgggtactcctctgagacaaaacttccagaataacgatcaggcagtagcatttgcggttcaacaatatccgctgttctgcagccactgctgctgatacccaggcaaacagggtctggagtggacctccagtaaac

SEQ ID NO: 940507 - DNA, 597 bp, Homo sapiens
ttgaggaggcagcctgtcccttagcagagctggtgcactgtactgggagaatcacccttgtcagtatcaactgctgtcttcagagtcggcaggcaggaaagattaaatctgctgaagcctcgtgcccacagccaccccttcccccaggtgctgtgtccgagggagatgagagttttatctgtaagcccctgactggcgctgctgtctttccttcagaggtgctccgcccagtgaggaggaatctagagaggcagtctggtgacagccgctttgccccgctgtggtgaattccgcccagtcsagacctgccaggcaccttagcactgtcaggggaaaaccacctactaaagccttggtaatggtggacgcccctcccctcaccaagctccagtgtccctggtcgacttcagactgctgtgctgacagtgagaatttcaagccagtggttcttagcttgctgggctccatgggagtgggacccactgagcgagaccacttggctccctggcttcagccccctttctagggaagtgaagtctcactggggttcctggaaccactgggttttgaaaaaaactcctgcagctagctcagtgt

SEQ ID NO: 940508 - DNA, 581 bp, Homo sapiens
gtctgttggagtttgctggaggtccactccagaccctgtttgcctgggtattaccagcggagtctgcagagcagcaaatgttgaagaaaagcaattattgctgtctgatcattcctctggaagcttcgtctcagaggggcacccggctgtgtgaggtgtcttttggcccctactgggaggtgtctcccagttaggctgcataggggtcagggacccacttgaggaggcaatctgtccattctcagagttgaaaccccgtgctgggagaaccactgctcttttcagagctgtcagacagggatgtttaagcctgcagaaggttctgctgccttttgttcagctatgccctgcccccagaggtggagtctacagaggcgtgcgggcctcattgagctgcagtgggctccacccagtttgagcttcccagccrctttatttacctactcaagcctcagcaatggcagatgccccttccccagccaggctgccgcctagcagtttgatctcatactgctgcactagcaatgagcaaggctctgtgggtgtgggacccgctgagccaggcgcgggatataatctgg

SEQ ID NO: 940509 - DNA, 555 bp, Homo sapiens
ctaaactaaaaagtttctgcacagcaaaagaaataatcagcaaagtaaacagacgatgacaacccacagagttggagaaaatatttgcaaactatgcattccacaaaacactaatatccagaatctacaaggaactcaaagaaaccagcaagaggaaaaaaaataatcccatcaaaaagggtgcaaaggacatgaatagacaattctcaaaagaagatatacaaatgggcaagaaacatatgaggaaccactaawcatcactaattatcagggaaatgaaaatccaaaccacaatgaaataccacctaactcctgcaagaatgaccataattaaaaagcagaaaaataacagatggtagtatggatgtgatgaaaatggaacacttttatactgctggtgggaatgtaaactagtacaaccactatggaaaacagtatggaccttccttaaagaactaaaagtagaactactatttgatgcagcaatcccactactgggtatctacccagaggaaaagaagtcattatatgaaaaagacacttgtatatatgttt

SEQ ID NO: 940510 - DNA, 658 bp, Homo sapiens
acatagatggaactgaaggatattaagtgaaataagccagaaacaaaaagttaaatgctgtgtgctctcacccatatgtggaagctaaaaaaaatttgatctaatgtaagtaaacagtagaacagaggatattagaggctgggaagggtgggggaaaggaggaataaggagagatttgttaaaggatacaaaattacatctagatagcaagaataagttatagtgttctgtggcactgtaggatgaccatagttaacagtaatatatagtttcaaataactagaaggagaatactgaacattaccaacacaaataaatgataaatatttgagatgatggatatgctgattaccctgatctgatcactatacatcatragtattgaaacatggctatgctaattaccctgatctgatcactcaacattatgagtattgaaatatgctaattaccctgatctgatcactatatattgagtattgaaactattgtactttataaatatgtacagttattatttttcaattacaaataaataaagtcccatcccactgccccaatattttggcacaattctgaagggccatcccagctccagagctcactgcaggatcgactgggtcctctgttgcaaccatattgctgatagtttttgcct

SEQ ID NO: 940511 - DNA, 559 bp, Homo sapiens
gtggtgcccacccagattgagagtggatctgcctctcctagtccactgactcaaatgttaatttcctttggcaacaccctcacagacacacccaggaacaatactttgcatccttcaatccaatcacattgataccttgttttatttcatcataatttgagaagataactgatatgattttgactttttaatatttgtttagacttgtttgtggcctgatatgtgatcttccatgtgccaatgagaagcatgtgtattctgcacttgatcttagccaaaaggcgaagtgatgagaatgtgtattcagtagttgttggaggaaatgttctgtaaatrtctgttaggtccatttgatatatagcacagtttaagtttaatgtttctttgttgattttctgtctagatgatatccagtgctgatagtgggatgctgaagtttccaactattattgtcttggggactctttctctccttagctctaataataattcctgtttagaactgggttctctagggttagctttttatatatttataattgttatatcctctctctgg

SEQ ID NO: 940512 - DNA, 710 bp, Homo sapiens
gaccctcacccaatttccagacttgaaccagtttacagtttgtaaacttgacccactttacttgaaggaaaggctggatccccttgaggaaggatcccactacactaccaacagtttatgctgttaatctttcttccatctttccccaaagagacctccagccttttactagggtaactgtgcataggggaaagggaaataatcagacctttcagggactactggtcactggctctgagctgacattgattccgggggactcaaaaatgttattgtgatcctccagttaaggtaggggcttatggaggtcaggtaattaatggagttttagctcagatccaacatagagtggctccagtgggtccttggactcaccctgtggtcatttccccagtgccagaatgcataattgggacagacatacttagtagctggcagaacctccacattggctccctgactggtaaagtgagggctgttatggtgggaaaggccaaatggaagccattagaactgcctctacctagaaawatcatacatcaaaataatatcgcatccttacaaaaattgcagagattactgccaccatcaaggtcttgaaagatgcaggggtggtgattcccaccacatccctgttcaactctcccatttggcctgtgtagaagacaggtggatcttggagaatgatagtggattatcgtaagcttaac

SEQ ID NO: 940513 - DNA, 601 bp, Homo sapiens
aaggtggaatggccttttgaagtcacaattacaatgccaattaggtggcaatactttacagggctggggcaaagttctccagaaggctgtatatgctctgaatcaacacccagtttgtggtactcgttcccccatagccaggattcatgggtccagtaatcaaggggtggaagtggcaccactcaccatcacccctaatgacccactagcaaattttttcccttttgttttattttttatttattttttaaactatgtttttatttccataatcattggggaacaggtggtgttggttatataagttctttagtggtgatttgtgagattttggtgsgcccatcagacgagcagtatacactgcacccaatttgtagccttttatcccttactccctccctaccctttgcttttgagtccccaaagtccattgtgtcattcttatgcctttgcatcctcgtagcttagctcccacttatgagtgagaacatacaatgcttggttttccattcctgagttacttcacttagaataatagactccaatgtcacccatgtcactgataatgccatcaattcattcctttttgtggctgagtagt

SEQ ID NO: 940514 - DNA, 765 bp, Homo sapiens
acaacatgtcaatgccatacttaaataagcactcatttctaacacatctgtgggttggctggaggtggtctgagctagggtaggcaactcactttttttttttttttttttaaagtttcactcttgttgcccaggctggagtgcaatggcaccatctcagctcactgcaacctccacctcccaggttcaagtgattctcctgcctcagtctcctgagtagctgggattacaggcatgcgctaccacgcccggctaattttgtctgccttccttcctttctttcctttctttctttcaacggagttttgctcttgttgcccaggctggagtgcaatggcgtgatctcggctcaccgcaacctctgcctcccrggttcaagcgattctcctgcctcagcctcccaagtagctgggattacaggcatgtgccaccacgcccggctacttttgtatttttagtagaaacggggtttctccatgttggccaggctgatctcgaactcccgacctcaggtaatccgcctgcctcggcctcccaaagtgctgagattacaggcgtgagccactgcgccaggcctaattttgtattttttagtagaaacgggggtttctccatgttggtcaggctcgtctcgaactccggacctcaggtgatctgcctgtctcggcctcccaaagtgctgggattacaggtgtgagccactgcgctgggcctggcaactcactttcaagctggctgggcttggctcctcacatttgtgcattc

SEQ ID NO: 940515 - DNA, 765 bp, Homo sapiens
acaacatgtcaatgccatacttaaataagcactcatttctaacacatctgtgggttggctggaggtggtctgagctagggtaggcaactcactttttttttttttttttttaaagtttcactcttgttgcccaggctggagtgcaatggcaccatctcagctcactgcaacctccacctcccaggttcaagtgattctcctgcctcagtctcctgagtagctgggattacaggcatgcgctaccacgcccggctaattttgtctgccttccttcctttctttcctttctttctttcaacggagttttgctcttgttgcccaggctggagtgcaatggcgtgatctcggctcaccgcaacctctgcctcccaggttcaagcgattctcctgcctcagcctcccaagtagctgggattacaggcatgtgccaccacgcccggctacttttgtatttttagtagaaacggggtttctccatgttggccaggctgrtctcgaactcccgacctcaggtaatccgcctgcctcggcctcccaaagtgctgagattacaggcgtgagccactgcgccaggcctaattttgtattttttagtagaaacgggggtttctccatgttggtcaggctcgtctcgaactccggacctcaggtgatctgcctgtctcggcctcccaaagtgctgggattacaggtgtgagccactgcgctgggcctggcaactcactttcaagctggctgggcttggctcctcacatttgtgcattc

SEQ ID NO: 940516 - DNA, 558 bp, Homo sapiens
tctccatcctagctccgcctctcacaattctctggctccagatcccgcccacgagaccccgtttcctatagggccctttcgtctgggataccaggcctggtctccactagcctcggactttccagccccaggtcccaaatcctggacccacmgtcccatcctctgagctccactctcatggaccccaaacctcactccagtcctttgaactccatgatcctggcctggcctggcccccggagccctccattgcccctcaagagcccagcctggtagactccttccctagggttgcatctccagccccgcccctgaagactggtaatctaccacccctttccctgcccacgtgcccctacccagcccgacttgaggccttcagtctcccagccgcggaccccaacagcgggcgagggcagtgaccgtgcggggatgagccacctccactggagcccgccttcttctccgcaattccccgcagcaccacagcgccttcccggtcccgtgacgccgggggccagcccaggccctgggatcgccaggttccacactatgagg

SEQ ID NO: 940517 - DNA, 757 bp, Homo sapiens
ggggacccaggcgacgctggcctccatccgataaccaccgtaacaggggctgggccgcgccgctcctccgctctaagtgctctttacatgcttcttaagttaccggcaggccagccgcccttacgagagcccctcacggacattaacccaattgagaagactgaacccagcwtacgaacgttaagttgtcccaaatcgcagggctggcgagtgaggagcctgaattggaacccaggagcttctggaacccgctccagaattgcgctctcgaccggtttgtccgctgagagcgaacgggtgcgcgagcgccgcatccctgcccaaggccatcaggcaggcagcgctggggccggggacccgcgcggagactccaccccgggatccgggaaggctcccccgagccggggtcggagctgcggctggaggggcctcggcttgaggaggatctgggagggcgggggctcagtcctggccaccaggtgtgaggggtcgggtgcggagccctgtgtcagacgcggcggtgaaggctgtagccctgctctccgggatgggggtggtactctcaccccaccctgccccaagccgcagggagcccctggcgcccctggcgcccgggacccgccctggctggagccctgcggtttccgggagctcacggtcggctctgcgcccctccaccgccgggcctgggcctgggccagggacgggctggggcgggactgcggcctcggggcgctgggtccctgcccctgccgtg

SEQ ID NO: 940518 - DNA, 585 bp, Homo sapiens
caccacaatcgaggcaggcctacaaatggcccaaactctccagaaatgaaggtttgggtcatcctgccatgttaagaactacaaccagctgaggtgcctgctgaaagcaaaaggaatgtagaagggcattagaagaagacagtcataagcatcggctacaataatatgaccagttacagaaacaaggactaaaattgtcattaatatttcctctgtattttgttatgaatatatttgtgtgtatatatacatatattatgtaaatatcttatttcctctcttattcccttatcatgtaacataatatgtatttactttatagcagtatttaaacagtgtttattttacatcattgtatttaagttatgggrtatcaggaaaaaagtaaagaccaatcaaagactttacctcctcttctggggagtaagttagtgtattttcagttgtacccagaatagttgtgtcatgttgggtagaattatgaccttgttttagtcattatctggaaattaagtatggtttagggaaatgtgtatgggtgtcagattaacatgggatgaacttgtgaggaccaattttatgtgt

SEQ ID NO: 940519 - DNA, 594 bp, Homo sapiens
aaacttccagaggaatgatcaggcagcaacatttgctcttcaccaatatccgctgttctgcagcctctgctgatgatactgagtcaaacagggtctggagtggacttccagcaaactgcaacagacctgcagatgagggtcctgactgttagaaggaaaactaacaaacagaaaggacatctgcaccaaaaccccaactgtatgtcaccatcatcaaagaccaaatgtaggtaaaaccacaaagatggggaaaaaacagagtagaaaaactgaaaattctaaaaatcagagtgcctctcctcctccaaaggaaagcagctcctcaccagcaatggaacaaagctggatggagaatgactttgaagaattgagaggaaaaggcttcagatgatcatactaawctgagctaaaggaggaagtttgaacccatggcaaagaagttaaaaaccttgaaaaaaagttagacgaatggctaactagaataacaaatgcagagaagtccttaaaggacctgatggactagaaaaccatagcacgaaaactacataacgaatgcaccagcctcagtagctgatttgatcaagtggaagaaag

SEQ ID NO: 940520 - DNA, 468 bp, Homo sapiens
tgttggagtttgctggagttccactccagaccctgtttgcctaggtatcactagcagaggctgcagaacagcaaataatattgcagaacagcaaatattgctgcctgatccttcctctggaagcttcttcccagaaggggacctgcctatatgaggtgtctgtcagcacctactgggaggtgtctctcagttaggctacttgggggtcagggacccacttgtggaggcagtctgtccattctcagaactcaaatgccrtgtgggagaaccactgctctcttcagagcgtgccagacaaggatgtttaagtctgcagaagttgtctgctgccttttgttcagctatgccctgcccacagagctggagtcaataggtcttgttgagctgtggtgggctccacccagttcaagcttccggactgctttgtttacttactcaagcctcagcaatggcggatgctccaacccc

SEQ ID NO: 940521 - DNA, 548 bp, Homo sapiens
gatggctgattaaaccctgcagtgatagtactaatgcaggaacaccaaattaacaactatccacacaagaaagcatctttataagaaccaaaaaatcaggtgagggatcacagtacctggttttaacataatatcaaagaagtagtcattgaagataacaggaaagacactcttgtgttgcttacaccactccctgaacattctctatcaggagagagaatctgtatgtgtttgaggaagggagactgaagtgagtgtgagtctctgcattggaattcagtgctttccctttacagtggaacacaacacaggtcacaattctggtagtgcccacagagggagcatttagagcagcamcaggccagagaggtattctcagccccaacaagagaaatccaagccccgggtaggttcatcattggctcactaaagtggactaagttccagaataaacttgtgtggcagtcaggtcacaagcactgcagtacttgggcaagccctggtgctacacaggtttcagaggcagtggacttgagttatgtgtggcc

SEQ ID NO: 940522 - DNA, 618 bp, Homo sapiens
aatggattgaagacttaaatctaacaccacaaactacaaacttactaacagaaaacattgaggaaactctccataacattgaagtgggcaaagatttcttaagtaataccccacaagcacaggaaaccaaagcaaaaataaaagaaatggaatcatatcaagtcaaaaagcctcttcacagcaattgacacaagaarcaattgacaaagtgaagagacaactcagaatgggagaaaatatattcaaactactcatattagaagacattaataaccagaatatataaggaactcaaacaactttatagaaaaaaatctaacactccaatttaaaaatgggcaaaatatctgaatagacatatatcaaaagacatacaaatggcaaacaagcctatgaaaagtgctccacatcactgattatcagagaaatgcaaatcaaatctacaatgagatatcagctcagcccatttcaaatggcttttatgcaaaagtcaggcaataccaaatgctggctaggagatggagaaaagggaacccttttcactcttgtacagccttggtggaaatgttaattagtacaactactatggagaacagtttagaggctccgcaaaaagta

SEQ ID NO: 940523 - DNA, 611 bp, Homo sapiens
aaaaattcattcatttgaagatgctccattttattcttgcctccatcatgtatgatgagaagcttgctgtaactgaatcacctttactctatacatagtgtgtcatttttctcattttctgctttctagtttagctctttggttttcaacagtttgactataatgtgtgcatagacatggcctcatttgtacttatccagctttggattcattaagcaagttgaatctgcaaatctatgtctttcagyaagtttaggaaattttggatcatttttttcaaatatatattttgccctattctcttttcttcttgaactcctaatacacgtatgtcattctgttagatactatctaacaagtctctgaagttctgttcttttttaaaaaatctttttccttctttttttggcctgtacaatttttattgatctgttttcaagtttactgactcttctgtttttgctgttaaatctgcagagtaagtttttgttggacatattgtattcttttcagttctagaatttttaatcatttctatttctttgctgagatttcctatattttattcattgagagcatatatacttttatgtcattgatatatttataat

SEQ ID NO: 940524 - DNA, 611 bp, Homo sapiens
aaaaattcattcatttgaagatgctccattttattcttgcctccatcatgtatgatgagaagcttgctgtaactgaatcacctttactctatacatagtgtgtcatttttctcattttctgctttctagtttagctctttggttttcaacagtttgactataatgtgtgcatagacatggcctcatttgtacttatccagctttggattcattaagcaagttgaatctgcaaatctatgtctttcagtaagtttaggaaattttggatcatttttttcaaatatatattttgccctattctcttttcttcttgaactcctaatacacgtatgtcattctgttagatactatctaacaagtctctgaagttctgttcttttttaaaaaatctttttcyttctttttttggcctgtacaatttttattgatctgttttcaagtttactgactcttctgtttttgctgttaaatctgcagagtaagtttttgttggacatattgtattcttttcagttctagaatttttaatcatttctatttctttgctgagatttcctatattttattcattgagagcatatatacttttatgtcattgatatatttataat

SEQ ID NO: 940525 - DNA, 651 bp, Homo sapiens
tttggctgtgtcccaacacaaatctcatcttgaattcccttgtgtcttgggaggggcccagtgggaggcaactgaatcatgggggcaggcctttcccatgctattctcatgatagtgaataagactcacaatatctcacagttttataagrgggagattccctctataaactctcttctcttgtctgctgccatgtgagacatgcctttcaccttctgccatgattttgaggcctccccagccacgtggaactgtaagtccattaaacctctttcgtttgtaaattttccagtctcaggtatgtctttagcagcactgtgaaaacgatgagtacagtaaattggtaccagaagcagggtgctacagaaaagatacctgaaaatgtggaagtgactttggaactgggaacaggcagaggtttggaacaatttggagggctcagaagaagataggaaaatgtgggaaagtttggaactccctagacatttgttgaatagctttgcccaaaatgctgatagcgatatggacaataaagtccaggctgaggtggtctcagatggaaatgaggaacttgttgggaactagagcaaaggtgactcttgttatgttttagcaaagagactggcagcatattgcccctgccctagagat

SEQ ID NO: 940526 - DNA, 651 bp, Homo sapiens
tttggctgtgtcccaacacaaatctcatcttgaattcccttgtgtcttgggaggggcccagtgggaggcaactgaatcatgggggcaggcctttcccatgctattctcatgatagtgaataagactcacaatatctcacagttttataagagggagattccctctataaactctcttctcttgtctgctgccatgtgagacatgcctttcaccttctgccatgattttgaggcctccccagcyacgtggaactgtaagtccattaaacctctttcgtttgtaaattttccagtctcaggtatgtctttagcagcactgtgaaaacgatgagtacagtaaattggtaccagaagcagggtgctacagaaaagatacctgaaaatgtggaagtgactttggaactgggaacaggcagaggtttggaacaatttggagggctcagaagaagataggaaaatgtgggaaagtttggaactccctagacatttgttgaatagctttgcccaaaatgctgatagcgatatggacaataaagtccaggctgaggtggtctcagatggaaatgaggaacttgttgggaactagagcaaaggtgactcttgttatgttttagcaaagagactggcagcatattgcccctgccctagagat

SEQ ID NO: 940527 - DNA, 651 bp, Homo sapiens
tttggctgtgtcccaacacaaatctcatcttgaattcccttgtgtcttgggaggggcccagtgggaggcaactgaatcatgggggcaggcctttcccatgctattctcatgatagtgaataagactcacaatatctcacagttttataagagggagattccctctataaactctcttctcttgtctgctgccatgtgagacatgcctttcaccttctgccatgattttgaggcctccccagccacgtggaactgtaagtccattaaacctctttcgtttgtaaattttccagtctcaggtmtgtctttagcagcactgtgaaaacgatgagtacagtaaattggtaccagaagcagggtgctacagaaaagatacctgaaaatgtggaagtgactttggaactgggaacaggcagaggtttggaacaatttggagggctcagaagaagataggaaaatgtgggaaagtttggaactccctagacatttgttgaatagctttgcccaaaatgctgatagcgatatggacaataaagtccaggctgaggtggtctcagatggaaatgaggaacttgttgggaactagagcaaaggtgactcttgttatgttttagcaaagagactggcagcatattgcccctgccctagagat

SEQ ID NO: 940528 - DNA, 651 bp, Homo sapiens
tttggctgtgtcccaacacaaatctcatcttgaattcccttgtgtcttgggaggggcccagtgggaggcaactgaatcatgggggcaggcctttcccatgctattctcatgatagtgaataagactcacaatatctcacagttttataagagggagattccctctataaactctcttctcttgtctgctgccatgtgagacatgcctttcaccttctgccatgattttgaggcctccccagccacgtggaactgtaagtccattaaacctctttcgtttgtaaattttccagtctcaggtatgtctttagcagcactgtgaaaacgatgagtacagtaaattggtaccagaagcagggtgctrcagaaaagatacctgaaaatgtggaagtgactttggaactgggaacaggcagaggtttggaacaatttggagggctcagaagaagataggaaaatgtgggaaagtttggaactccctagacatttgttgaatagctttgcccaaaatgctgatagcgatatggacaataaagtccaggctgaggtggtctcagatggaaatgaggaacttgttgggaactagagcaaaggtgactcttgttatgttttagcaaagagactggcagcatattgcccctgccctagagat

SEQ ID NO: 940529 - DNA, 735 bp, Homo sapiens
gtcttattagccatgttagcctgtatcacaccatactcactattgtcctaaaagggggaaaccacaaactagagatagaaaagggtgaagtttgtggtcctgaattccaaattatcctcagagacttccctcccatgatttcctgtttttttctttcttttttttatggagacagggtcttgctctgtcacccaggctagagtgcagtggcaattgtagcccactcactgcagccttgaattgctgggctcaacctacctcaacctcctgagtagctgggataacagatgcatgccaccatgcctggctaatatttatttatttatttattttgtagagagggggtcttgccacgttgtccaggatgctcttgaactcttgggctccagcgatcctcctgcctcagcctcccrgagcactgggattacagccgtgattttctagacctgatgttctctgaatcattaaactgtactgttacttcaagaatcaatttcaaatgttacctctttgatgaaactttgaccccttgcactaggtcggagtaatgtcttccaccttggactcccagtagcttttcatctgtcctactcaatagggatgaagtataaatatatatatatatatttggagacagggtctcactctgtttcccaggctgccagcagaatgctctgcagcctccaactcctgggctgaagcaatcctcctgcctcagcctcccaagaagctggg

SEQ ID NO: 940530 - DNA, 705 bp, Homo sapiens
ctgacctcaggtgatccgcccaccttggccttccaaagtgctgggattacagacgtaagccactgcatttgttttattttttgggacagagtctcactctgttgcccaggctggagtgcagtggcacaatcacggctcactgcagcctcaacctcccaggctcaagccatcytcccatctcagcctccaaaatagcttggactacaggtgcacaccaccacaccaggcaaattgttttaatttttatgtagagacagggtatcactttgttggccaggctggtcatgaactcctgggctcaagcgattctccaactttggcctcccaaagtgctgggattacgggtgtgagtcactacacccaacctcattctttaatttggataataaatgcttttcacacctgcccaggctcttaaatattcacaagagacttaaagggactgagtgactgattcctcccagcctctaaaccaccctgcctggggcttgtctcagggatctctaaaagccgccaccaccccggcctcagcacccaccgtgcagctcagcaactctacagcaactcccagctccttgtggctctctcctttgccctcctgctgttaatgaactctgcagggtcacacagctattcatgcctgttatgacttcttggctccttaactagactgtaggcagatattatctgagggggtctactcat

SEQ ID NO: 940531 - DNA, 651 bp, Homo sapiens
tctagggataatcagctctcacctgctctctagaatgcccagcccagaggcggtcagcagtacttaatcagtaagggccacacactgggtgatgtgcattggctctgtgtccccactgaaatctcatctcgaattataatccacatgtgttgggggaggggcctggtaggaggtgatttaatcatgggggctgacttcccccttgctgttcttgtgataatgagtgagttctcacsagacctggttgtttgaaagtgtgtggcactttccccttcactgtctctcctgctctgacgtggtaagatgtgcttgtttcccctatgcctcccgccatgattgtaagtttcctgagatctcctagtcatgcttcctattaagccttcagaactgtgagtcaattaaacctcttttcttcataaattacccagtctcaggtagttctgtagagcaatgtgaaaacagactaatacactggggcaacaaatataagttcatctgttatcattatcaccatcaaaaattcacattttacaagtcgatagggcagtttctcaaaaaattaaaattaaattaccacatgacccagccatcccacttctggatatttacccaaatgaattgaaagcagggtcacaaagagatattcgaaca

SEQ ID NO: 940532 - DNA, 619 bp, Homo sapiens
gcccagcccagaggcggtcagcagtacttaatcagtaagggccacacactgggtgatgtgcattggctctgtgtccccactgaaatctcatctcgaattataatccacatgtgttgggggaggggcctggtaggaggtgatttaatcatgggggctgacttcccccttgctgttcttgtgataatgagtgagttctcacgagacctggttgtttgaaagtgtgtggcactttccccttcactgtctctcctgctctgacgtggtaagatgtgcttgtttcccctatgcctcccgccatgattgtaagtttcctgagayctcctagtcatgcttcctattaagccttcagaactgtgagtcaattaaacctcttttcttcataaattacccagtctcaggtagttctgtagagcaatgtgaaaacagactaatacactggggcaacaaatataagttcatctgttatcattatcaccatcaaaaattcacattttacaagtcgatagggcagtttctcaaaaaattaaaattaaattaccacatgacccagccatcccacttctggatatttacccaaatgaattgaaagcagggtcacaaagagatattcgaacaccca

SEQ ID NO: 940533 - DNA, 663 bp, Homo sapiens
gatgggcgatagctgaaagaaaacctggcgggccataggcaggtaaaatgtagttttattcagcagctatctcatcagcagctctcacactgtccacctttacctaggctgtcttctccagatctgcagctcctctcagcagccagctctgtggctcctgccacccccatgcttgcaggtgcactccctggctacagggtcagcggcttaactctccctctgggcacaagctgagccatgtcctggctcccctctatctatctgccagatggtcactctcccttacaggggtcaatagcttcactctctctgggtgctagtgcacaccacgtggagccatgcccatccgagcccaagaacatctgtacagcgtcagcagggcagttataccttttccaaacaatagtggctttgagccaagtatgaacttacacaagcaggttatataacaagtggagtatacgcctgtgacctaaactcgctgagtcactctggcctggatatccaccttggtctaytccttgaccaaagcacatccatgtactttacaacaggtggtctccaagtgtgtagaccagggtctcaaacccaaaggcctgcaggagccaaatgggtgacatgggcttagtgtaatacaagacggagcctatagcaaataaggag

SEQ ID NO: 940534 - DNA, 591 bp, Homo sapiens
tgcctgctctttcctcttcctgattattcgacccttctattggtaaattctactttttgcttaaggtagttcaagatcggttaccaaaacaatccataattaatatacatttgtttcttatgcacccagaccaagaaaggaactcaatgtttatstacattataaaactaattttataagtgggctgggcgcggtggctcacgcctgtaatcccagcactttgggaggccgaggcgggcggatcacgaggtcaggagatcgagaccatcctggctaacacggtgaaaccccgtctctactaaaaatacaaaaattagccgggcgtggtggcgggcgcctgtagtcccagctactcggaaggctgaggcaggagaatggcgtgaacccagaaggcagagcttgcagtgagccgaggtgcagccactgcactccagcctgggcaacagagcgaaacttcgtctcaaaacaaacaaacaaacaaataaacaaaaactaattttataagtaataattaaaataacaataatagctatcatttactgggcacctcctatgcgtcacatgttggtaggtattctatatacatgattt

SEQ ID NO: 940535 - DNA, 587 bp, Homo sapiens
cataaagattctccacatccccaccagacgcaggaggccagctggcttcaccctgtggatcccgaagcagggatggggtggagctgcctgccagtcccgcgctgtgcgcccgcactcctcagcccttgggtggtccatgggactgggcgccctggagcagggggcggtgctcatcggagaggctcgggccgcacaggagcccacggaggggctgggaggctcaggagtggcrggctgcaggtcccgagccctgccccgcgggaaggcagctaaggcccggctagaaattgagtgcagcgcgggtgggctggcactgctgggggacccagtacaccctccgcagctgctggcccgggtgctaagcccctcattgcctggggccggcagggccgccggctactcgcagtgcggggcccgccaagccgacgcccacccggaactccagctggcccgcaagcgccgcgcgcacccgtggttcccgctggcgcctctcgctccacacctccctgcaagctgagggagctggctcctgccttggccagcccagaaaggggctcccccagtgcagtggtgggctgaaggactcc

SEQ ID NO: 940536 - DNA, 598 bp, Homo sapiens
aaaagtccccaaatatttaaaaactaagtaattcacttctaaataatccatggggtcttttttttatctttctttcttttttcttttcttaaaatagagacagagtcttgttatgttggccaggtcgttcttgaactcctagcctcaagcaatcctcctgccttggcctcccaaagtgctaggattacagatgtaagccactgcacctggcccatgagtttaaactgaatgaaaatgaacacagaacatagcaaaatttgtgggatgtaggtaagacagtacttacagagatatttttaatgtaaaagtgtctatattagaaaaaaaactcaaatcaataacctcagctttaaccttaagaaactagggggraaaaagcaaaatgaaatccaaagtaagcagaagaagggaaaaaataaatgccagtgcagaaattaatgaaacagaaaaaattaggaaaaaaatcaatgaaaccaaaaggtacttgagaagatcaatacaatttataaaactgtagtcagactagggaaaaaattacaaatatcaggaataaaggaagagatcagattttatacatattaacaacatagtaaaggaa

SEQ ID NO: 940537 - DNA, 556 bp, Homo sapiens
tcaatccaccatgtccatcttccttcagtggttaactttggcaaaggaatagaaatcaagtaatcatttgacaaagactaataatttaataagttccagccaatgtacttcatcttggatcaccatcctggaggagggttattcaatattctgttgttatttaatgcttataacagcttgttgtcttcagttctttccagtgattctcagtcatggytgtgcataggaagagttgatgaactttctaaaaacctgcatgcctcaagctgactctgacctgacctgactcataggccttctgggctagggatcagaggaggagcccagtaatatgtgctttttacaagccacacaggggattctgctgcacatgccgggttgagaattaccatactttggccacatgttctagaatggctcactcttgaaaatgtgaaaaggttgcattcccagaagtcaactatactataccatttcctaagtatctgtagctgtgtttcttttttttaaaaaattatttatttatttatttattattatttttttattatacttt

SEQ ID NO: 940538 - DNA, 660 bp, Homo sapiens
acatccacccagctgtctatcatctcaattaagttgttggtactctaagatcaggagccaagttttatttatcgctaacatctggcatataactaattgacatatagtaattgttcaatatgacaatccaaaaacacctatccatctaaatgacagctttctgaataaaaagaaatacacacacacacacacacacacacacacacacttttttgttgttgytaaacaatcaggaatcagacaaccaagccaaaaaacctgggaatctctgaagtagaatttatgattttttttaaatgctgccaccaatgaatgctttttaaaacaatctttagaggaagtagtagaaatggattcatgaaggtaagttttaattcagacactgaaggagggcctgattatatttggttaagtgaagagcttggagagcaatttagataaacaggagctacccaagcaaagggcagaattaggatcttccatcccctttaaatgccaatgctcccaaaagttgtaccttcaaccttctgcttttctcattctcattctacacacattttcagggcaatcgcatttattctcacagctttaattatcacttaagatgacagctcccaccatcaacatcttcatttcagaattgtatcccaatcttcaaac

SEQ ID NO: 940539 - DNA, 573 bp, Homo sapiens
gagtttgagaccagcctgggcaacatagtgagaccctgtgtctaaaaaataaaaaaaaattagctgggtgtggtggcctgtacctgtagtctcagctactcagggaggttgaggcaggaagatcacttgagcccagrgttcaagggctgcaatcaactatgatcatgccattacactccagcctaggtgacagagggagacctcatttttaaataaataaataagagcctggccaagatggtcaactagaagcagctaatgtgtgctgctctcatggagagaaatagaaggcatgagtaaatacaggattttgaactgaaacatctaggtacacacattgggattcatcaagaaaacaactcaacccatagaaaatggagaaaagcaaggcaggatggctgcttacccaggagcaacatggagccaggggagcctcccctacccagggaagcagtgagtgactctgggatccatgcttctccacaaatttttgtaacgctggggtcaggagatccccttgtgaaggcattccaccagggcctgctgtctgacagaagagcttgtgggggtcta

SEQ ID NO: 940540 - DNA, 544 bp, Homo sapiens
cagatgcttgttcagccagcgggaggcatctctcccttcccgtaacttctcccgtaactgggtcagctcttttgcctgagagtgaaccagggctttatactgcctaaggtgagatagtagagaacatttaataatggaaagggatgagtgatcagttctaataccgcaacagaggtttctstgagaatgtcctcaaggagacctccaagcagaaggtcagaacatgtttggggaaatgtctgtggccaagagaaagaagaatatatatatatatatatacacacacacacacacacacacatacatatatacaaacatacacacacatatatatacaaacacacacacacacagccttctgatatatgagagactgcttctgtaatatcctcgcagatgttccattcatctttttcttctgtaaacaaaagttagtgtcttcctaaatcagttccacaaggatgtcctttcagttcctcactttggccatgggcatctctatgtgaaaattcacatagcgcatcttgcagtgactagatacaaa

SEQ ID NO: 940541 - DNA, 536 bp, Homo sapiens
accctgggacttgtcagggtcatcaggagtgaggagggttttcagatgcttgttcagccagcgggaggcatctctcccttcccgtaacttctcccgtaactgggtcagctcttttgcctgagagtgaaccagggctttatactgcctaaggtgagatagtagagaacatttaataatggaaagggatgagtgatcagttctaataccgcaacagaggtttctctgagaatgtcctcaaggagacctccaagcagaaggtcagaacatgtttggggaaatgtctgtggccaagagaaagaagaatatatatatatatatayacacacacacacacacacacacatacatatatacaaacatacacacacatatatatacaaacacacacacacacagccttctgatatatgagagactgcttctgtaatatcctcgcagatgttccattcatctttttcttctgtaaacaaaagttagtgtcttcctaaatcagttccacaaggatgtcctttcagttcctcactttggccatgggc

SEQ ID NO: 940542 - DNA, 618 bp, Homo sapiens
agatgaatggataaagaaaacatggtacatatacagaatggagcactattccaccatagaaaagaatgagatcttgccatttgcaataaaaggaatgcgactggaggtcattatgttaagtaaaataagccaggcacagaaagacaaatatcacatgttctcactcatctgtgggtgctaagatttacaacaattgaactcctgaatataaagcgtagaatgaagatttccggaagatgggaaaaatagtcaggaatgagtgaggggtagacagggaaatagctaatgggtacataaaatagagtaaataagacctagtatttgctagcaaaactggatagctacagtgaaaaataatttaattgtacattaaaaaaataactcagagtataactgaattgtttgaarcacaaagggttaatgcttgaggtgatgaatatcctgtttaccttgacatgattagttcatgttgaatgcctgtatcaacatatatcatgttactcataaatatatatacatgtatacacacacacacccccctaatatgtatccacaaaaatttaaaaaaataaaagtttaaaaaataaatattaaacacaaataaaataaaattttgta

SEQ ID NO: 940543 - DNA, 616 bp, Homo sapiens
tggtaacctcaaatttaaaaaaatacaatgaaggcacaaaaaattgaaagcaaaaagctaaattatatcatgagagaaaaattatcctcactaaaaggaagacaagaaaaatggaatgaaggaagagaagaacacaaataactagaaaacatatcacaatgtggcaggagtaaattgttatatatcattacatattacgtatttayatattaaatgtaaatggactaaactcttcaatcaaaagacatagagtggctgaataaatggaaaaagcaagacccaatgaattgttgcctactataaacaaacttcacctaggaaaactcacatagactgaaaatagaaatatgaataaagatatttgatgccagtggaaacccaaaaagaagagtagtagctatacttatatcacacaaaattgattttatatcacacaaaatagagaccaaaattctgagaagagacaaatgaagagaaaaaagaaggcaactatgtaaagataaatgggtcaattcagcaagaagatataatgattgtaagcatacatgcacccaacagtggagcatcagatacataatgcataaattattagtgctagagaaagaaatagacccca

SEQ ID NO: 940544 - DNA, 598 bp, Homo sapiens
gcattcttttattatttttttgagatggagtctcattgtatcacccaagctggagtgcagtggcacgatctcgactcactacagcctccacctcctgggttcaagcaattctcctgcctcagcctcctgagtagctgggactagaggcatgcaccaccacacctggctaattttgtatttttagtagagatggggtttcaccatgttggccaggctggtctcaaacccctcacctgaagtgaattygcctgtttgtttgtttattgagacaagagtctcactctgttgcccaggctggagtgcagtggtgttatcttggctcactgcaacctctgccttccgggttcaagcaattctcatgcctctgccttccgaatagctgggattacaggcaccagccaccacgcccggctgatttttgtatttttagtaggcacagggtttcaccatgttggccaagcctgtcttgaactcctgacctcaagtgatccacccgcctcagcctcccaaagtgctgggattacaggtgtgagcccccgcaactggccaggtctgcattcctaatgctacttttgagcccggcaatctcagacaataa

SEQ ID NO: 940545 - DNA, 598 bp, Homo sapiens
gcattcttttattatttttttgagatggagtctcattgtatcacccaagctggagtgcagtggcacgatctcgactcactacagcctccacctcctgggttcaagcaattctcctgcctcagcctcctgagtagctgggactagaggcatgcaccaccacacctggctaattttgtatttttagtagagatggggtttcaccatgttggccaggctggtctcaaacccctcacctgaagtgaattcgcctgtttgtttgtttattgagacaagagtctcactctgttgcccaggctggagtgcagtggtgttatcttggctcactgcaacctctgccttccgggttcaagcaattctcatgcctctgccttcygaatagctgggattacaggcaccagccaccacgcccggctgatttttgtatttttagtaggcacagggtttcaccatgttggccaagcctgtcttgaactcctgacctcaagtgatccacccgcctcagcctcccaaagtgctgggattacaggtgtgagcccccgcaactggccaggtctgcattcctaatgctacttttgagcccggcaatctcagacaataa

SEQ ID NO: 940546 - DNA, 598 bp, Homo sapiens
gcattcttttattatttttttgagatggagtctcattgtatcacccaagctggagtgcagtggcacgatctcgactcactacagcctccacctcctgggttcaagcaattctcctgcctcagcctcctgagtagctgggactagaggcatgcaccaccacacctggctaattttgtatttttagtagagatggggtttcaccatgttggccaggctggtctcaaacccctcacctgaagtgaattcgcctgtttgtttgtttattgagacaagagtctcactctgttgcccaggctggagtgcagtggtgttatcttggctcactgcaacctctgccttccgggttcaagcaattctcatgcctctgccttccgaatagctgggattacaggcaccagccaccacgcccggctratttttgtatttttagtaggcacagggtttcaccatgttggccaagcctgtcttgaactcctgacctcaagtgatccacccgcctcagcctcccaaagtgctgggattacaggtgtgagcccccgcaactggccaggtctgcattcctaatgctacttttgagcccggcaatctcagacaataa

SEQ ID NO: 940547 - DNA, 639 bp, Homo sapiens
gaatttcccactttatgtatcatggtgagaggtaaagactatctcctccatggatatttcctagcctcccttgtagctgaaaattaggcatttgactctggctttgccacttagttatacttttccagactttgattcagaagctaataacatagaaagaaataccgaagcattctggtagggtttgtggcagatacgtgaagcctgcagaggcagattttctcattgtgacagacagtgctttacatccattgggtcaatgaggcaagctrcaatgtctgtgcccagggaggatggcaatggtgactccactgtttcagttctgtggagtaatttgggggcccttctctgatgaaataccaggtctgattttctggtccttccagagttttcctgtcttttaacacattttatttctgtttaaaatagcttgacttatttgtttacattaagaattctgggctgggcgtggtggctcacacctgtaatcccagcactttgggaggccaaggtgggcggatcccgaggtcaggagattgagaccatcctggctaacttggtgaaaccccgtctctactaaaaaaatacaaaaaaattagctgggcgcggtggcaggcgcctgtagtcccagctacttgg

SEQ ID NO: 940548 - DNA, 624 bp, Homo sapiens
acaggcgctcaccaccacgcccggctaattttttgtgtttttagtagagacggggtttcaccgtgttagccaggatggtctcaatctcctgacctcgtgatccgcctgcctgggcctcccaaagtgctgggattacagacgtgagccaccgcgcccggccagggtcagcaatttcatctgtaatagtcaggtttcatttcaggcaggaaagtgatggaaatgtttaaacatgttaaaaatgtggaagacttttcagattacagagcaggaatttcaaggaaattgcaaaggaagaagatagaaaattttcagattaggttacatgcttagtgttatataggtaggagaatayaatgataatgaactcgaggccaggaaacatggctcttgaatgctcagtgcctggtgcagcatctaccataaaattggtgcttataaatatttgttgataaaaataaaacacataaacaatgcaatttgcctctataatattgtgactgttaaccattaaaaatctagtggcaaaatcctttgaaatgcttaagtaaatggttcctttttactgtttatgaggaatttattcttatttatttattattagcaaactgaatctcattgtaaatt

SEQ ID NO: 940549 - DNA, 624 bp, Homo sapiens
acaggcgctcaccaccacgcccggctaattttttgtgtttttagtagagacggggtttcaccgtgttagccaggatggtctcaatctcctgacctcgtgatccgcctgcctgggcctcccaaagtgctgggattacagacgtgagccaccgcgcccggccagggtcagcaatttcatctgtaatagtcaggtttcatttcaggcaggaaagtgatggaaatgtttaaacatgttaaaaatgtggaagacttttcagattacagagcaggaatttcaaggaaattgcaaaggaagaagatagaaaattttcagattaggttacatgcttagtgttatataggtaggagaatacaatgataatgaactcgaggccaggaaacatggctcttgaatgctcagtgcctggtgcagcatctaccataaaattggtgcttataaatatttgttkataaaaataaaacacataaacaatgcaatttgcctctataatattgtgactgttaaccattaaaaatctagtggcaaaatcctttgaaatgcttaagtaaatggttcctttttactgtttatgaggaatttattcttatttatttattattagcaaactgaatctcattgtaaatt

SEQ ID NO: 940550 - DNA, 544 bp, Homo sapiens
tctttagtagagaagagatcttcttgcgttacacaggctagtctcaaactaccagctttaagtgatcctcttgccttggtctcccaaaatgttggaattacagacatgagctgctgtgactggccctctctttctttataatcacgtttcaatattttgttgtctattcttgcttgtgtaaaattgcatttgaattttagaaattttagaatgagattgttatgtcagaagatttgaaggttattttaaatttataaaattgttgggggcaatgaaccgacagtttaacaagatgactctttccattcrtaaatctgtcagcactccatttatgtagagtttcttttatgtctattgatttattcacagtattatctatatgattattgcacatctgctgtttagtttgcaccatggtaaattttaggtatgctgcttttgtaaatgagatccattatgtttaatattatattaaaaattttgagttctaatgaatactgactttatgaaaactaacgtatatcttgccattgttctaagctac

SEQ ID NO: 940551 - DNA, 771 bp, Homo sapiens
aaaatgtgaaacaagatcagatatttcactgacagggaatataaatgggttgagttccctattaaaaacgaaaacctcttcagtatatgtaaggccatagccaaatgatctttctgcaggtaataatgataaattctgagcaaaatactctacacaactatgtgaaggtcctggagagtaaaaaaaaaaaaaaaaaaaaaaggctggcagattcttgaggaaagacacacttggaagaatgtccagcatggagagtttcctgtttttcatgataccagcctcagggcagggtraagtcagtgctgcattgatacctgctattctcatagaaaatccagtctttctggcctgaaaaaccagatgacagagtttgcggtaagaactactgctggaaaatgagaaatggatcccagagagaactagattggtatagcctgaggttctgtgcgtaacccctgcccaaatctcagactgacttctgaaccatgcatatgcagggcagactaacagctacccaactaggggtaggtccagaactgagatttgagttgctgcccaagagaagagtttgtagtttgaatccaagcaagataattgcctactaaagcaaaaatatcaacattcttcagtgaagaaaatgaaattcacagtataacattcacgaggtccaggatacaatccaaaattgaaaatgaggaaaatgtgtcccattctgaagacaaaaagcagttaacagagactatcccccaatatgaactggattagcagaca

SEQ ID NO: 940552 - DNA, 771 bp, Homo sapiens
aaaatgtgaaacaagatcagatatttcactgacagggaatataaatgggttgagttccctattaaaaacgaaaacctcttcagtatatgtaaggccatagccaaatgatctttctgcaggtaataatgataaattctgagcaaaatactctacacaactatgtgaaggtcctggagagtaaaaaaaaaaaaaaaaaaaaaaggctggcagattcttgaggaaagacacacttggaagaatgtccagcatggagagtttcctgtttttcatgataccagcctcagggcagggtgaagtcagtgctgcattgatacctgctattctcatagaaaatccagtctttctggcctgaaaaaccagatgacagagtttgcggtaagaactactgctggaaaatgagaaatggatcccagagagaactagattggtatagcctgaggttctgtgygtaacccctgcccaaatctcagactgacttctgaaccatgcatatgcagggcagactaacagctacccaactaggggtaggtccagaactgagatttgagttgctgcccaagagaagagtttgtagtttgaatccaagcaagataattgcctactaaagcaaaaatatcaacattcttcagtgaagaaaatgaaattcacagtataacattcacgaggtccaggatacaatccaaaattgaaaatgaggaaaatgtgtcccattctgaagacaaaaagcagttaacagagactatcccccaatatgaactggattagcagaca

SEQ ID NO: 940553 - DNA, 583 bp, Homo sapiens
gattgcacccaccccgactgagggtgggtctacctctcccagtccactgactcaaattttaatttcctttggcaacaccctcacagacacacccaggaacagtattttgcatccttcaatccaatcaagtttacactcaatattaacaataatacattactgggaaaaaaaaatcaaacaaaggaagtataagagttctacactaaaaactacaaatattgctgaaagaaattttagaagatctacataaatggaaaaaacagtcatcttcatgaatcagaagactagaaccagaagactactgctaggatcataataaaccccaatttgctctacagattaaatccaattcctatcaaaatcccaggtgacttcttcatagaaattaacaggctgattctaaaaatcagatggaatagsagaaaactcagaatagtcaaaataaacttgaagagaacaaagtttaagactcacactttcatacttctaacttactacacagcaacagtaattaaaagagtgtagtaccagcatgaggatacacagacaaatcaacagaatagagagtccagaaataaaccca

SEQ ID NO: 940554 - DNA, 780 bp, Homo sapiens
gactcaagaacttaaaagtgtcctccccaaaatcaatgcgagttaactacgccaccagctatgacactaaccgtctcctgcctaccccctgcagttgcctacattttgattttggtttcataaatctggaatcaatctgcttgcagtcagaaatgttagtgaggtaatcccagagagagaaatatctgccgcagtcatttaaacatctggtgccgcctccacccatgaccccayccatggctcccctggcctcgcctcatctctgccaacctatattcctcttgcttcgagtgaagctctttccctataattttccttcatctcctgatcaataaaacctggatttacaggccaagaagaagcaaacaaaaagtacccgtgagctggtctaaactagctttcatcgagaaatgcagcacaaataaaatgagtgattggtgaggggtgagttttgtttaactgggcttattctggttgagaagcaagctcacatcaacttggccatgcaggagtaatgtgactgtccccaattctgtcaaaaacaacagcagactaaactccctggcctcacagctagccacttctgaggatgaggcttaccatgcactcaggactacgagccttttccaaatgttctcttgtctacaaccctctgagcgtggtgcaaatattaattagtgtttctaatgtcgcctcgcactgtcattatccgttgatgaagagacagacgtgtctccgacaacatccaggccagccaaggtgacattgctttcctttgct

SEQ ID NO: 940555 - DNA, 629 bp, Homo sapiens
gataaaacagactttaaaccaacaaagatttaaaaagacaaagaaaggcattacataatggtaaagggaccaatgcaacaagaagagctaattatcctaaatatatatgcaaccaatacaggagtacccagattcataaagcaagttcttagagacttagagagagagttagactcccacacaataatagtgggtgatttcaacaccccaaggtcaatattagacagatcaacaagacagaaaattaacaaagatattcaggacttgaactcagctctggatcaagcaaatctaatagacatcaacagaamtctccacgccaaatcaacagaatatacattcttctcagcaccacatcacacttattctaaaattgaccatataattggaagtaaaacactcctcagcaaatgcgaaagaatggaaatcataacaaacagtctctcagaccacagtgcaatcaaattagaactcaggattaagaatctccctcaaaaccacacatctacatggaaactgaacaaccttcttctgaatgactactgggtaaataacaaaattaagccagaaatagatacgttattttgaaaccaatgagagcaaagacacaatgtatcagaatctctggg

SEQ ID NO: 940556 - DNA, 623 bp, Homo sapiens
ctttaacctctgtcctcctctaccctttatgttactgataccacaaattacatctttttatgttgtgtatcaaatagtatatttttatagttattgctatttttatgcttttgtctttcaacttctaaaccagaattaaaattgatttatgcaccatgcttacagtattatagtattgtatatttttaatatatttayctttaccagtgaactttatattttatatgttttcagtttatcatttagcatctttcagtttcaatttttagtactccattagcatttttttgtagggcaggtctagtggagtggaactccctcagttttgttcatctgagaaagtacataccttcattttttaaggagagttttgccaggtataatattcttgtttggcattttttaagctctatgaatatatcatccaacttcatttttgactgcaaggtttctgctgagaaatccactgatagtgttatgagagttttcttctacataatgattggatttctgcttgctgctttcaaaattctctttgtctttgaattttgacagttagattatatgtgtcagtgtggacttccttgggttcatcttattggggattcatttgccttcttgaa

SEQ ID NO: 940557 - DNA, 353 bp, Homo sapiens
ccctctttttaaacaaaatgaagctattcaataaagcatacccaattaggttttacttgccagccccaccctgctcctaagctgtgtcttcataagcttgtgccacatgcaaaagttagcctaaagctttggggcagagtcactgaatcatgaatcttcactgttagaacatgttttgtrtgtttagaaaacaccaaaatattgaattaagtaaagttactagggtgactgtagcttggttagcgccagataaactgtcatagacagagggataccaagatacggaagaggacatcaaaagctcctgctcaaactgctagtcgtgatgtgtgcagacacctgtgcacacaggc

SEQ ID NO: 940558 - DNA, 637 bp, Homo sapiens
gtcaagaacagttacctcttctaaagtttaactgctcccatacaaggttgaatgtctttcaccagggtggaacagcttcgggtacaatgttgttgttagtatatttatcttcttttctgtttaatctttggaactaaattctttccttgtataatacatatattgaacccatgcatacttaaccttataaaacttgtttttttctctcacgcctagaagccatcaaactccaaaaggtcaggcaaccagagcctccaacagtggctctgctttgctaggaacccttaggtagacctctgggaggagtctgactgccattttccccaaaacaacgccccctgtcagcaggaagcagctaagactggtcatcatccctattctaatggcagttaaatgcacttcttcagagaggggaaatgatatggaagtgctgggaagggaagagcctggtccctttaaatgatasggaagggagaagggaagtgctgggtagaggagggtgtggtccctggctggggctccacccacacggacctaggtgaggacaggcattattgttgcatttcccaagaccactgtgacctgccatgttcctgtcctgtgcctataaaaacccaagaccctagcaaggcagaga

SEQ ID NO: 940559 - DNA, 596 bp, Homo sapiens
ttctattcattcagtgctcagactttgagcttctacttcatgctaggtggtaaggtgtgtaagtagacacaataaaaaatgataaaggggatatcaccactgatcccacagaaatacaaactaccatcagagaagattataaacacctctgtgcaaataaactagaaaatctacaagaaattgataaattcctggacacatacaccctccgaagactaagccaggaagaagtcgaatcygtgaatagaccaataacaagttctgaaattaaggcagtaattaatagcctactaaacaaaaaaaaagcccaggaccagacaaattcacaaccaaattctaccagaggtacaaagaagagctggtaccattccttctgaaactattccaagcaatagaaaaagagggactcatccctaactcattttatgaggccagcatcaacctgataccaaaacctggcagaaacacagcaaaaaaagaaaatttcaggccaatatccctgatgaacatcagtgtgaaaatcctcaataaaatactggcaaactgaatccagcagcacatcaaaaagcttatccactacgatcaagttggcttca

SEQ ID NO: 940560 - DNA, 424 bp, Homo sapiens
aaatatcttcagataaaaagtagaaagaagcttttgagaaactgctttgtgatgtgtgttttcatctcacagaattaaacttttcttttgattcagcagtttggaaacactggttttgtccattccatttgggagctcattgaggccaagggcaaaaaaagcaaatatcccargataaaaaattgaaggaagctatctgacaaaccgttttgtgatgtgtgctttcatctcacagagacaaaactttcttttcattcagcagtttggaaacactgtttttgcagaatctgcaaagggatatttgggagtgcattaactcctatggtgaaaaacaaaataacttcagatgaaaagtagaaagaacattttgagaaactgcttcatgatgtgtgcattcatctcacagagttaaacctttcttttg

SEQ ID NO: 940561 - DNA, 537 bp, Homo sapiens
gcttgtgtttggggaagtgctgacaaggcagccttctgctgcttcagccccctccagacattgggagccagtgagcatgggagggagactgaggggggagctaagggtggctcatcatgggcctgtaggcacccctcagcacagggagcctgggtgcttgggaaccatgargggcaggttagtggcagcaggatgcagacaggctcctgggaggaaaggggctggtcctcagtaaagccccttcttcaggcctgggatggtctgaagtcaggtgggcaggctgccagttctgtggaccgaagtgagaacttatagtgtttttctgggtttgcacatggctgcctgtggacaaattagcatgccctttctccccctgaagcccacagaaaccctggactcagccagacttgggcagatgtcaggacaacctgcctgtggagaggagctgcccactgtaggtctcctctctgctgtgagctggactctcatcaggatgacctgtctgcaaagaggagctaaccactgtgggtctctgct

SEQ ID NO: 940562 - DNA, 538 bp, Homo sapiens
caaaagagaattactaacaattaaccctccatgaatatcctatgcttgctcttctcacttttcttccttgccatagggcatcttcatcaaggaccccttaatcctgaactcccaagggattatctactcccctaaacagttatttctcttttaaagtttaactgcctccatacaagatttaattccttttaccagggtgaaacagctctagccacaacactgttttcagaatgattagtctattttatttcttatttctgttatcttttggcactagattttttcctttgcatacttaacctccttgtaaaatttgtttcttctcacctagaarccatcaaactccaagtggacatgcaactggagcctcagaaaatggctctccttttaccaggggcctttagataggcctctgagagagatctgactgccatttttcccagaatgccccctgtcagcatgaaggagttaagagtggtcattgtctgtatcctaatggcagttagatgtacctcttcgggtgaagcagggtgatggc

SEQ ID NO: 940563 - DNA, 721 bp, Homo sapiens
gcccagtcatggctgtggactcaggcatctctgcactctcgggggcccagaaagccccccttccccacaggcttggaagtgcctgctcccactgcctggcctctgcccactcccagcacccactccaattttagartgaagttgtggctgagcctgggtgctgtcatgacctggccaggtgtgctcatgctcagggcagtgttgacacaccagcctgctgatgccttgaccctctctgaacattgagcactgatgagcatgggagagaggctgaagggggactaaggatgacttggcatgggcttgtaggcaccacttgacacagacagcctgggtgccatggccaccatgggtggcaggttaatggtgttaggaggaagacaagttcctggatggaaaggggtgggtccccagtgaagctccccctttaggcctgggatggcctgaagcctgggggccaggttgccagttccacagaccagagtgagaacttactgtgctttttctgggcctgccaatgtctgcctgtggactaatcaggacaccctcttcccctctgaagcccataaaagcccctgactgagccttactcaggcagacatcaagatgacctgccttcaaagaggagctacccactgtgggtattctctctgctgagagctgagcagacatttagacaacctgtctgcagagcagagctactcactgtgggtctcctctg

SEQ ID NO: 940564 - DNA, 569 bp, Homo sapiens
gaatctttctggtcctgtgctttttttggttagtaagctcttaattactgcctcaatttcagaactcgttattggtctattcagggattcaacttcttcttggtttagtcttgggagagtgtatgtatccaggaatttatccatttcttctaggttttctagtttatttgcacagaggtgtttatagtattctctgatggtagtttgtatttcagtgggatcagtggtgatatcccctatatcattttttattgcttgtatttgattcttctctcttttcttctttattagtcttgttagtggtctttctgttttgttgatsttttcaaaatacctgctcctggattcattgattttttgaagggattttgtgtctccatcttcagttctgctctgatcttagttatttcttgtcttctgctagcttttaaatttgtttgccattgcttctctagttcttttaattttgatgttaggatatcaattttagatttttcctgctttctcttgtgggcatttagtgctaaaaatttcccttgacagactgctttaaatgtgtcccagagatt

SEQ ID NO: 940565 - DNA, 608 bp, Homo sapiens
gtaaaagcttagaaatgactaaatattcacaagtaattaataaataaattgtggtatattcatacattgaaataaaatcaaaactaaaataaatgaactgtatctagatgccctgatatggtttagctgtgtccccacccaaatctcattttgaattaaaattcccacaattcccaggtgtcctgggaggaacccagtgggaggtgattgaattatgggggcaggtctttcctgtgctgttctcatgatagtgaatgagtctcatgagatccaataattttaaaaagggaagtttccctacacaagctcttttgtctgctgccatgtgagatgtgcctttcaccttctgccatgattatgaggcctccccagccgtgtggaactgtgagtccaataaacctctttcttttgtaaattgcccagtctttggtatgtctttatcagcagtatgaaaatggactaayacatgctccattatgaatttatctcaaaaacaaaacaataagtaaaaagaggcaagatcatatattgtcagatatagtatgatagcacttatttatgaagtttggaaaacatcaagctgatactctacatatcatgttttatat

SEQ ID NO: 940566 - DNA, 564 bp, Homo sapiens
ttccattgtctcataatagtctacatacattatgtcatttctgtgaaggatgaatttggagattaatggttacaacaaggagactaccagtgctagaatcagataaaacctgtttcttcaaactcccagatatatgtgctttataaaaagttctactatttttcagatagcagagcatttaaagatacacactgacatgaacatttgggtttttttggggttttttgttttttttttcagacagagtttcactcttcttgcccaggctggagtggaatggcgcaatcttggctcaccgcaacctccgccgcctcctgggttcaagcgattctcctgcctcagcctctcragtagctgggattacaggcatgcatcaccacactctgctaattttgtatttttaggagagacggggtttctccatgttggtcaggctggtctcgaactgccgacctcagatgatccacccgcctcagctcccaaagtgctgggattacaggtatgagccaccgtgcccaccccacaattgtatttcttaaaatacatagtcagcataaagaatcc

SEQ ID NO: 940567 - DNA, 618 bp, Homo sapiens
tttgtttctttacaatagggtgtttaaagacactaagaaaacagactgaatgcagactcttactagatccctgtgaattcttctaatttaaaaaatagcaatttaattttttaaggcatccgatttagtttatgtgagaactttttccttttgcaccaattttcatgagtttacatatattttaaaatttkgttacataattacaatagtactggcataaataggtccatatgaccaatccttggtaaatgtaaaactcaattggctggagccacgtagattcagtgtgctgtgggcacccgtcaggatgtttttctaagaaaatagagaggcttctttatttgcagacttggaactatattaagagaacttctactgtaaaaagtgaaactacaaaattaattatagatggattgggtcatggaaaagtgaattttctagataattgaataattaaaattattccaaactggctgttgaaggacagcttcctataataatgtattacatcttagaaaaaaaacaataaaataaacacataactcaataagctgacactccagtaagcaataatgagtgccactggggatgtctggtgagcactgtgtcttttcaatg

SEQ ID NO: 940568 - DNA, 755 bp, Homo sapiens
cccatgtgtggggagcattaagaaaaataggccacctgtataagactagtggcaaaaatctgactcggtgctacttctctgtttgtcctttacttaaaaggagacccataattaaaatgatccagaaaagagacccaagcaggagactgagttgcttggggaaaggaccatgttgcattgatttttacataaccaatgccagcagtgcatcgggtacacaacaggttctcaatwaattgttaaatggataagttgatagaataaaaaacaaggtctcttcccactgctgcatgcaaaaaagctcagagtgaattcttatttgcaaagatgagagattaaaagtcttctgatggctgtttcctcctctctgtttctttgccacagtttaggggcaaagaaaagtttctacctctctgaaatggtaggagaaacccttggggcttaggtaacaaatcaggctctctctttcacatgttgtgagaaaagaaatatttaaccatcagcaccaacaatgtcatttgcataagggagtgacttcctggctgagagatggtcagaataacatagagcctagagtgaaggcagtcaagtttgtgagcctagggctctgcttctggtgtatgcttcatggctgtgtgatcttgggcaagtttcctacattttctgcttctcagttttgtcatccataaaatgataacaccagtacctgcctcaaatagtgtgtggaagaggcttaaacaagctaatgtaagtca

SEQ ID NO: 940569 - DNA, 634 bp, Homo sapiens
gaaatttgcataagcaacaaggacccaaatgttcatccccaagacaatggggaaaatatctccaggacatgtcagagacctttgtggcagtccctcccatcacaggccaggaggcctaaaaggaaaaaatggtttcctgggctggattcagaggccccctgctgtgtgccactttgagacttgatgccctgcatcccagccactttagccatggctaaaaggggccaaggtacagcgtggactgtggctacagagggcgcaagccccaaaccttggcagtttcacatggtgttgagtctgtgggtgcacagaagtcaagaactgaggtttgggaacctctgcctagatttcagaggatgtatggaaacacctagatgtccaggcagcattttgctgtggggtgcrgggggccctcatggaaaacctctgctaggacagtgcagaagggaaatgtagggttgaagcccccacagagtccccactcgggtactgcctactggagctgtgagaagtaggccaccgtcctctggacaccagaatggtagatacaccaacagcttgaccatgcacacaggaaggccacagacaatgccagctcatgaaagcaaccaggaggggggatatgtcctgcaaa

SEQ ID NO: 940570 - DNA, 642 bp, Homo sapiens
caacaggccaggtcaaaaggcctagactctcagagcctctgtaagtgaccatattaataccttctcacatcttacagtcctgtctgtaagttcttaagggtgatacaaattttagctgcctagattatcagaaacatcaataacaagctgggcgtgtggtgtgtgcctgtggttccagcagctggggcaggaggatcacttgagcccaggagttcgaggctgcagtgagctatgatggtgccaatgcacacagcctaagaataacagaataagaccctgttctcaaaacaaggcaaaaaacaaacaggccaggcacggtggcttacatctgtaatcccagcactttgggaggccgaggtgggtggatcacttgaggtcaggagttcaagaccaccctggccaacagggtgaaaccccatctctactaaaatttaaaaaaaaaaaaatagccggacatggtggcatgcacctgtaatcccagctactctggagwctaagggaggagaatggcttgaactgaggaggtggaggttgcagtgagctgagatcgcaccattgcactccagcctgggcaaaaagaggaaaactctgtctcaaaaaaaaaattattaataacaatagtaggaataagtgctgctcaga

SEQ ID NO: 940571 - DNA, 580 bp, Homo sapiens
ttttagtcccacggtctgtgtactgaaactgcacatcagacccctcagcaaatccacaggatgtcccctctcccatgcacttggaagcttccacttaagccacagtttctatacctgcaccagaccacacaaagtgatttttaaaattacagaattctggccctctatattagtattttccatttcagtagatctgggatggagctcaagcaagagttttttttgtttgtttgtttgtttttttgagatggagtctcgctctgtcgcccagcctggaatgctgtggtgtgatctcggctcactgcaagcaccacctcccgggttcatgccattctcctgcctcagcctcctgagtagctgggactacaggcgcccgccaccatgcctggctaattttttgtatttttagtagagacaggktttcaccgtgttagccaggatggtctcgatctcctgacctcgtgatctgcccacctcagcctcccaaagtgctgggattgtaggcttgagccaccacgcccggccgcaagtgtatttttttttttaactccttcactaagtcttctgtgactcaaaattt

SEQ ID NO: 940572 - DNA, 627 bp, Homo sapiens
ctctactatatctttccttgtaataatcttaggtttggtttcttcttgcttttctactttcttcaggtgtatcattacctagtttatttgaaatcttcttttttgttataattgtttattactataaatgtccctcttagtgctgcttttgctatatcccacagattttggtatgttgtatttccatttttaattttctttttaattttttcattgactcattggttgtttgggaacatattgtttaatttcsatgtgtttatgggtttttctgaggttccagttattaatttctagttttattttattatgttcagaaaaggcacttgatatgattttaatttttaaatttggtcagacatgattttggcctaagatatggtttgttctggagaatgttccatgtgttgatgaagagaacatgtactctgaagccgtttggaaaaatattctataactatcaattaggcctcttacatctaatgtgtagtttaactgctatgtttctctgttgattttctgtctggatgattcaattactaggagtgggtgttaaagtcccctactattattataatgtgctctctctctctttaaatctattaatgtttactttatgtaatttgg

SEQ ID NO: 940573 - DNA, 557 bp, Homo sapiens
agcctaggcaacatagtgagattccagctttacaacattttttaaaaaaaattagctgggcatggtggtgtgcacctgtagtcccagctactcaagaggctgaagcgggaggattgcttgaactcaggagatcgaggttgcagcgagctatgaatgtaccactgcactccagcctgaatgagagagcaagaccctgtctcaaaaaaagtcataaactgctctttaccagttggacaaccttgtgcaagtgactttacccttacaagattttatttttctgtaaaatggagataaatatcttttttttacaaaattgttctaaatatttaatgagattattaaataacacagttccaagaatatattaaagattaatgactactaaccaacatggaatcaatgttttcctcagcttkacacattttaaacaggcttcttctacctttaggctcctgatccccctttacttacagcatttactgtagaaaacttgccaattgtatactctttttctgttcctttgaaatggctgtaaatagcctctttccagtttacaa

SEQ ID NO: 940574 - DNA, 626 bp, Homo sapiens
taacctgaaaggagtgatggaactgggggttgagaaggagaagtgaaagggaaattcctgcccctttagaaaatgtggaaagtaggaagtagattcacctaaagtatagtatttggtctctgtaaacttaattctttaatacatctcaacatgatgtatggtggtatcatcatcatcatcgtcaccatcatcaaagggaaaatactgaactcacacacacacacacacacacacayagacaaacctgagaaactactgggcttcctgccaggctattcttttttaattcctgaattattctgcccaggaccttgcttaaaatctatataatcaggaaatgattataaaattcaacatgtcctcaaaccccttaacagtcagctactagggtctatacacaggggtcctttctcttgatgactcctgatttggggaaagagaaaaaagcacagcaagtactcactcccctaaagattaaattattgggattcacagtggaggatttgaagtgagggttgggaaaatatatccctatctttctatctcctttgagatggaaaaggtgggaaaaagaagagtcattacataacaacagtgctgcctgccaacagtggcccctgtgtgag

SEQ ID NO: 940575 - DNA, 586 bp, Homo sapiens
ataaatattaataacatttgtatgaagggagactccagagctcctcttcagcatatatatgcagcactgttattcaaagagcctgggtaccagaaaacttagactgcgtgggtggggcctgtttcccaaggaactgacattctcagagacaagctggatggtatgcctgtcctgatatgaaaggcaaaacattagttttrtatctaatgtgaaaggtaaaacagactctgtgtcaagctgggagtctcagcgtcaataataattatagcagtaatgaccactgtgaccataatgagtatcaattattgagcacttgctatgattcaggcactttacatacattatctcattccatttattacatatattaagcctgtgaaataggtaatattatcctgattttataaatggagacctaacactgaaagagatgacaggatttgctgcaggtcatcatgctaatgattggtaaatctaggcccaggtttaaccaacttggaattttttgctaaatgatctgatttaggagcacttctcttcaagatgcaggaaggcagaacagaatacaacaaatacaagctatgat

SEQ ID NO: 940576 - DNA, 548 bp, Homo sapiens
gcaaggtggcgggtgcctgtagtcccagctactcgggaggctgaggcaggagaatggcatgaacctgggaggcggagcttgcagtgagccgagatagcgccactgcagtccggcctgggcaaaagagtgagactctgtctcaaaaaaaaaaaaaaaaaaaattagccaggcgtggtggcaggcgtctgtagtcccagctacttgggaggctgaggcaggagaatgacatgaacctgggaggcggaacttgcagtgagccaagatcgcrccattgcattccagcctgggcgacagagcgagactccatctcaaaaaaaaaaaaaaaaagttaatttttttcaaaaagacaaagcctcaacttgtttgaccttcgacctcaggtgggaatgtgtgcatcaaattttttgccattctatgtgtgtctgagaatgaccatgaaagcaccatgagtaatgatttggggatgagaaataacttttagtaagtacataaatttgggaatgcaggatctgtgaataatgaggtcaactgaacctcatcctagattt

SEQ ID NO: 940577 - DNA, 639 bp, Homo sapiens
gattacatggtacccacccagattgaggatgggtctgcctctcccagtccactgactcaaatgttaatcttctttggcaactccctcacagacacagccaggaacaatactttgcatccttcaatgcaagcaaattgacactcaatattaaccatcacaggtgtccttcacaattccagtgattcccttttttttcttgaattgaagctcacagagtttatctttatgcactatcctgctatttccacgtagctgaggcatgctaaaagcctctactctgacatcatggaaaaaaatctatagtcagatttgaacttgtgtagtcttagtcctcaaatgttgttctttcccttcaatattatattggctattctgagtgttttccttcttagtataaatgttacaatcagtttttcaatatccgcaaaataacttgctgggattttgatttggattgcaattgattccrtaggccagtttgggaagaactgacatcttcacagtattgagccttcatagcaatggaaatggtatatctcttcatttatttagttattctttaatttctttgatcagagttttgcagttttcctcatagatcttatacatattttattagatttatacttaagtatttaa

SEQ ID NO: 940578 - DNA, 634 bp, Homo sapiens
gcactccagcctgggtgacaagagcaaaattcagtctcaaaaaaaaaaaaaaaggaattgcagtttttgcattggaagtaatgactaaaaccacaattacttttgcaccaacctagtacattgcaaatggaagcgtaaaatggtgcaaccactttggaaacaatttggctatttcttatataaagtgaaacagacatagaaatamcactcctagatatttaccaaaagatgtgaaaatctgtatctataaaaaggcttacacctaaatatttatgcagttttattcataatatccatcaaaggtgaatggctaaataaatttatatggtggactactggccaccaatagaagggaacaaaccacaatacacaacataatgtagatgaaatcacagacagtgaaagaagctggacacagaagagtacacattattcaataacacctttattctagaacaggcaaagctaatctacagtgatagaaatcaaaacagtgattacctaagaagaggaggggaggagactgcaatggggctgagggaactttctggagaggtggaaaggttctggggaggcggaaaggtggaaaggttgtacgtgtagattggttttctctccggccaaactcagcagc

SEQ ID NO: 940579 - DNA, 478 bp, Homo sapiens
attttcatgttaaaaaccctcaacaaactaggcattgaaggaacatacttcaaaagaataagagccatctattacaaacccacagccaacatcacactgaatgggcaaaagctggaagcattccccttgcaaaccagaacaagacaaggatgccctctctcaccactcctattcaacrtagtactggaagtcctggccagagtaatcatgcaagataaagaaataaaaggcatccagctaggaaaagaggaaatcaaactattcctgtttgcagacaacatgattctatacctaaaaaatcccatagtctctgcccaaaagctccgtaagctaataaacaacttcaaagtttcaggatacaaaatcaatgtacaataatcagtagcattcttatacaccaaaaatattcaagctaagaaccaaatcagtaatgtaatcccattcacaatagcaacaaaaaagaataaaatacctagga

SEQ ID NO: 940580 - DNA, 578 bp, Homo sapiens
agtatgatcacacatttttttttgccaattttatgcatgtgaaataattttattgttttagttgtttatttatcttagagaaaaggtcttgcagtaggctcctaggctggagtgcagtggtgcgatcatagctcactgtaacctcaacctcctgggctcaaacagtcctctcacctaagcgtcctgagtagctgggactacacttgcgcatcatcaccatgcccgggtagttcttttgtttttatttttagagacagggtcttgctmtgctgcccaggctggtctcgaactcctggcctcaagtgatcctcatggcttgaccgccccaagtgttgggattacaggcataagccaccatgtccagcaattgttttattgttttaaattgtatttacttgattatgagtgaggtttagcatgtaagttactgcttctatgaattgtcttttgcctaatttttctattgttcttttgctctctcttatcctttctctctctctccctccctccctctgggctcctgtctcctcatttgtggactgtgcaattgctgacaccctgcacagcttggccctcaa

SEQ ID NO: 940581 - DNA, 580 bp, Homo sapiens
acagattttcgcttttgttgcccaggctagagtgcaatggcgcgatctccgctcactgcaacctccaactcctagattcaagcgattctcctacctcagcctcccaagtagctgggattacaggggcctgccaccatgcctggctaattttttttgtatttttagtagagacagggtttcgccgtgttagccaagctggtcttgaactcctaacctcaggtgacccacctgcctcagcctcccaaagcgctgggattataggcatgagccaccgcgcccggctctgatgtgctcttgaaagcaccacctcctggcgggagacgatgcaactcaaaaccagagtaataagcaaaaacacaaccaaggacccacacagagtccgtttcactcccctgttacctccactggagcaggtgctggtatccatggctacragacctgaagatggatcacatcacaggactctttgcagacacttcccagtaccagcccagagcttggtagctctgctgggtggctagacccagaagagcaaaaacagtcactacagttcagctctcaggaagccccgttcctccgg

SEQ ID NO: 940582 - DNA, 610 bp, Homo sapiens
gcaataaacatacgtgtgcatgtgtctttatagtagaatgatttatggtcctttgggtatatacccagtaatgggatggctgggtcaaatggtatttctagttctagatcgttgaggaatcaccacagtcttccgcaatagttgaactactttacactcccaccaacagtgtaagagcattcctatttctccacatcttctccagcatctgttgttttctgactttttaatcatcatcgttctaactggcrtgagatggtatctcattgtggtcttgatttgcatttctctaatgaccagtgatgatgagctttttttcataagtttgttgtctgcataaatgtcttcttttgagaactgtctattcatttccttcacccactttttgatggggttgtttttcttttcttgtaaattggtttaagtttcttatagattctggatattagccctttgtagatggatagattgcgaaaatttcctcccattctgtaggttgcctattcactctgatgatagtttcttttgctgtgcagaagctctttagtttaattagatcccatttgtcaatgttggcatttgttgacattgcttttagtgttttagtcat

SEQ ID NO: 940583 - DNA, 586 bp, Homo sapiens
atttgcataagtaacaaagagccaaatgttaatcaccaagactatgtggaaaatgtccccagggcatgtcagagaccttcacagcagcccctcctatcacaggcctgggatgtggaggacaaaatggtttcatgagccgaggctcagggcccccctgcttgatgtagccttgggacatggtgcccttcctccragtgcttcagctctagcagtggctaagaggggccaatgtacagctcaggtcattgcttcagagggtgcaatccccaagccttggtggcttacatatagcgttgggcttgtgggtctgcacagaagtcaagaattgaggtttgggaaccttcacttagatttcagaggatgtttggaaacacctagatatccaagcagaagtttactgcagagatggagtcctcatggaaaacctctgctagggcagtgtggaagggaaatatggggttggagcccccacacagagtcatcaatggagcactctctagaggaactgtgagaaggtggttaccatgaaagtagcctggaggggggctgtgccctgcaaagtcacaggggtggagctgcccaaggc

SEQ ID NO: 940584 - DNA, 573 bp, Homo sapiens
ccatgttgctgcataggacatgattttgttttttgtatggctgcatagtattccattggtgcatatgtaccacattttctttacccagttcaccgctgatgggcacctgggttgattccatgtctttgctattgtgaatagtgctgtgataaacttgtgagtgcaggtgtcttttaggtagcatgatctattttcttttgggtttctactggatagacacccagtaatgggattgctgggtcaaatgggagttctattgttagttctttgagaaatctcaacactgttttccgsagggactgaaccaatttacaatcccaccaacagcatatgagtgttcctttttctccacaaccttaccaacatctgctattttttgactttttaataacagccatactgtctggtgcgaaaggttttgatttgcatttctctaatgattagtgatgttgaacattttttcatatgtttgttggctgcttgtatgtcttcttttgagaaatacctgtccctgtcctttgcccactttttaatggggtaatttgttttcttcttgttgatttgttttttata

SEQ ID NO: 940585 - DNA, 561 bp, Homo sapiens
cccattcacccacacatccagtttggaaggatttatgtcctgccatcaggcaagtagagggtgaggtagagtgttcccatgttttaagggtctttaatttaacaatcctcaatattttagggagaaatatttttatttccttcaaggccatggaaacccacagaaggggagcctcccctgccacatctgtgaccagacttgctggcctggttggggagtaagtggaagtgaggtggagtggcagtcacccacccagcagccttcccaagaccctccttccctgacatgtgggggtggcagtgtgcggcacacaatacaatgtgttcatcttgctgtttcctttcctsggtcaattgcccttcccagccacctctgcagtaggtgaggccatggggccaagttctgactaataggaatgtgagcagagatgcagcccttcccatctggggcagttaaaaaccggtgcacaaaggccgggcgtggtggctcacgcctgtaatcccagcactctgggaggcagagacaggtggatcacctgaggtcaggagttcgagaccagcc

SEQ ID NO: 940586 - DNA, 561 bp, Homo sapiens
cccattcacccacacatccagtttggaaggatttatgtcctgccatcaggcaagtagagggtgaggtagagtgttcccatgttttaagggtctttaatttaacaatcctcaatattttagggagaaatatttttatttccttcaaggccatggaaacccacagaaggggagcctcccctgccacatctgtgaccagacttgctggcctggttggggagtaagtggaagtgaggtggagtggcagtcacccacccagcagccttcccaagaccctccttccctgacatgtgggggtggcagtgtgcggcacacaatacaatgtgttcatcttgctgtttcctttcctgggtcaattgcccttcccagccacctctgcagtargtgaggccatggggccaagttctgactaataggaatgtgagcagagatgcagcccttcccatctggggcagttaaaaaccggtgcacaaaggccgggcgtggtggctcacgcctgtaatcccagcactctgggaggcagagacaggtggatcacctgaggtcaggagttcgagaccagcc

SEQ ID NO: 940587 - DNA, 771 bp, Homo sapiens
ttccatcaatattataataaaatgatgttaaatgaaatgaaattattcaagaacctactgtacttagttggatggtggcatgcccaactcagaggggtgatttgtatgagatattatttttctttttttttttctcaagacggagtctcgctctgttgcccaggctggagtgcactggtgcaatctcggctcacttgcaagctccccctcctgggttcacgccattctcctgcttcagcctcctgagtagctgagactacaggtgcccaccaccacgcccagctaattttttgtatttttagtagagatggggtttcaccgtgttagccaggacggtctcaatctcctgacgtcgtgatcygcccacctcagcctctcaaagtgctgggattacaggcatgagccaccgcacccggccgagatgattatttttcaaaaggagttcaaactctagctcctttaagtgaggacttgattccagaaaacggttggatttataaaatactgtgtctacaagacccttcaaggacatagactctgtgtaaataaaagttacgcctgtagccctactacttgggaggctgaggtaggaggatcacttgaggccaggagtttgagaccagcctgggcaacacagctaaattccttgtctcaaaaaagaaaaacaaaaaattagccaatcatggtggcttgtgcctgtagtcccagctactcaggaggctgaggcaggaggcagtgagttttgttcacactactgcactccagcctgca

SEQ ID NO: 940588 - DNA, 630 bp, Homo sapiens
ctgacctttcctttactgtgagactttttattatgacttcaatttcattacttgttatttttctgttcagattttggatttcttcatggttcaatcttggtaggttgtatgtgtctaggaatttgtctatttctgctagattttccaatttactggcatatagttcctcatgatagccactaattatcctttgaatttttgcaatatcagttgtaatatctcctttttaatccctgattttattttattatatatgttatatttatatattgtataaatatacattttatataaaatcatatatgttatataaaattataatatattttatgtatattatatttatatagatataaatatatatttatgtatatattttatatatwttttttgagatagggtctcactctgtcatccaggtagagtgcagtggtgcaatcagagctcactgcagccttgaccttctgggatcaagagagcctcccaactcaggctcctgagtagctgggactacaggcatgtgccaccatgcctagctagtattttgtatttttagtagagatgaagtctcgccatgttgcccaggctggtcttgaactcctgggctcaagcaatttgcccaccacagcc

SEQ ID NO: 940589 - DNA, 760 bp, Homo sapiens
atactctgtctggaaggtcatatatctgtttctccaggattgatctctggtgcctcatttagttcatttggtgaagtaagattttcctggatggtgttgatgctcgtagatgttcttcaatgtctgggcattaaagaattgggtatttattatagtcttcacagtctgggcttatttgcgcctgtccttcttgagaatgctttccaggtattcaaagggacttgggctccaagcctaacactgtggtttttgcagactcktggagctaccaccttggtggtcttggataagattttgaagagttatctggattaccaagcagagactcttgttctttttccttactttctcccaaacaaatgtagtctctctctgtctgtactgaggtgctggaactgggatgtagtgatgcaagcacccctgtggtcactaccactgggactgcactggcttagatctgatgctatcccagcactgggtcttgcccaaggcctgttgtaaccacttaccaggctgccatctgtgttcactcaaagctcaatgtctctatgatcaaccagtggtgaagctaaccagctttgtgttcttccctcaaggcagcaagttcctccagacccaaggcaggttcaagatgtatcttggagccggggattggagtcaaaaactttagaaatttacctgatgttccattttactgtggttaagctggcactcacaccacaatacaaagtccttcccactcttctctccgcttttcaca

SEQ ID NO: 940590 - DNA, 760 bp, Homo sapiens
atactctgtctggaaggtcatatatctgtttctccaggattgatctctggtgcctcatttagttcatttggtgaagtaagattttcctggatggtgttgatgctcgtagatgttcttcaatgtctgggcattaaagaattgggtatttattatagtcttcacagtctgggcttatttgcgcctgtccttcttgagaatgctttccaggtattcaaagggacttgggctccaagcctaacactgtggtttttgcagactcttrgagctaccaccttggtggtcttggataagattttgaagagttatctggattaccaagcagagactcttgttctttttccttactttctcccaaacaaatgtagtctctctctgtctgtactgaggtgctggaactgggatgtagtgatgcaagcacccctgtggtcactaccactgggactgcactggcttagatctgatgctatcccagcactgggtcttgcccaaggcctgttgtaaccacttaccaggctgccatctgtgttcactcaaagctcaatgtctctatgatcaaccagtggtgaagctaaccagctttgtgttcttccctcaaggcagcaagttcctccagacccaaggcaggttcaagatgtatcttggagccggggattggagtcaaaaactttagaaatttacctgatgttccattttactgtggttaagctggcactcacaccacaatacaaagtccttcccactcttctctccgcttttcaca

SEQ ID NO: 940591 - DNA, 605 bp, Homo sapiens
ggtggattaactttttgatgtgctgccagattagttagtttgctagtattttgttgaggatttttgcatctatgttcattagagacattggcctaaagtttcctttttttgtttccttcctctgccaggttttggtaccagaatgattctggcctcatgaataagtcagagaagaggttcttctcctggattttttggaatagtttcagtgtgattggtaccaactcttctttatatgtttggtggaatttggctgtaaatccttctggtccagggcttttttgttttttggttggtaggcttgtaactactgattgaattttagaacttgttattggtctgttcagggtttcaatttattccttgttcagtcatgacaggttgtatgtttccaggaatttatcctggttaggtttcctagtttgtgtgcatagaggtgttcataayagtctctgagggtttttttaattattatttctgtaggttcagtggtaatgtcccctttgtcatttctgattgtgtttatttggatcttctttcttctttctttattagtctagctagtggtctatcaatcttattctttcaaaaaacaaacttttagt

SEQ ID NO: 940592 - DNA, 665 bp, Homo sapiens
tattccctgccaggcacccatggagtctccccctcccccagccagggagtccaaccccatcagacagcaattaagcttctctctagggtggaggaactatttgcataagaataagaggtttttcccccaggcatccctttttcttctccactccatcagcagttaacttttaaatgagtttatttttccttttagaagacattttcttaggctaggaatgataaggatcattatcataatttagtccacctatttatgtggactaattatgtttatattctctgtaaagttttaattgtgaaaaaggatttgtgaggttggtcttaagctgtagccaatgtggtatgctttgcatgtctgtgtggtcagtagcaaactttgctgcacacctycatcttgttttatgtcctgagggcatatgtcctgagggtgtggcctgtaaccacatggcaaggctttgtttagcaatcctgcctagggaatgagtcctttctggtttgatatctgcacattttcctagccctgtctcttaaagggctccacccagcgactgggttttcttctgcctgtctgtgtagctatatatgtgttatgtatatgatgtctgtaaaaagagctctaattaatttggcctaaaggaagacaagcacttgaatcaagtattt

SEQ ID NO: 940593 - DNA, 612 bp, Homo sapiens
ggtagcacttctaggcctcatctttttttgccagaacaatgtccaaaaccatcagcgagattgagctaatgggccaggtgcggtaccttatgcctagcactttgggaggctgaggcgggcagatcacttggggtcaggagtttgagaccagcctggccaacatggtgaaaccctgtctctaccaaaattacaaaagcaaatgtatccaggcacggcagtgcacacctgtagtcccagctactcgggaggctaggcaggagaatcacttgaacccgggaggcagaggctgcagtgagctgagaccgcaccactgcacaccagcmtgggcaacagagcaaggctacatctcaaaaaaaaaaattgagctaatgagtgtgaaagtactttgcaaattccaaattactttgtataagttagttagtcctatttctcttgtgctttgagattctgacatcgtatcctgtggttcataataactagatagctctagtaattcaaagctacataaaacgtggttattaagtgaaatcattagaaatgtgtccagaaaaaaattgcattttctgaaggacagaaaatacacgtatatctctcttggagagtttcaagtaa

SEQ ID NO: 940594 - DNA, 601 bp, Homo sapiens
ttgtcaattcgtcaaactcattctccatccagttttgttcccttgctggtgaggagttgtgatcctttggaggagaagaggcattctggtttttggaattttcagtctttttgcgctggtttttccttatcttcatggagttatctacctttggtctttgatgttggtgaccttctaatggggttttggtgtggatgtcctttttgttgatgttgatgctattcctttctgtttgttagttttccttctaacagtcaggcctctctgctgcaggtctgttggrgtctgctggaggtccactccagaccctgtttgcctgggtatcaccagtggaggctgcagaacagcaaagattgctgcctgttccttcctctagaattttcatcccagagggacacatgcctgatgccagccagagctctcctgtatgaagtgtctgttgaaccctgctgggaggtgtctccccatcaggaggcatggggaccagggactcacttgaggaggcagtctgtcccttagcagagcttgagtgctgtgctgagagatccacttctctcttccaagccagcagggcaggaacgtttaagtctgctgaagctgc

SEQ ID NO: 940595 - DNA, 759 bp, Homo sapiens
taggtgctctgtcccagggagatgggagttttgtctataatcccatgactggggctgctgcctttctttcagagatgccctgcccagtgaggaagaatctagacagggagtctggctacatggttttgctgagctayggtgggctccacccagttcaaacttcccagcagctttgcttacactgtgagggaaaaccgcttgctcaagccttagtaatggtggacacccctccccccaccaagcttgagcacccaagtcgacttcagactgctgtgctggcagtgacaatttcaagccagtggatcttagcttgctggactccatgagtgtgggatccactgagctagaccacttggctccctggcttcagccccctttctaggggaggaaacggttctgtctcactggcactccaggcaccactggagtatgaaaaaaaactcctgcagctagcttggtgtctgcccaaatggctgcccagttttgtgcttgaaacccagggccctcgtggtgtagtcacctgagggaatctcctggtctgcgggttgcgaagatcatgggaaaaacacagtatctgggctggagtgcaccgttcctcagggcacagtctctcacagcttcccttggataggggagggagttccctgacaccttgcgcttcctgggtgaagtgacgccccaccctgcttcgtcttgccctccgaaccagtcccaatctgatgagctgggtacctcagttggaaatgcagaaatcaccca

SEQ ID NO: 940596 - DNA, 759 bp, Homo sapiens
taggtgctctgtcccagggagatgggagttttgtctataatcccatgactggggctgctgcctttctttcagagatgccctgcccagtgaggaagaatctagacagggagtctggctacatggttttgctgagctacggtgggctccacccagttcaaacttcccagcagctttgcttacactgtgagggaaaaccgcttgctcaagccttagtaatggtggacrcccctccccccaccaagcttgagcacccaagtcgacttcagactgctgtgctggcagtgacaatttcaagccagtggatcttagcttgctggactccatgagtgtgggatccactgagctagaccacttggctccctggcttcagccccctttctaggggaggaaacggttctgtctcactggcactccaggcaccactggagtatgaaaaaaaactcctgcagctagcttggtgtctgcccaaatggctgcccagttttgtgcttgaaacccagggccctcgtggtgtagtcacctgagggaatctcctggtctgcgggttgcgaagatcatgggaaaaacacagtatctgggctggagtgcaccgttcctcagggcacagtctctcacagcttcccttggataggggagggagttccctgacaccttgcgcttcctgggtgaagtgacgccccaccctgcttcgtcttgccctccgaaccagtcccaatctgatgagctgggtacctcagttggaaatgcagaaatcaccca

SEQ ID NO: 940597 - DNA, 598 bp, Homo sapiens
agcaaatgtagcaaaacattaacagttggggaaatctgtgtgacgggtatatgagtgttcattgtattattcttgcaactttcctgaaacttgaagaaatattaattaaaaaataattaatcaatggaggccgcccaccagtgtgagaagtgctgtctacacatttaacaggcctgatgcgaggctcttctgggacttaaccttgggctccactccactttcacctctctaggctagtggcctgccctgcgtgtgggaatggctgcattgaattacgtggacagtgctataattatgtcgtcttccctttcatcttccttgcaggactccaagtgagaatgtgtggagtgagctaatgatttgccacatatctctgatgagtactatattatttgcatcataatattttcatttcctccccctgcacataacgycacattgacagcaaggtcagttaagttactataagggatttttaatgaaaacaattataaatttaaaataactgtgtttaaagcatttaacaatcactagggtcaagtgattacagcagttacaagccccatgggacatgttcacaccaaaacaaagtgaataa

SEQ ID NO: 940598 - DNA, 601 bp, Homo sapiens
acagctgattctataagatattcaaagaagaattggtaccaatcctattgacactcttccaagatagagaaagaggtaatcatccctaaatcattctgtgaagccagtatcaccctaataccaaaacagggaatactagctaacagaatactagctaagtactagctaacagaatcccacagcatatcaaaaagataatccaccatgatcaagtgagtttcaaatcaagaatgcagggatggtttaacatacgtaagtcaataaatgtaatacacaacatgaacagatttaaaaataaaagtcacatattcatcttaatagacacagaaaaagcatttgacaaaattcaggatcctttatgattaaaaccctcagcaaaattggcatagaagggacatatcttaaggcaataaaagccatctatgacaaacccacagccaacattatattgaacagggaaracttgaaagcattccccctgagaaccagagcaggacaaggatgcccactttcatcacttctgttcgacatagtactctgggagtcctagccagagcaatcagacaagagaaagaaataaaaggcatccaaagtggtaatg

SEQ ID NO: 940599 - DNA, 753 bp, Homo sapiens
acagttataatttcatgctctggcatacaaggaaggaaatttgtaaccactataggtagaaaccaagcaaatagctataaccttgggtggttcccttagaagatgaaggtgtggggtatgtaatacttgttcagaaagtattaaccctcaaggttcttttagttgcaccattttacagcttatcccctcctgtagactatcacaccaaccttagattcactaggagacttagaatttcttagagtggggccaggctgctataagggagctttggttaccttgggggagatttccttgaaagagaaaagctcccataggaagccatggatgaggtattgactagtctttgggccgttattgtyctagaatgggtttgtaatgctgatgaagattacctattggaaaatgagaaactgacctaatgaaatctagacaaattcttaccgtcacccctgttgcctcgcaaaactctcataattcttttggtgaagcagtgatagaacatgagatgttataataatggggcagtaaatgccctcaattgaaacagactccttaaaaaaaatagctgctgcgcaggtcaagcccaaatcagacaaatggaacaaattctatagccacagccagaaagtggttatggctgctaagtctaggggttcccagaactggaatagatggtgtctgtaatgatcttgctgccaaatatagagcattgcatggaatgaaaatagtagaagtttatttgattgagcc

SEQ ID NO: 940600 - DNA, 753 bp, Homo sapiens
acagttataatttcatgctctggcatacaaggaaggaaatttgtaaccactataggtagaaaccaagcaaatagctataaccttgggtggttcccttagaagatgaaggtgtggggtatgtaatacttgttcagaaagtattaaccctcaaggttcttttagttgcaccattttacagcttatcccctcctgtagactatcacaccaaccttagattcactaggagacttagaatttcttagagtggggccaggctgctataagggagctttggttaccttgggggagatttccttgaaagagaaaagctcccataggaagccatggatgaggtattgactagtctttgggccgttattgtcctagaatgggtttgtaatgctgatgaagattacctattggaaaatgagaaactgacctaatgaaatctagacaaattcttaccgtcacccctgttgcctcgcaaaactctcataattcttttggtgaagcagtgatagaacatgagatgttataataatggggcagtaaatgccctcaattgaaacagactccttaaaaaawatagctgctgcgcaggtcaagcccaaatcagacaaatggaacaaattctatagccacagccagaaagtggttatggctgctaagtctaggggttcccagaactggaatagatggtgtctgtaatgatcttgctgccaaatatagagcattgcatggaatgaaaatagtagaagtttatttgattgagcc

SEQ ID NO: 940601 - DNA, 640 bp, Homo sapiens
aaccggaaatgcaccaatccccaacccaaatactattacataaagttaacaatatttaaatgccgatatgaagtcaataaatcttatgtcacatgataaaggaaaaggaaataaaggtattttcttagtacaagtgtatacatgcacaaacatgtttttaacaaaagaaggaggaaatactcatgacaattacagtccccgtttctgcagtggtctcgtggtcgtagatgctattgatgactaacttcttctactacccattctgtattcyctttgccttcagcaagcacctcaacaggtcatgtttttttttccttgtggagtgacccaaaccttcattcctgggggatctgggccatttctagtcctgcctggattgggctgttgtagtttcccattgaccttaatcatagggcgtggtaatactaagagacaccctaatggatctcctgtattccatgcatactcttccttacctccgttgtggagtaatagactgatttcatcttgaaagtctgggtcagtcagtcaccccagccaacaatgtaactcccctcttagcctgttgacttaaaggtaggaggagcccaaagtgtccaggtggcaatgttaacatccagtttaatggaatcgttgttgt

SEQ ID NO: 940602 - DNA, 624 bp, Homo sapiens
ctttcaccaactcagaaagtcaccccaacatctaaaaccccaatctgcgaaattctccaggttctgaatacatgctgtgctgacatcggcagcgtaaatgtgtgtggtctgagtctcagtttgtggatatctgaacaaattctggaaaaggaatagcttatataatatttttatatagcatagtttcctagagaataaacagcatagaaaagtgttttttacaacgttgcaattaaaaagagtttattatttgtcttgaaactgctttaagtgagagcaattagagatgygtatcaaattagtgctactttgtgcaaaattaatgtactacagtactttctgaaggtctgtttttccatttaagctgtgtttaactacccaatatatacaaatgacacatttccattttgattgcaaaacccatgatgtctaataccaaatcttggatctttcttcccaaacttgcccactttcagacttctgacctctgtgtctgacaccaacattcttccatttatacaaataaaaaaccagcgagtcatgcattaaatccctctctgtcttattcccctattaacaatataatatgaagtccagtcattttttaccacctaaaatttattc

SEQ ID NO: 940603 - DNA, 649 bp, Homo sapiens
aatagcacagcagaaagtttgtcaaaaagttttttttaggaaaaattttattgaaatatatgcatacagaagagtgcattaatcataagtgtatatagccattgaattttcacaaagttaatggcccgtatcactgtatcaagaaaacaggacattaccaggtccctagtcccttccaccttgatccctcgcagtcattgagtcctacaaaaacagaccactttccrcactcccctcatcatggattcgtttggccagtttctgagttttatataaatacaattgtacaggatgtgtatttttctggctcatttctttatttaatgttatttcatgagatccattcatattattaacatatagcagtagtttatcgctttttgttgctttattgtaattgattgcatgattatttgcaatttattcatctattctattgttgacagacatttgggaggttttcaggtttttggttattataagtaaagctgctatgaatcttcttacacacatcttttgagtgtacacaaacatgcaattttgttaggcatttttctaggtatggaagtgctgggtcataaaatatatgtgtttagctttaataaatactgccaaattgttttataaggtgatcatacaaatttatact

SEQ ID NO: 940604 - DNA, 586 bp, Homo sapiens
gactggacattaaaattatctagggacaattcaatcagaattcctgggggtggggaccaagcatcagtattttaaagttccctggggactttaacttgaagcccaggttgagaatcatttaaacarctctgttatttatttatttaaaattttaatgtattttttgagatggagtctcgctctgtcacccaggctggagtgcagtggcgcaatcttggctcactgcaactcctgcctcccaggtccaagctattctcctgcctcagcctccccagtagctaggaatacaggcgtgcaccaccacaactggctaatttttgtacttttagtagagacagggtttcaccatgttggccaggctggtcacaaactcctgacctcaagtgatccacccacctcggcctcccaaagtgctgggattacaggcatgagccactgggcccggcctagttttactttttttttttgtaatggaatttccctctgtcacccaggctggagtgcagtgatgtgatttctgctctctgcaacctctgcctcctgcgttcaagtgattctcctgacttagcatcctgagtagctggga

SEQ ID NO: 940605 - DNA, 559 bp, Homo sapiens
gacaattcaatcagaattcctgggggtggggaccaagcatcagtattttaaagttccctggggactttaacttgaagcccaggttgagaatcatttaaacagctctgttatttatttatttaaaattttaatgtattttttgagatggagtctcgctctgtcacccaggctggagtgcagtggcgcaatcttggctcactgcaactcctgcctcccaggtccaagctattctcctgcctcagcctccccagtagctaggaatacaggcgtgcaccaccacaactggctaatttttgtrcttttagtagagacagggtttcaccatgttggccaggctggtcacaaactcctgacctcaagtgatccacccacctcggcctcccaaagtgctgggattacaggcatgagccactgggcccggcctagttttactttttttttttgtaatggaatttccctctgtcacccaggctggagtgcagtgatgtgatttctgctctctgcaacctctgcctcctgcgttcaagtgattctcctgacttagcatcctgagtagctg

SEQ ID NO: 940606 - DNA, 586 bp, Homo sapiens
gactggacattaaaattatctagggacaattcaatcagaattcctgggggtggggaccaagcatcagtattttaaagttccctggggactttaacttgaagcccaggttgagaatcatttaaacagctctgttatttatttatttaaaattttaatgtattttttgagatggagtctcgctctgtcacccaggctggagtgcagtggcgcaatcttggctcactgcaactcctgcctcccaggtccaagctattctcctgcctcagcctccccagtagctaggaatacaggcgtgcaccaccacaactggctaatttttgtacttttagtagagacagggtttcmccatgttggccaggctggtcacaaactcctgacctcaagtgatccacccacctcggcctcccaaagtgctgggattacaggcatgagccactgggcccggcctagttttactttttttttttgtaatggaatttccctctgtcacccaggctggagtgcagtgatgtgatttctgctctctgcaacctctgcctcctgcgttcaagtgattctcctgacttagcatcctgagtagctggga

SEQ ID NO: 940607 - DNA, 632 bp, Homo sapiens
gcttgattgagaaggctgagaagacttagagtaagggttctcagccctgactggacattaaaattatctagggacaattcaatcagaattcctgggggtggggaccaagcatcagtattttaaagttccctggggactttaacttgaagcccaggttgagaatcatttaaacagctctgttatttatttatttaaaattttaatgtattttttgagatggagtctcgctctgtcacccaggctggagtgcagtggcgcaatcttggctcactgcaactcctgcctcccaggtccaagctattctcctgcctcagcctccccagtagctaggaatacaggcgtgcaccaccacaactggctaatttttgtacttttagtagagacagggtttcaccatgttggccaggctggtcacraactcctgacctcaagtgatccacccacctcggcctcccaaagtgctgggattacaggcatgagccactgggcccggcctagttttactttttttttttgtaatggaatttccctctgtcacccaggctggagtgcagtgatgtgatttctgctctctgcaacctctgcctcctgcgttcaagtgattctcctgacttagcatcctgagtagctgg

SEQ ID NO: 940608 - DNA, 559 bp, Homo sapiens
gtggccttattcctaggctctctattctgttccatcggcctttgtgtctgtttccgtgccattatcatgctgtttgggttattgcagttctgtagtatagtttgaagtcaggtagcatgatgcctccagctttgttctttttgcttagcattgccttgactattcaggctctttttttgttccatgtgaattttaaaatagtttttttctagttctgggtattacaccattggtagtttcataggaatggcatttaatctataaattgctttggkgagtatggtcatttttacaatatttattcttcctatccatgagcatggaatgttttttatttctttgtgacatctacaatttctttgagcagtgttttgtagttctccttgtagaaatctttcacctcactagttagctttattcctaggtatttcattctttttgtggcaattgtgagtgggagttctttccttatttggctcccagcttgactgttgttggtgtataggcatgttagtgatttttggatgttgattttgtatcttgagactttgctgaagtt

SEQ ID NO: 940609 - DNA, 569 bp, Homo sapiens
atgtatgtgtgtgtttgtgtgtgtatatatatatagagagagagcagtacaaagttggaagcatggagatttgagtaatctaagaaatcacgtgatttgaactaggaagctattagctaagatggtcagattcagaatatcttcggaagtttaaattctcaaattatctgacagattgaatatagggtataaaagaacagtcaagaaggtagacttcaaagtattgaaactgcgcaagggggtgaatgttgcatttactattttgggagggaaaagttggaaaacagagcttattagaaatccagttagaattctaataaacacctgtatacataagtctagattttagccacgatgagcctggggttgcaaactttgaawtcatttgtgtataagaagcattcagttcctctaggagagaacgttgggtggagtaaatttaaaggataagcgattggaaagttaaggtattggtgcactgtaaggttgacattggggcattgagaaagggaatccagcagataaattagggtaaaatagaaaatgacatagaagtcgctagatttgtg

SEQ ID NO: 940610 - DNA, 754 bp, Homo sapiens
atatggagcttcttaaaagaaaaaaaatacaaattaggagaatttttcagcaaattcaattccttttctctcccagaggggtgggtggaagcagcaggtggcaaattcgtttttatctaataacatttgatcatgtgacatattttatttccacagttgatgtaacttaatgaacagcaaattgggaaaatccgtcagcatgtaggaagttagtggggcatgtgtgcatgtgtgtgtgtgtgygcgcgcgcgcacgtgtgcgtgtgtgtgtgtgtgtgtgtgtgtgtgtgtgtgtgtgtagggagaatagaaaggcctctgtggtgcagataaggggaaaaggttgctgttacatgttctgggtagaaaacttttttttctttttttaaagacattagttccaatccatgttgacagcagtctaaaggaattataagggctaaacagaccatctttattaaatgagatctggtgatctcaggcaggtcctaaaagaagtagatatacaaaaataaaccccaaggctgacagcagaaatgctggagacctccacggtagagttataagtgctgtgtggaataaactcgcatagccaatgaaggaagatgaggaactgaggaagccatcaatctgacagtttccactaagaaaagcagttgctcatgagtttcaaacaaggttatacttagttttaggtacatgtagtaccagaaaaacaggctttctaagctggtaaaataaaaaaaagacttgt

SEQ ID NO: 940611 - DNA, 628 bp, Homo sapiens
ctgctcaacctcgtggagctcatctacctggtgagcaagagatgccacgagtgcctggcagcaaggaaagctcaagccatgtgcacaggtcatcacccccacggtaccacctcttcctgcaaacaagacgacctcctttcgggtgacctcatctttctgggctcagacagtcatcctcctctcttaccagaccgcccccgagaccatgtgaagaaaaccatcttgtgaggggctgcctggactggtctggcaggttgggcctggatggggaggctctagcatctctcataggtgcaacctgagagtgggggagctaagccatgaggtaggggcaggcaagagagaggattcagacrctctgggagccagttcctagtcctcaactccagccacctgccccagctcgacggcactgggccagttccccctctgctctgcagctcggtttccttttctagaatggaaatagtgagggccaatgcccagggttggagggaggagggcgttcatagaagaacacacatgcgggcaccttcatcgtgtgtggcccactgtcagaacttaataaaagtcaactcatttgctggttccaggtgccctctggttgtgcggccttcgtgaccctcac

SEQ ID NO: 940612 - DNA, 604 bp, Homo sapiens
gtcctcaactccagccacctgccccagctcgacggcactgggccagttccccctctgctctgcagctcggtttccttttctagaatggaaatagtgagggccaatgcccagggttggagggaggagggcgttcatagaagaacacacatgcgggcaccttcatcgtgtgtggcccactgtcagaacttaataaaagtcaactcatttgctggttccaggtgccctctggttgtgcggccttcgtgaccctcacacgttcatggtgtcaatctctctgcccccgtgaagagctgcacttgatccagcctgtgaggggcatcctctcttccagaaagggggcccccagtactccaggggacgtgctacttgctcatgctcccatctagcctttatcccccatggcaagtttagkcctgtgggttgtctgcagagagaatggagcttagtccatgttgcagtgggaagttcatgaacttagaatgcctgtgtcgaatccaagttccaccgggactctgggaaagtaacttaagcttctctccaaaatgggttaataatacctagcctgtggggttgtgctgaggactgatgagctcatggctgtgga

SEQ ID NO: 940613 - DNA, 670 bp, Homo sapiens
tgtgtgtagccagaaatagtaaccctaaggttcttgggaaatcacattttgtagtgttggactaggcagcctggtttaggtattccacaactggaaagacgggcacagttcgtctgggccacttagtttgccagaatggagcccggatcctcttcaaaggatatgtacctgtacaagctgctggtagtgggwctagttgggttagggggtgagagttaaagttttgttccctgattctagaagacaggaatcatacttgtaatcccagaaggtgatcagcaatgttattttaaaactcaaaaacagatccacagaccaccgactacagtgacagtaagtttggggcaggctctttaagtgcagaaggttccctgccttcgtgaaaacatcttatgtcttggcaactggctaccttcatatactgattcctttttcacaaataatgcaggaaaaagattgtatattctcccggaaataattgtccatttgtctcacaagattagggctcactgacaatgcacctaagttagccaagagctctgatgaagatgtacaagaataatgttgtttccatgcctaacacatctattctgtagtccatgcataaatgtgtaattgtgactttcaaactctaattatttaagaaatatgttttgtaaggttacagttg

SEQ ID NO: 940614 - DNA, 789 bp, Homo sapiens
agaaattgttcagagaagagcaaagtgtttttccatgagccagaggtcagccaaggtatgctaatgaggaggactggagacagcgcatcacagacactgataaggagcactgggcaagggcacttctcccagggcagagcccacaaggagcgtcctggcaccagatgctcagggaactgaaggctggcaggggcccgcccagtagtctcttgcccactgtgtgcctttaggctacagcctcccaggccccgtgccccctmccttcccccatgccacactggggaagatgctgaccctgagagtggtgcaaccatctgcctgcccctggccacctctcaccagcacgtgaatgctcttgggctcagttctgtctctgcagtaggagggtgtttagccacatgacagagtctcaccttttgacattttatgtctttcagtctgtcaaagatctagaacatattttgatggaattaaaaagtttacttttggctgggcaaggttgctcaagcctgtaatctcagcactttcggaggctgaggcaggtggatcacttgaggtcaggagttcaagaccagcctggccaatatggtgaaaccccgtctctactaaaaatacaaaaattagcaagatgtggtggtgcacgcctgtaatcccagttactcgggaggctgaggcaagagaattgctctaacccagaaggcagaggttgaagtgagcgaagattgtgtcattacactctagcctgggtgacagagcgagaatccgtctaaaaaaaaaaaaaagagttta

SEQ ID NO: 940615 - DNA, 615 bp, Homo sapiens
ctagtccaagctcataatttatctctttctcttacctctccccaaactcccagccccgtttctgccagggctagtattgcttctcaatactattgcttcaggcttttataaaagaaaaaacatttaatatcccaaaaatcatataatgcagttactagttttatctctcttttatgaatgaggaaattgagggcagggcagatggagtagcatgcccaaggctacaaagctagaaagtgtcagaacccagatgtgaacacagcctagcaccagggagatccagttaccttgttgaatgggggaaaacaaatattagaataacatgcggtggctcatacctgtaatcccagcattttgggaggccaaggcgggtgggtcacctgaggtcaggagtttgagaccagcctcgccaacatggtgaaascttatctctagtaaaaatccaaaaattagccaggacatggtggctcgtgcctgtaatctgagctactcgggaggctgaggcatgggagtctaagacagaagaatagaagaattgcttaaacccgggaggcagaggctgcaatgagctgagatcgtgccactgcactccagcctgggcaacaggctttttct

SEQ ID NO: 940616 - DNA, 528 bp, Homo sapiens
gcaggaggtggcgcaaacgtcacctgctacaaagaactcttgccaaaaacaaaaaaaagcatctaatcatgcatctagatctaactcccaatttacagctaaagaggggacagaacaacacctttatgttaccaccaggatacaaaaamagaatccagactgtggggtggacgctctacagtacaatgtggcttcttcaataaatacataaaaaagaaacaacagagacaggtacggtggcagcaactgcagacagagactgaagagtcacactgctccatgaccagtatggaccttatttctggacaaacttaaaaaaatgttatgaggttactagcaaaattttaacattggctagatatttgatgatattaggagttattattttagatgggctataccccttaagtttatgtttttcaaatgagaattcctaattttttagatatacataaggaaatattcatacatgaaattatataatgtctgggatttgcttcaaaataaccctggcttgggggaggacgc

SEQ ID NO: 940617 - DNA, 767 bp, Homo sapiens
ttccatcaatattataataaaatgatgttaaatgaaatgaaattattcaagaacctactgtacttagttggatggtggcatgcccaactcagaggggtgatttgtatgagatattatttttctttttttttttctcaagacggagtctcgctctgttgcccaggctggagtgcactggtgcaatctcggctcacttgcaagctccccctcctgggttcacgccattctcctgcttcagcctcctgagtagctgagactacaggtgcccaccaccacgcccagctaattttttgtatttttagtagagatggggtttcaccgtgttagccaggacggtctcaatctcctgacgtcgtgatcygcccacctcagcctctcaaagtgctgggattacaggcatgagccaccgcacccggccgagatgattatttttcaaaaggagttcaaactctagctcctttaagtgaggacttgattccagaaaacggttggatttataaaatactgtgtctacaagacccttcaaggacatagactctgtgtaaataaaagttacgcctgtagccctactacttgggaggctgaggtaggaggatcacttgaggccaggagtttgagaccagcctgggcaacacagctaaattccttgtctcaaaaaagaaaaacaaaaaattagccaatcatggtggcttgtgcctgtagtcccagctactcaggaggctgaggcaggaggcagtgagttttgttcacactactgcactccagcc

SEQ ID NO: 940618 - DNA, 606 bp, Homo sapiens
tctgctgccttttgttcagctatgccctgcccccagaggtggagtctacagaggcaggcaggcctccttgagctgcagtgggctccacccagttcgagcttcctggctgctttgtttacctactcaagcctcagcaatggcaggtgcccctcccccagcctcgctgctgccttgcagtttgatctcagactgctgtgctagcaatgagtgaggttccatgggtgtaggaccctctgagccaggcacgggatataatcttctggtgtgccatttgctgaggccattggaaaagctcagtattagggtgggagtgacccaattttccaggtgccatctgtcacccctttccttggctaggaaagggaattccctgaccccttgctcttcccaggtgaggcgatgccttgccctgcttcagctcacactcagtgcactgcacccactatccttcacccattgtccracaatccctagtgagatgaacccagtacctcagttggaaatgcagaaatcatccatcttctgcgtcgctcacactgggagctgtagactggagctgttcctattcggccatcttggaaccacccccccaatccaatgaatatt

SEQ ID NO: 940619 - DNA, 575 bp, Homo sapiens
gtgaatttaaaactgctgcttaaaaaaatcttaaaatcttccctggagccttggccttaagattgaaccactttatgaccaagcaattctacttctgggtatataaccaagagaattgaaaaagcgtatatccacaccaaaatttgtacataagtgctcgctttagcagcacatatactatgaggttggtgcaaaagtaattgcggcttcagaccatgcatgttaaatcattataactcagctcaaacacatctttattcatcaaaataagaaccattacaatcaacatatttttgtcaacgagaaatatgtttgtttattcctgtagcataaaaatccgtgcttcaggattcgacgaactcttggaaagcattttctgcatcctgctgattrtggaagcattttccctgaaaaaagttgttgagatgcttgaagaagtggcagtcagttggcaagatatcaggtgaatatgacaggtgaggcaaaatttcgtagctcaatttgttcaacttttgaagcattggttgtacgccgtgaagtcgcacgaagtgaggttgtcatggaagagttgggcc

SEQ ID NO: 940620 - DNA, 575 bp, Homo sapiens
gtgaatttaaaactgctgcttaaaaaaatcttaaaatcttccctggagccttggccttaagattgaaccactttatgaccaagcaattctacttctgggtatataaccaagagaattgaaaaagcgtatatccacaccaaaatttgtacataagtgctcgctttagcagcacatatactatgaggttggtgcaaaagtaattgcggcttcagaccatgcatgttaaatcattataactcagctcaaacacatctttattcatcaaaataagaaccattacaatcaacatatttttgtcaacgagaaatatgtttgtttattcctgtagcataaaaatccgtgcttcaggattcgacgaactcttggaaagcattttctgcatcctgctgattatggaagcattttccctraaaaaagttgttgagatgcttgaagaagtggcagtcagttggcaagatatcaggtgaatatgacaggtgaggcaaaatttcgtagctcaatttgttcaacttttgaagcattggttgtacgccgtgaagtcgcacgaagtgaggttgtcatggaagagttgggcc

SEQ ID NO: 940621 - DNA, 600 bp, Homo sapiens
ggtgtggtggtacacgcctgtgatcccagctacttgggagtctgagtgaggcaggagaatcgcttgaacccaggaggtggaggttgcagtgagctgagatcacaccactctactccagcccgggtgacagagcaagattctgtttcaaacaaacaaacaaaaaaagacactcgcactcatatgtttattgcagaacaattcacaattacaaagatatgaaatcaacctaagtgcccatcaacagatgagtggataaagaaaatgtgatatacatataccatgaaatactactcagccataaaaagaacaagataatgtattttgcagcaacttggatggaactgaaggccgttattctaagtgaagtgactaaaaaatagaaaaccaaataccatatgttctcacttataagtggaagctaagctatggatgtgcaaaggcatayagactggtataatggacactggagactcagaagcgagggatggtggaaggagggtggggagaaaaaattacctgttgggtacactacacacagatatactaaaagcccagatttcaccactgtacaatgtatctatgtaaccaaaaaccactttt

SEQ ID NO: 940622 - DNA, 686 bp, Homo sapiens
tagcccctaacaagacagtcagcctgttttttgaagatttgaagtcaggcattgacttctctctatctattaaagtcctaggtgacatctttcccaatgtaagactgttctgcctaccctgataatctgttgttggccagccgtggtggttcacgcctgtaatctcagaactttgggaggccaaggccgacagattgctcgagtccagttgtttaagaccagcctgggcaacatggcgaaaccctgtctctccaaaaaaatgcaaaaattagccaagcataatggcacgggcctataatcccggttacttatgaggctgagatgggaggatcacctgagcccaggaagttgaggctgccgtaagccataattgcaccactgtactccagcctgggygagagagggagactctgtctcaaaaaaaaaaaaaaaaaaagaaagaaagaaaagaaaagaaaagaaaaagaaaaaagaaagaaagaagagaaaagaaaatttgggctgggcaccgtgggtcatgccgctaatcccagcactttgggagactgaggtgggcggatcacttgaggcccggagttcaagacctgcctgggcaacatggcgaaaccctgtctctatgaaaaatacaaaaattagctgggtgtggtggctcaagcctgtaattccagctactcaggaggctaagg

SEQ ID NO: 940623 - DNA, 756 bp, Homo sapiens
atggcagctgaatgttagttagctagagccaccataacaaaataccacagactgagtggcttaaacaacagatgttttattttcttatagttctagaaactgaagtccaggatcaaggtgctggcagggttggtttcctctgaggcctccctccttagcttgtgcttgtgtgcttggctgactcttcatgtgattgttctgtgcacatgtatccttggtgtcactttgtccaaatttcttctttctttttttttttttttttgagagagggtctcactccctgtgcccaggctggagtgcagtggcatgatctyggctcactgcagcctcaacctccccaagctcaggtgattctcctacctcagcctcctgagtagctgggaatacaggcgtgtgccgtcatcctgggtgatttttgtattttttgtagagacggggtttcaccatgttgcccaggctggtctggaactcctgggctcaagtgattcacccgcctcagccttctgaagtgctggcattacaggcatgagccatggtgccagccccaaattttctcttcttattaggacactattcagattgtattagggctcatgccaatggcttcatttactctaaattacctctttaaagcccttatctcctaatatatccacattctgcagtactggaggttagggcttcaacatacacatttttggagaacacaattcaccccataacaacagccaatacccagtaacaaaaaaaaaagtg

SEQ ID NO: 940624 - DNA, 561 bp, Homo sapiens
aaaatttatgtctaatccagtgagtctcaaaacatggcccctgggccagcagcatcagtagcacctggaaatttgttagaaatgaaaattctccaatcctaccttagacctactgaatcaggaatcctggagctgggatccagcaatctgtgattgttgtgattgagtggtcaaggaaattctaaaacacacagaagtttgagaamcattggtctaaacttaaaggaaattattcttcctggtgaaatgtcagaaatatttcctttaaaatcaggaacagaacaaagatgtccagattcattgcttctatttaacatcatgctttctgttctggccagcgcagcaagaaaagaaaaagaaataaatgtaaaagaagagataaaactgtcatattcactgttgatttgattgtgtatatttaaaataaatccaagttccaagttgctgattgtatgaatgtacaaaaatgggtttcttcctatacgacacaacaaattatttagatatcattggtaatggcaagcagtagttacccaggaatgaatctaacagcaaaactgc

SEQ ID NO: 940625 - DNA, 598 bp, Homo sapiens
ttgcctggactgggtccttctcttcaaggcagcagattcccttctgggccatgatgtgtctagaaatgtcatctgagacctaggtcttggaatgggggacttacaactctgcccaatgccctaccctactgtggctgagctgcaagacaaagtcctctttactcttcgctatcctctcaagcagaagaaaggagtcaatttctttgctacaagcagctctgcctggrgttttgaaaggggtggcacaagcactcccttagcccactgggctggtgtctctctgggtcacatgctaccctagttcactggctctaaacccagcccagcactaggacttgcctaggaattgcagtccttgtgtcctagactgcgtttcaggcttatctagaaccccagaacactttagcccacagtgacaaggtttgctgagaaactcaggttctgaccactgggatgcactattctgttccctccatgggtgggcactggctgaacccagcatggcttttctctcagtgttatgacagggccacactgagtttaatgccaagttccctagtcactgtgctttccctctcccaactgcacgaattctctc

SEQ ID NO: 940626 - DNA, 595 bp, Homo sapiens
ggtgcaggacagtgggtgcagcacaccatgcatgagccgaagcagggcaaggcatcgcctcacccaggaagtgcaaggggtcagggaattccctttcctaatcaaagaaaggggtgacagatggcacctggaaaatcgggtcactcccaccctaatactgcgcttttccaaagggcttmacaaacggtacaccaggagattatatcccacacatggctcagagggtcctatgcacacagagcctcattcactggtaccatagcagtctgagatcaaactgcaaggcggcagcgaggctcagggaggggtgcccaccattgctcaggcttgagtaggtaaacaaaacagccaggaagctctaactgggtggagaccaccacagctcaaaaaggcctgcctgcctctgtaggctccacctctgggggcagggcacagacaaacaaaagacaacaataacctctcagacttaaatgtccctctctgacagctttgaagagagtagtggttctcccagcacacagcttgagatctgagaacaggcagactgcctcctaaagtgagtccctgactcccaagtagcctaactgggaggcac

SEQ ID NO: 940627 - DNA, 595 bp, Homo sapiens
ggtgcaggacagtgggtgcagcacaccatgcatgagccgaagcagggcaaggcatcgcctcacccaggaagtgcaaggggtcagggaattccctttcctaatcaaagaaaggggtgacagatggcacctggaaaatcgggtcactcccaccctaatactgcgcttttccaaagggcttcacaaacggtacaccaggagattatatcccrcacatggctcagagggtcctatgcacacagagcctcattcactggtaccatagcagtctgagatcaaactgcaaggcggcagcgaggctcagggaggggtgcccaccattgctcaggcttgagtaggtaaacaaaacagccaggaagctctaactgggtggagaccaccacagctcaaaaaggcctgcctgcctctgtaggctccacctctgggggcagggcacagacaaacaaaagacaacaataacctctcagacttaaatgtccctctctgacagctttgaagagagtagtggttctcccagcacacagcttgagatctgagaacaggcagactgcctcctaaagtgagtccctgactcccaagtagcctaactgggaggcac

SEQ ID NO: 940628 - DNA, 577 bp, Homo sapiens
aagtcaaacacccattctacacagataaaaaccttcacaaaggtcaactgaagttatccagagctgaaactgaattgtgcagattttcaatgaagtcatcaaagtcatgtaacacaaacaaaagttgattatatttacacactcagcaagcccgctaagaaatgtgtcccaaaaagtattaacctttgttttgtgccatcctgargacttgcatattttatttttcagatagcttaacatttttaatcgagtgtgttctctaccatgtggtaatgctttggtactatgcatacagggtctcgcctgtcctaaagacttgccatttccccaagaggagctttgattctgctttagaagttttatatgaattaaaatctttatcaaatattaatatgaagggaggcacaggatgcaacatatatagtcaagttacctctctgtatatttagaaattactttctcctccaaggtatttgcagcagaaagctcagtctgtcctgcttaataatcagtagtacaggtttgaatcatcagaagcttggcaagaccttaatatttcaaaattattaacaactac

SEQ ID NO: 940629 - DNA, 700 bp, Homo sapiens
aagctcaagggaaagcaataaatagagctcataaaatcctgcccttgaggtgtttacattctagtgggcagaaacaaccaatatggaagtaaacaagaaaaatctataatatgtaagggatgaataagtgattagaataatgataatgcaattaaggagaaccagatgttgtatatgtatagggtggtcaggagatacytttgataagaaagtatttgagatatgaagaaaatgtaaaagtgaactttggtatatctgatgtattagtttattttcatgctgcttttaaaagcatacctgagactgggaggaaaaagaggtttaatggacatacagtttcatgtggctggggtggcctcaaaagcatggcagaaggcaaggaggagcaagtcacgtcttacatgcatggcagcagacaaatagagagcttgtgcagagaaactccttcttataaaaccatcaggtcttgtgggacttattcactgtcataagtacagcacgagaaagaccggccgccatgattcaattacctcccaccggggccctcccacaacatgtgggaattaaagacgagatttaggttgggacacagccaaaccatgtcatctgggttggagcatttcaggaagaaagaacagagaacgccaaagactcacactggagcatgtttgtattgttttatgaacagcaaaaatgtcac

SEQ ID NO: 940630 - DNA, 700 bp, Homo sapiens
aagctcaagggaaagcaataaatagagctcataaaatcctgcccttgaggtgtttacattctagtgggcagaaacaaccaatatggaagtaaacaagaaaaatctataatatgtaagggatgaataagtgattagaataatgataatgcaattaaggagaaccagatgttgtatatgtatagggtggtcaggagatacctttgataagaaagtatttgagatatgaagaaaatgtaaaagtgaactttggtatatctgatgtattagtttattttcatgctgcttttaaaagcatacctgagactgggaggaaaaagaggtttaatggacatacagtttcatgtggctggggtggcctcaaaagcatggcagaaggcaaggaggagcaagtcacgtcttacatgcatggcagcagacaaatagagagcttgtgcagagaaactccttcttataaaaccatcaggtcttgtgggacttattcactgtcrtaagtacagcacgagaaagaccggccgccatgattcaattacctcccaccggggccctcccacaacatgtgggaattaaagacgagatttaggttgggacacagccaaaccatgtcatctgggttggagcatttcaggaagaaagaacagagaacgccaaagactcacactggagcatgtttgtattgttttatgaacagcaaaaatgtcac

SEQ ID NO: 940631 - DNA, 700 bp, Homo sapiens
aagctcaagggaaagcaataaatagagctcataaaatcctgcccttgaggtgtttacattctagtgggcagaaacaaccaatatggaagtaaacaagaaaaatctataatatgtaagggatgaataagtgattagaataatgataatgcaattaaggagaaccagatgttgtatatgtatagggtggtcaggagatacctttgataagaaagtatttgagatatgaagaaaatgtaaaagtgaactttggtatatctgatgtattagtttattttcatgctgcttttaaaagcatacctgagactgggaggaaaaagaggtttaatggacatacagtttcatgtggctggggtggcctcaaaagcatggcagaaggcaaggaggagcaagtcacgtcttacatgcatggcagcagacaaatagagagcttgtgcagagaaactccttcttataaaaccatcaggtcttgtgggacttattcactgtcataagtwcagcacgagaaagaccggccgccatgattcaattacctcccaccggggccctcccacaacatgtgggaattaaagacgagatttaggttgggacacagccaaaccatgtcatctgggttggagcatttcaggaagaaagaacagagaacgccaaagactcacactggagcatgtttgtattgttttatgaacagcaaaaatgtcac

SEQ ID NO: 940632 - DNA, 616 bp, Homo sapiens
taactgcagaacaacatttttctttttctttataataaggcaattttcacataacataaagttcacaattttaaccattttaaagtatacaatgcagtaaacttttgttcattcacaatgttgtacaatcatcaccacaatctaattccagaatattttcatcatcccaaaagaaaccctacacccattaagcaatcacctctcttctctccacccacctccagtcaatcgttcatttgtttkctgtctctatggatttgcttatgcttgacctttcatagaagtggaatcatacaatatgtggtctttcatgactggtttatttcacttagcatgatgttttcaaggtttatctatatatctatatggtggtatgtattaacatcaatactttattgcttgtatagctgaataatattccattgcatagataaaccaccttttatttttccattcatcaggtgatgagtatttgacttgttccattttctggctattatgaataaactgatatgaacatgtgtataacaagcttttgtttgaaaatgtattttcaattctcatatgcctaggagtgaaattgccgggtcatatggtaatggtatgtttaacttct

SEQ ID NO: 940633 - DNA, 786 bp, Homo sapiens
ttctcaggcttgctttacctgtccatttcctttcatcgttaggcaagtaagtaccaagaggcatgcaaatggatctcctgggtgccaaacatattcttgcctgccccagttgtgtaaaatcagccctctgatgagggttggtccctatgcataagaatcatgaaatgagcagatggaagctgtagcttactctatgtattcaatgtactctagctgtgttctctggctggaatgttcccccttgggtgaccaggactgctaaatccacacagtccaacattgtgagaaaggaaagcataagttttctaagtggttccttaagattgatggtagctggactgcttccaccccttgatttacatgcttatgtattctgaatattggaaacagagcccatgtatagatctttagttcaaattatctgctgtgtcctggagactggyacagagtccttgtaacatacaacttctgagctggtgcttcagcctggtcttctgcaagctattccaatgctctatcaggccagcagtgtctgaatggtgagatatactatatggccagtgaatctcatggtctatagtctcttactgtctctgccgtatagggtcccatggtctgattctcagatatgtaggaccatatgttggtggatcaaacactccacttttaggaatattttccctcacagctctttttcaacattaaccctgagtgaaaatacagtatagccatccactttcagctttgaccacagaatgaaccaacccattcatttgtatttcatgg

SEQ ID NO: 940634 - DNA, 596 bp, Homo sapiens
tacaggtctctaagcctttgttcatttttcaatttttaaattctctctgttcttcaaatggcataattttattgatcattatgtttattgagtctttttataatcacaaatcttctgttgaggtcatctagtgaatttttaagttcagttgttgyactcttcagctctagaatttccacttgtttctttcttcaattttattaatactttcaatttctttgttgagatttactcattaatgcaatttttaaaaattccttgaacttatttatattatttcatttagagaactttctgataaatatataataatatctgggccccacttgatatctgtttgtattggtgcctccttttttctctgatatggatcagtcttttctgtttatttgcatctctggtgatttttgcttgaagactgaacatcatacataatatgctatagtgactctggattctgtactgttcttcaaaagatgtctgaggtttctgctctaatatacaactaccttgtctggactccagctacgaaatctgaattctcatgaatgacagtttgttgttgttgtttttcctggcttccagctgcttgaaag

SEQ ID NO: 940635 - DNA, 314 bp, Homo sapiens
aactttctgataaatatataataatatctgggccccacttgatatctgtttgtattggtgcctccttttttctctgatatggatcagtcttttctgtttatttgcatctctggtgatttttgcttgaagactgaacatcatamataatatgctatagtgactctggattctgtactgttcttcaaaagatgtctgaggtttctgctctaatatacaactaccttgtctggactccagctacgaaatctgaattctcatgaatgacagtttgttgttgttgtttttcctggcttccagctgcttgaaagtttatt

SEQ ID NO: 940636 - DNA, 651 bp, Homo sapiens
gtccctacgctgtcttgtaagtggccttataccagcagtaagcctcagtatcagagttatccctgtgtaactagggagtgaaagtgttcagaaatgagcttgctgcatattcactactggcatttcccgtattcttacatcatgttctggaagataagctgtatgtgtgctaactaggaaaggaatataagccacagagagcctccctgatctaagatgctatctattcatattttgctcatttyctagtgctgtccattgcaggatgcaccatagatttaataacagatttttgaaaatttagggaagacactatattacatgtacaattggtggtaaaatgcatatcagtttcagtgctactaaaatatgaaaaagcatgccaggcacagtggctcacacttgtaaatccagcactttgggaggccgaggtgggtggatcatttgaggtcaggagtttgagaccagcctggccaacatggtgaaaccctgtctctactaaaaataaaaaaaaaaattagccaggtggtagtgacgcatgtctgtagtcctagctactcgggaggctgaggcaggaaaatcgcttgagcctaggaggtggacgttgtggtgagccgagactgtgcaactgcactccagtctgggtgacaa

SEQ ID NO: 940637 - DNA, 625 bp, Homo sapiens
gcccagtgtctgttgtgaccctctttgtttccacgtgtactcaatatttagctttcacttgtaagtgaaaacctggtattttgttttctgtttgtgcattaactcacttaggataatggcctccagctgcatccatgttgctgcaagggacatgatttatttctttatggctgtgtagtattccatggtgtrtatgtaacacattttttttaaaattcagtccaccgttgatgggtatctaggttgattccatgtctttgctattgtgaatggtactgtgataaacatacaagtgcatgcgtcttcttggtagaatgatttatatccttagggtatatacccagtaatgggattgctgggtcaaatggtagttctgttttaagttctgaatctacaaggaatttaagcaaatcaacaagcagaaaacaaccccatttaaaaatgggcaaagggcataaacagacacttatcaaaagaagacatacacttggccaacaagcatatgcaagaatgctctacatcactaatcattagagaaatacaattcaaaaccacagtgaggtaccatctcacaccagtcagaatgactattattaaaaagtaaaaaaaataatggatgttggca

SEQ ID NO: 940638 - DNA, 668 bp, Homo sapiens
aatgactttgctgttttaagctgtggatctgttgagttattgaagagtgaaaattcactttatattttgttcttttctttcactatccctgattcctgggtgaagggagccatgtcagacaggacagcatggagcccagcgacctctgggatgatgtgtctaactgtcggtgtggggacaggctgaagaccctagagcagagggcgcggaagcagcaccagaggtgcctggcacattcactggtggggactccaaactacatcgcacccgaggtgctcctccgcaaaggtacatgcgccatggccagccaccccgcaggaggtctccttcccttcagaygtgagctgagtctcgctggctctagctttccaaggacctaatgcttccagtcatatttttgtcctcatagaagcctgaaagctactaatttctgcaacatacaagcctccctcctgtcctggaagtgctcttgcttcagggggttggaagacatgcaccattagaccagtgtctgctggccctcgggctctacctagacccaagggaatgactccagccctgattttcacagtcagatgatggaaaccactctgagggccacaggacctctgctcagtctgcccagaccacacatttccgggctctagctttaacttctgtctcaggct

SEQ ID NO: 940639 - DNA, 618 bp, Homo sapiens
acaacaccagctaatttttgtatttttagtagagatgtggcttcatcatgttggtcaggctggtttcaaactcctgacctcaagttatccacccacctcagcctcccaaaatgttgggattataggtgtgagccactgtgcctggcctcgggacttcttgtaagtggagtcatgcagtatctgtctttttgtgtctagtttatttcacttagcgtaatgtcctcagggttcatccattgttgtagcttcctttttaaggtggaataataattccactgtatgagtccctgcttccggttcttttggatataaaccagaaagtgggtttatatcccactggattatatggtcgttctgtgtttaactttttgaggaactcccaaactgtttgccatagtggctgcaccattttacattcccaccaacagtgrctgagtgttcagtttccctacatcctcaataagtattttcctgtttttgttttttttaagtagtagccaccctaggggatgtaaggtggtatctcattgtggttttgagttgtatttccctagtgtttaattatattgagcttattttcatgtccttattggtcatttgtatatctttggaaatatc

SEQ ID NO: 940640 - DNA, 579 bp, Homo sapiens
atggtggctcacgcctataatcccagcattttgggaggccaaggcgggtggatcacgaggtcaggagattgagatcgtcctggctaacacagtgaaaccccgtctctactaaaaatacaaaaaaaaaaaaaaaagccaggcgcggtggtgggcacctgtagtcgcaggtacttgggaggctgaggcaggagaatggcgtgaacccgggaggcggagcttgcagtgagccgagatcgcaccactgcactccagcctgggcgacagagggagactccctctcaaaaaaaaaaaaagtacccccattccagagagggttctgccccacacccagaaggaaggtacggygctcagagaggccaggaagaatctagatggacaagcctcgctgggtttccccactcagtctgttagcattaggtcatgccctttttgtccaatcaaatttctacatggctgtccatattttgttgaacctcaatacaaaaatggacaatttcccctttatctttgagtcttcattctgaaggctcccatgtgaaataaaattaagatacaataagactgtatgccttttcacct

SEQ ID NO: 940641 - DNA, 662 bp, Homo sapiens
gcataagacttgacatttgactgaagaataaatatgcatttatgcacatgaaaagatgctcaacatctttttaccattaggaaagtgcaaattaaaatcacaatgagataccactatatacccactagaatggctgtaatcaaaaagtattggtgaaaatgtgtagaagctggaaggaaccctcatacattgctgatagacatgtaaaatggtatagctactagctttgcaaaagcattttggcagtttcctacaaagttaaacatactcttagcctataacctagcaattttattcctgagtatctacctaagagaaatgaaaacatgttcacccatagatttgtrcacagttcatatctgtattattcataatagccaaaaaaatgaaaactatttaaacgtccattaacattttgtaaatgaatacacaactgtgttgtatccatgtgagaatactactgagcataaaaaggaataaactactgataatgcagccatgtagatgaacttcaaaaataccatgctcaatgaaagaagccagacccaaaagaccacatattatgttgttttatttatatgaaatttgtagaaatagcagaactagagaggcagaaagcagatttgtggttggctggggagttggagtgggagcagagattg

SEQ ID NO: 940642 - DNA, 470 bp, Homo sapiens
ttgtgggccttcctctccagatacctgatgtattactggagaagcaaatgcaacaaggcaaagatgtcttcattttctgtcaaagcacggcctcaactacagtgtgattgaggccctgaatctccgcagccagccggtcagaccccatcaacagctgcagcaagcagggctgaggaggggaatgggaggcgatgggcgccaacgrgggctgagcctgcagctctgtgagtgactggagcagagagagagaggccagggccggaggaaaccccagcagcaagggaaaaacagattgactctcagtgactcatttagctcctggattggacagatctctcccctgctggcaatttggctctgcatcaatagttcgaataccaggctgaatagcttaaaataattagggggaaaaaatctgcaaaactgctagccatccaattctttactctgtgctgaaagacacaggacaa

SEQ ID NO: 940643 - DNA, 718 bp, Homo sapiens
aagtttatagtgctaaatgcccacatccaaagttagaaatatctcaaattaacaacctaacatcacagatagagtaaaaaacaaagcaagccaaatccaaaactagcagtataaaagaaataaccaaaattgaagctgaactgaaggaatttgacatgaaacaccatgcaaagatcaacaaatctaggaatttgttatttaagagaataaataagatggatagacaactagatakactaaaaaataaaaaaaggaaagaagatccaaataaacacaatcaatcagaaaaaaacaaaggggacattaccaccaaccccatggatatatgaaaaccactcagagactactactaacacctttatgtacacaaactagaaaacctagaagaaatgaatgaatttctggaaaaatacaaccttcccagattgaaccaagaacaaatttaatctgtgaccagactagtaacaagttccaaaattgaaacagtaacaacaagcctaccaaccagaaaaagcccaagaccaggcagattcatagttgaattctactagatgtataaagcagagttgatatcattcctactgaaactgctcccaaaaattgaggaagagggacttcttcataactcattctgtggggccagaatcattcttatacgaaaatctggcaaaaacataacaaagaaagaaaactttaggccaatatcttgatgaacata

SEQ ID NO: 940644 - DNA, 613 bp, Homo sapiens
ctcactttaaaaaactagaaatgattaagcttagtgaaaaaaggcatgttgcaaaccaagataggtcaaaagcttggcctcttgtgccacgttgtgaatgcaaaggaaaagttattgaagaaaattaaaagtactactccagtgaacacctaaataaagtgaaacagccttattactgatataaaaaacgttttagtggtctggaaagaagatcaaaccagccacagcattcctttaagccaaagcctaatatggagcaaggccctaactgtcttcagttctgtgaaggctgagagaggtgggaaagcagtagaagacaagttggaagctagcagaggttggttcatgaggctgaaggaaagaagctgtctccataacaaaagtgcaaggtgaagcagcaagtgctaayagagaagctacagcaagtcatctagaagatctattatagctaattttgttgatgaagtctatgctaaaatacagtttttcaatgaagacaaaatagcctcattttggaagaaaatgccatctagaactttcagagatagagagaagtcaatgcctggttttaaagcttcaaagacaggctgactctcttgttaggagctattgg

SEQ ID NO: 940645 - DNA, 610 bp, Homo sapiens
tgcagtggcgtgatgttggctcactgcaacctccacctcccaggctcaggtgatcctcctgcctcagcctctcaagtagctgggactacaggtgtacaacaccacacaaggttaatttttgtatttttagtagagaaagggttttgccatgttgtccaggctggtgttgaactcctgacctcaattggtcctcctgccttgacctcccaaagtgctgggattrcaggccaccatgcccgacattgttttatctttaatgtgaaatgaatagctttttgagatgagtgaaatatcaggataattgcttaaatgacttaacaacattttaccttatccagattattcttagcatgggtgctatctagtaaagacataatctattcttctaatatggaatataacagtgtgaaattccaaaggtaagccaaaattattattttttaagagaacagaatgcaatttctgtccttcttaataaaaataagagtacttttctatctcattatgataggttaggtgtgtaatgatatacactttggtctcaagacattacccagaatgatatcatgaagtatgggattctcattggctttccagaggaagatttaag

SEQ ID NO: 940646 - DNA, 610 bp, Homo sapiens
tgcagtggcgtgatgttggctcactgcaacctccacctcccaggctcaggtgatcctcctgcctcagcctctcaagtagctgggactacaggtgtacaacaccacacaaggttaatttttgtatttttagtagagaaagggttttgccatgttgtccaggctggtgttgaactcctgacctcaattggtcctcctgccttgacctcccaaagtgctgggattacaggccaccatgcccgacattrttttatctttaatgtgaaatgaatagctttttgagatgagtgaaatatcaggataattgcttaaatgacttaacaacattttaccttatccagattattcttagcatgggtgctatctagtaaagacataatctattcttctaatatggaatataacagtgtgaaattccaaaggtaagccaaaattattattttttaagagaacagaatgcaatttctgtccttcttaataaaaataagagtacttttctatctcattatgataggttaggtgtgtaatgatatacactttggtctcaagacattacccagaatgatatcatgaagtatgggattctcattggctttccagaggaagatttaag

SEQ ID NO: 940647 - DNA, 721 bp, Homo sapiens
gagtgcagtggtgcgaacttggctctccgcaacctctgccttctgggttcaagcgattctcttgcctcagcctcctgagtagctgggattacaggtgcccgtcaccacgccaggctaatttttttgtatttttagtagaggcgaggttttgccatgttggccaggttgatcttgaactcctgacctcagatgatccacatgcctcggcctcccaaagtgctggggttagaggcattaagggaggagaccacccctcatattgtcttatgcccaatttctgcctccaaagaaagaaaaagtaaaaactgaaaggcagaaatgaaatccacaagcagacagcccggtgccacaccctgggcagatcgacccctgacctaatcggttatgttatcgattacagacattggatagaaaagcactgtgaaaatccctatcctgtwttgttcagatcgaattaccggtgcatgcagcccccagacacgtaccctctgcttgctcaatcgatcacgaccctctcacacgcacccccttagagttgtgagcccttaaaagggacaggaattgctcactcggggagcttggctcttgagacaggagtcttgccaatgcccccagccgaataaaccccttccttctttaactcggagtctgaggagttttgtctgcagctcatcctgctacatttcttggttccctgaccaggaagcgaggtgactggcac

SEQ ID NO: 940648 - DNA, 712 bp, Homo sapiens
aaggagaggtctgcaggaaatttaaccttactaattgctgcctacacatagataatcaagggtaagtagttgaagacatagttagagatatgacaaaactggcacatatgcccgtacaagtgtggcatagatttgatcctggggccatgtttggaaaatggttcccagcactaagaggatttaaaactcttataataagagttataatagtaataggaacctgcttactgctcccttgtttgctacctgtacttcttcaaatgataaaaagcttcatcactaccttagttcaccaaaatgcttcagcacaatgtactatgtgaatcactatcgatctgtcttgcaagaagacatgggaagtaaaaatgaaagtgagaactcccactattgagtgagattctcaaagggggggaataagggaggagaccaccgctcatattgtcttatgcccaatttctgcctccaaagaaagaaaaagtaaaaactaaaagacagaaatgaaatccacaagcaggcagcccggcrccacaccctgggcctggtagttaaaaatcgacccctgacctaattggttatgttatctatagattacagacattggatagaaaagcactgtgaaaatccctatcctgttttgttccgatgtaattaccggtgcatgcagcccccagacacgtaccccccacttgctcaatcaatcatgcccctctca

SEQ ID NO: 940649 - DNA, 456 bp, Homo sapiens
caacaacatagtatgaccagtctctataaaacacatttaaacattcttcttgtagagatctttcacttccttggttagataaattgctaggttttttttttttttttttttgcagctactgtaaaaggaaatgagttgttgatttgatttataacttggttgttttcatgtataccagtgctattaatttgtgcagattgactttgtagactaagaccttagtgaattcatttatctaatctagtagtattttggatgagtactcagggttttctaggtgtaggattatattattrgcacacagtggtaggataaatttcacttttccaatttggatgccctttatttctttctcttgcctgattcctctggataggacttccagtgctatgtcaatagatgtggtgaaagtgagcatccttgtcttgtttcagttctcagggggaatgcttccag

SEQ ID NO: 940650 - DNA, 477 bp, Homo sapiens
aggagacattcaaaccataggattctgccccttctaccccccaaaactcatgcatttcttacatacaaaatacattcattcaattccaatatccccaaaactcttaacttgtttcagaagagtcttgtctaaatcagatatgaataaaactcacagcaccattcatcctgaggcaaatcccctccagccatagcctgtgaaatcaaaataacttatctacttccaaaatacaatggtggggacaggcacacaatagacactcccattccagattaaaaaaaaawtaggcaagaacaaaaggtgtaacttgtcctaaataagcctaaaatccaacaaggaaaacaacattaagtcttaaagctcaggaatcatttcctttgacttcatgtcttacgtcctggtcagactggaggcttaggcccctaaagcttcaggcagcccctaccctatggttttgttgggtaagtccacccagta

SEQ ID NO: 940651 - DNA, 652 bp, Homo sapiens
tttccttctcttgccatttttgttttgtttttgtttttgttttgttttgttttgttttgtttttttgagatggagtctcgctctgttgcccaggctggagttcagtggtggcgatcttggctcactgcaacctccacctcccaggctcaagcagttctcctgccttagcctcctgagtagctgggactacaggygagtgccaccatgcctggctaatttttttgtatttttagtaaggacagggtttccccatgttggccaggctagtcttgaacttcttacctcaggttgtatgcctgcctcagcctcccaaagtgctgggattacaggtgtgagccacaacacctggcctctcctgcggtcttttcccagttcccctggcagccctttccaaaaacccgtgtgagacaaagtcagaaatggcttccctggggaccaagaatgcgcatagggctcttcttgctgcgtcttctactcctgtatttcgctcagctctctaaatttgtctcagctccaggtaagtccaaatccttcccctgtgatctggaccttcaggttccccagtgggggtatgtatttggaggcagatgatcccccttttacacattcacactttgggcattcacagtttttccactgtatcccagggcag

SEQ ID NO: 940652 - DNA, 571 bp, Homo sapiens
tttggtcttttcacatagtcccatattttttagaggctttattcgtttctttttattcttttttctctaaacttctcttctcacttcatttcattcatgtggtcttcaatcattgataccctttcttccaattgatcgaatcatctactgaagcttgtgygtacgtcacatagttcttgtgccatggttttcagctccatctggtcatttaaggacttctctgcattggttattctagttagccattcatctaatctgttttcagtgtttttaacttctttgccatgggttcgaacttcctcctttagctggtagtagtttgatcatctgaagccttcttctctcaactcgtcaaagtccttctccatccagctttgttccattgctgttgaggagctgcgttcctttggagaaggagaggcgctctgatttttagaattttcagtttttctcttctgttttttccccatctttgtggttttatctacctttggtctttgatgatggagacatacagatggggttttgttgtggatgtcctttctgtttgttagttttccttttaacagtc

SEQ ID NO: 940653 - DNA, 571 bp, Homo sapiens
tttggtcttttcacatagtcccatattttttagaggctttattcgtttctttttattcttttttctctaaacttctcttctcacttcatttcattcatgtggtcttcaatcattgataccctttcttccaattgatcgaatcatctactgaagcttgtgcgtacgtcacatagttcttgtgccatggttttcagctccatctggtcatttaaggacttctctgcattggttattctagttagccattcatctaatctgttttcagtgtttttaacttctttgccatgggttcgaacttcctcctttagctsgtagtagtttgatcatctgaagccttcttctctcaactcgtcaaagtccttctccatccagctttgttccattgctgttgaggagctgcgttcctttggagaaggagaggcgctctgatttttagaattttcagtttttctcttctgttttttccccatctttgtggttttatctacctttggtctttgatgatggagacatacagatggggttttgttgtggatgtcctttctgtttgttagttttccttttaacagtc

SEQ ID NO: 940654 - DNA, 689 bp, Homo sapiens
tagatatgctctcctaacagtggaacgcggtttgatcccttctcctcacatacacagtcataaatgagtcgtcagagttaccccaaagggaaatggtaacatctccctacagagaaaactagcacagaacttatgggmctcattgaacagttacgtgggttggttggacagaaaaatgttggttcaattttcaaatactaaggagagcttatttcaggagtcccttttcttactttgttgaggggaggcatcagagcacatgctgggaggataggccaggaagcaggcagtggtaacgtgggacatcgtgcacgtggtggagcatgccgccatctctcccttcaccctggcagagctctccgttgaacggggaggtgaacttggacatggacaacaaccagcctgtgtcaagggggtttccttaccaggactcctttctagtttcctttcacctacaatgtggtcatggggcaaaaaccccagagaccacatatgtattggtggaaagagaaagaacaggactgtggagccaaagctacctcactagcttttgtgaaagtcaggctggaaagtgcttccagccacagaaataggctgtgggtgtaaatattaaccttggccatcaaataagtaggcatagagtgtgactcgccctctcttggtcttccctgaaacagcagggtcaagaa

SEQ ID NO: 940655 - DNA, 634 bp, Homo sapiens
caaataatcctcccagtcaacacagattaaaattgaaacccctggcaagcagagggcttttgtattgaaggaggaaaactcaccatcccacaaaaggttggcatgaaattaaggtgacaagggaaaaaagggccatgagctactggccaaataattcagcttaatctccaggaaatgattgtcatagccttaggaaggtacatgtgcagatttggagaaccctggctgaaagagccaggcggcctcggaaacaaattcacattgcatgcgacatgcccaagggcagcgggctctggcttcaatcatgactatattayaggaatggaaatgacaaatgggtttgggagtggcagacatctaacgatgattacagagaacaggaaccgcagaattaggatgcacccacagtcacttttttttttttttttttttttttttcagagacaggatcttgttctgtcgcccagcgtggagtagcataatcatagctcactgcagccttgaactcctatgctcaagtgatcctcctgcctcagcatcccaaaatgctgggattacaagcgtgcaccactatgcctggctaatttattttatttcattttttgtagagattgagtctcgttttgttgccccg

SEQ ID NO: 940656 - DNA, 805 bp, Homo sapiens
cagtgggtctcaatccacgtggtgctgtgaaagtggggcccgaagaatgatgccagttggcccctgactcagcccccttcctagggacatgcatggatggatctcccaccttgccatggatgccggggccagagtatgcaaaactcctgggtctctgtgtgtggctgagccactccctgagtggctgctctgctgagattccacacagctctctgtattggacccaaatccctggtggtgtgggctcatgaggggatctcctgataygtgagttgcaaagatccatgggagaagcatggtttcccaggcagggctgcacaatcactcactgctttccttggctgggggttggggttcccttggctccgtgcagctcctggatgggccactgccccatcctgcttctctttgctgtctgtgggttgagctgtttgcctggtcagtcccaatgtgagaactcagatatctcagttgaagttgctgaattcacttgctcctttcattcctttctctgagcaccacggactggagctgcttccaatcgacccaatggtgtcttttaaaaacttacattttcttgctactgggggctggtattctttgcttgtattttatggctcttttcactactagatcaccttaaatgtttctcatcttctctattccagatatatatgttctttcttagactgttcagcagtagacccttgacttacaaccagaaatatgaagaattattgccacaaatggcttataatactatgaaaagatgctcaacttgacttgtagagtaatgtagattaca

SEQ ID NO: 940657 - DNA, 722 bp, Homo sapiens
tttaaagcctataaactctccttaccattaccccattttacctgtcctaaaaccagacaaggtttacaagttagttcagaatctgcgccttatcaaccaaattgttttgcctatccaccctgtggtgccaaatccatatactctcctatcctcagtacctccctctacwacccattattctgttctggatctcaaacatgctttctttactattcctttgcacccttcctcccagcctctctttgctttcacttagactgaccctgacacccattaggctcagcaaattacctgggctgtattgcggcaaggcttcacagacagcccccattacttcagtcaagtccaaatttcatcctcatctgttacctatcctggcataattctcataaaaacacacgtgctctccctgctgatcatgtccgattaatctcccaaacctcaatcccttacaaaacaacaactcttttccttcctaggcatagttagtgcactcagaattcttacacaagagccaggaccgcaccctgtagcctttctgtccaaacaacttgaccttactgttttagcctagccctcatgtctgcgtgcagcagctgccactgctttaatactttcagaggccctaaaaatcacaatctatgctcaactcatgctctacatttcgcataacttccaaaatctattttcttcctcatatctgacgcatatactttctgctc

SEQ ID NO: 940658 - DNA, 722 bp, Homo sapiens
tttaaagcctataaactctccttaccattaccccattttacctgtcctaaaaccagacaaggtttacaagttagttcagaatctgcgccttatcaaccaaattgttttgcctatccaccctgtggtgccaaatccatatactctcctatcctcagtacctccctctactacccattattctgttctggatctcaaacatgctttctttactattcctttgcacccttcctcccagcctctctttgctttcacttagactgaccctgacacccattaggctcagcaaattacctgggctgtattgcggcaaggcttcacagacagcccccattacttcagtcaagtccaaatttcatcctcatctgttacctatcctggcataattctcataaaaacacacgtgctctccctgctgatcatgtccgattaatctcccaaacctcaatcccttacaaaacaacaactcttttccttcctaggcatagttagtgcactcagaattcttacacaagagccaggaccgcaccctgtagcctttctgtccaaacaacttgaccttactgttttagcctagcsctcatgtctgcgtgcagcagctgccactgctttaatactttcagaggccctaaaaatcacaatctatgctcaactcatgctctacatttcgcataacttccaaaatctattttcttcctcatatctgacgcatatactttctgctc

SEQ ID NO: 940659 - DNA, 593 bp, Homo sapiens
ttatttgtcactttgtatcctatttgctgaattcatttattagttctaacaactgtgtgaaatctttaggaatataatatctggtcatctgcagagataattttacttcttcctttcttatttgaatgccccttttttttcttgcctaggttctctgaatatatcttctagtactatgttcattagaattggtgaaagtggacatccttgtcttgttcccaatcctagagaaaaacttttagtctttcaccattgaatatgatgtttgctggggtttttttcatatgtggcttttgttattttgaggtaatttccttctattcrtagtttgttaagtgttattaccatgaatcggttttgaattttgttaaatgccttttctgcatccattgagatgattatatgttttttccttcattctgttaatgtaatgtattacattgattgatattcatatgttgaaccatccttgccttccaagaattcattctacttggccatagtgtataatctttttagtatgctgctgaatttggtttgttagtaatttttttagtatttttgcatcaatgtgcataagagctactggtctg

SEQ ID NO: 940660 - DNA, 602 bp, Homo sapiens
aaataacaaggagctgaatgttattgctcaagacaatgggaaaaatgtcttcaggccatgtcagaggtcttcacggcagcccctcccatcacaggcccagaggcctatgagaaaaaaatggttttgtggtctgggcccagggccttgctgctttgtacagtctagggacttgatgccctgcatcccagctatggctacagggggtccaatttacagctcaggccattccttcagagggtgcaagccccaagccttggtggcttacacatattgttaggcctttcggtgcacagaagtcaagaactgaggtttgggaatcgttgcctagayttcagaggatgtatataaatgcctggatgtccaggcagaggtgtgcggcaggggtggagccctcatggataacctctgctagggcagtgcagaaaggaaatgtgcagtgggagcccccacacagagtccccactggggcactgccttgtggagctgtgagaagagggccaccatcctccagatgccagaatggtagatggaaaaaaacgcagattcaatgtcaacccatgaaaacagccaggagtggggctctacctggcaaagccacaggg

SEQ ID NO: 940661 - DNA, 655 bp, Homo sapiens
caactcaccagcattactattaaaatagaaatcacaatgagacatgcaacgtgctagcagcccttgctctcagtgcctcctaggcctctgcccggtgtccactctggctgtgcttgaggagcccttcagcctgctactgcactgtgggagcccttctctgggctggccgaggccgcagccagctccctctgcttgtagggaggtgtagagggagaggtgtgggccggaaccggagctgtgcagggcgcttgcgggcagcacgagttccaggtggtcgccggcttggtgggccctgcactcggagcggccagccrgcactgctggccttggacagtgaggggcttagcacccgggccaagagctgcggagggtgcactgggtcccccagcactgccgacctgccagtgccgtgctttaattctcgccaggcctcagctcagccgcctccccagggggcagggcttgggacctgcagctcgccatgcctgagctcccccgcccgccatgggctcccgcttgacccgagcctccctgacgggcactgccccctgctccgtggtgcctggtcccatcgaccgcccaagggctgaggagtaagggcacgtggggcgggactggtaggcagctcccctagctccccgtgcaggatccacta

SEQ ID NO: 940662 - DNA, 724 bp, Homo sapiens
aggtccctctaggcttcatataaaaggacaataaagaattgttctgaagggcaccagaaatctaaagtctgagggcgaggctgtgttgggaacctgaactcattggaatcaagagaagtgaatcagccataggttggcttgtttcactcactgatgatcttgctgaggtggctcatttgtattgactcaactaaccctgtgacccagatccagggtactttgagagtaatatgaaagtaaccctactgagattgacttcctgtgtgtttctgaatgaagatagttttgactcaaaaaggtcattataaaacagacatggcacttagggaggctgaggcagttggatcacgaggtcaggagatcgagaccacggtgaaaccccgtctctactaaaaatacaaaaaaaaattagccgggmgcggtggcgggcacctgtagtcccagctactcaggaggctgaggcaggagaatggcgtgaacccgggaggtggagcttgcagtgagccaagatcacgccactgcactccagcctgggcgacagagcaagactccgtctcaaataaataaataaataaataaataaataaataaacaaacaaacaaacaaacagacttgcaagaaaagttagctgccaaaacctgaagattttgattgcaattgggttgaggaggttttgctttcttggcgggcaagaagcgtcattctcatgttcttcccaattct

SEQ ID NO: 940663 - DNA, 652 bp, Homo sapiens
gtggctatctgatcaccgtgaggaatggtgccatatcaagggctcagtgttggtctctgctgctgggaaattgggcacttagcagtggctgtagccaggtcagccttggtgagtggaaatccatgttgctgagaccatgtgtaacttccatccctgccaccatggccactttgttcatgggcttattgggcgacgatgggtggcttggaaaagaggctgagtggtgtcctcagaacaggtcatcytatccactcaataattaaactcctcctctgctgaggtcacccgttggtgagcactcacatgggatacaaatgtcttcacagattttggccactcagagaggtccatccacatacctcttctccaaatttctttgtcaccaattttctaatcatgcttctttgaagtccctgaccatccagccaaaccattggctacagcccatgaatcattatataatcacacatctggccatttctacttccatgcagagtgcacaaccaagtgctctgctcgaagttctgcccactgggaagatttaccttcaccgctgtccttcagggatgtcctagaaaggggctgtagtgctgtggctgtccactttcaggtggtgcctgcatatcgtgcagaaccatctgtgaaccaggcc

SEQ ID NO: 940664 - DNA, 598 bp, Homo sapiens
gaactggacccacagacagtgagctggggaggcaagtaacctactgagacacaatttggggtggctaaggcagtgctggcatcatccctcctccaatcctgggcttcacagctcatggcttcaaaagagaccccttctttccacttgaagagagcagagagaagagtggggaggactttgtcttgcatcttggattttaactcagccacagcaggatagggcactagttagagttgtgaggccccattccaggccctarctcccagataacatttctagacataccctgggccagaagggaacctgcttccttgaaggaaagggcccagtgctggcagcattcatcacctgctaactgaagagcctttgagccctgaataaccagcagaaatacccaggtactacaccaagggtcctgggtgagcctctgagacttgatgtcttcagctgagattcagcacagctgtggtgcaaaacaccttctgctagagaagagtacagggaaaagtaaaggggacttggtgttgcaccttaggtatcagaatggccatgtgggagcagagcaccaaccgggttcttcgggttctcagttccagga

SEQ ID NO: 940665 - DNA, 615 bp, Homo sapiens
ttgcttattttaccgagaaaacacaggcaactagaggggaatttccatatgttcccatcacccccatctaactcctagctacatcagtgctcacacctctgctttctctgttaatgtggatgcagtctgtgatctagcagacccattcttattatgcagtagattccatcccttcccatcaactcaaagaaatttcccccagcaattcttccattctatattctgcatcaccaatattttttattttatttatttatttatttatttatttattactagatcaggaataattttgccatcccccttccacaagagacatttggcaatttctggagactcttgtggttatcacaacccaggaaagaagcagggcgcactactggcctctagtggacagaatgctaagaagctttctaaacatcttacaatgcagrggatggcccttcttaacaaagaattattctgcctaaaatgtcagtcccaaattgagaaaccctgtactaggccattcctataagcacataaacacacacacacaagtgctattatttctcccattttaaaaatcaccctcccgtgactccacatacccttccaatttcaatcctatttcct

SEQ ID NO: 940666 - DNA, 756 bp, Homo sapiens
agtgtttcacgtgagtctcgtaaggaagtatattagtctgttttcacactcactgctgataaagacatactcaagactgggcattttacaaaagaaggaggtttaattggacttatagttccatgtggctggggaagcctcacaatcatggtggaagacgaggagcaagtcacatcttatgtggatggcagcaggcagagagagagcttctgcagggaaactcccatttttaaaaccatcagatctcaccagactcattcactttcacaagaacagcacaggaaagacccgccccataattcaatcacatcccaccaggttcctcccatgacacatgggaactgtgggagttataattcaagatgacatttgggtggggacatagccaaaccatatcattctgcccccagccccgcccaaatctcatgtcctcacatttcaaaaccaatcatgccttcccaacagtcccccaaatcttaaytcatttcagcattaactcaaaagtccaaagtctcatctgagataaggcaattcccttccacttgtgagcctgtaaaatcaaaagcaagttagttacttcttgggtaaaatggggatacagatattgggtaaatacatccattccaaatgggagaaattggccaaaacataggggctacaggcctcatgcaagtccgaaatccagcagagcagtcaaatcttaaagctccaaaatgatctttgactccttttcttgcatccaggtcacgctgatgc

SEQ ID NO: 940667 - DNA, 685 bp, Homo sapiens
aacaaactgtaagaaaaagaaatttcccattttatattactcatattcgaccacatactaatttaccagggcctttaactaaaacaaatgaacaagctgacttgctagtatcatctgcattcctggaggcacaggaacttcatgccttgactcatgtaaatgcaacatgattaaaaataaatttgatatcacatggaaacaggcaaaaaatattgtacaacaytgcacccagtgtcaagttctacacctgcccactcaggaggcaggagttaatcccagaggtctgtgtcctaatgcattatagcaaatggaatcacacatgtaccttcatttggaaaattgtcatttgtccatgtgacagttgatacttattcacattttttatgggccacctgccagacaggagaaagtacttcccatgttaaaagacatttattatcttgttttgctgtcatgggaattccagaaaaaattaaaacggataatgggccaggatactgtagtagaacatttcaaaaattcttaaatcagtggaaaattacacatacaacaggaatcccctataattctcaaggacaggccataattgaaagaactagtagaacactcaaagctcaattggttaaccaaaaaaggaaaaagacagtgaggactacaacccttcccagatgcaacttaatctagc

SEQ ID NO: 940668 - DNA, 632 bp, Homo sapiens
tccatgtgacagttgatacttattcacattttttatgggccacctgccagacaggagaaagtacttcccatgttaaaagacatttattatcttgttttgctgtcatgggaattccagaaaaaattaaaacggataatgggccaggatactgtagtagaacatttcaaaaattcttaaatcagtggaaaattacacatacaacaggaatcccctataattctcaaggacaggccataattgaaagaactagtagaacactcaaagctcaattggttaaccaaaaaaggaaaaagacagtgaggactacaacccttcccagatgcaacttaatctagcactctatactttaaattttttaaacatttatagaaatcagaccactacttccgcagaacaacattttactggtaaaaagaacagcccrcatgaaggaaaactgatttggtggaaagacaacaaaaataagacttgggaaataggaaagatgataacatgggggagaggctttgcttgtgtttcaccaggagaaaatcagcttcctgtttggatacccactagacatttaaagttctacaatgaacccatcagagatgcaaagaaaagtgcctccgcagagacagaaaacctgcaat

SEQ ID NO: 940669 - DNA, 628 bp, Homo sapiens
ccccacctccaacattgggaatcacatttcaacatgagatctggagagaacaaacatctaaaccatatcattccacacctggtccctgagatctcatgtccttctcacattgcaaaatacaatattcccttcttagtagtcctccaaagtcttaccttgttctagcagtaactcaaactctaaagtccaaagtctcatctaagactcaaggccgtgtttcttccacctatgagtctgtaaaatcaaacaagttgtttactcccaagacacaatggtggtacaggcattgrgtagatattcccattccaaaatggagacataggccacaataaaaggacaataggccccacaggagtccaaaacccagcagggtagacgttaaaccctaaagctccaaaataatccttggctccatgccttgcatcctggacacactggtgtgaggagtgggctccctagaccttgggtagctctgcctctgtggctttgcatggtgaagtccccatggtggctttcacgggtcggagttgggtgcctgtggcttttccagggttagtgttcaagcttccagtggctctaccattctcaggtctggagggtggcggctcccttcccataactctgccag

SEQ ID NO: 940670 - DNA, 557 bp, Homo sapiens
ggggaagaccaccttcccattccatcccccttctggctccccatccatttcactgagagctacctccaccactctataaaaccttgcacccatcctccaagcccacatgtgatccgatttttctgatacactagggcaagaacctgggatacagaaagccctctgcccttgtgataaggtagagggtctagttgagctgattaacacaagctgcctgcagacagctaagctgaaaagagcacactgtaacacaagcccactggggttttgggagctgtaaacaaccctagatactgcagtggggtcagagcccccaaacactccccatgacctgcctgtctgcatgctcccctctatgggtttgagcaggggagcactgaaaaagccagccacacccctgygagggggagaagagaacactctcatttcaacaggaggagctttttaggaggtttctgaaatacctttgaggcctttttcgacggtcttgggtatttgcacttggctccatttagttacacaaatctctccagcaagtgattgctctatagcttgct

SEQ ID NO: 940671 - DNA, 728 bp, Homo sapiens
attgctctatagcttgcttgaattcctctcctgaaaatgttttttttttcttctctaccacatggctaggctgcaaattttccaaactcttattttccaaacttctgtgtgtattctcgttaatgataaattccaaatttaagtaattcctttgttcctgtatcttgccgtaggtgtttagaatcagccagacttcctcttgaatgctttgttgcttagaaatttcttccgctaggggaacatcacacaccggggactgttgtggggtggkgggaggggggagggatagcattaggagatacacctaatgctaaatgacgagttaatgggtgcagcacaccaacatggcacatgtatacatatgtaacaaacctgcacgttgtgcaaatgtaccctaaaacttaaagtataataataataaaattaaaaaaaaatttcttccgctagataccctaggtaatcaattttaagttcaagctttcatagatccctagaacattgacacaatgcagccaaatttttgctaaggcatgacacaagtatcttttgctccagtttccaataacatcctaatttccatgtgagacctgctcagcctggacttcactgtccatatttctgtcagcattttggtcacaaccatttaaacagtctataagaagttccaactttacctcatcttcccatcttcttctgagcccttcaaactcttctgatctctgcctttt

SEQ ID NO: 940672 - DNA, 728 bp, Homo sapiens
attgctctatagcttgcttgaattcctctcctgaaaatgttttttttttcttctctaccacatggctaggctgcaaattttccaaactcttattttccaaacttctgtgtgtattctcgttaatgataaattccaaatttaagtaattcctttgttcctgtatcttgccgtaggtgtttagaatcagccagacttcctcttgaatgctttgttgcttagaaatttcttccgctaggggaacatcacacaccggggactgttgtggggtggggggaggggggagggatagcattaggagatacacctaatgctaaatgacgagttaatgggtgcagcacaccaacatggcacatgtatacatatgtaacaaacctgcacgttgtgcaaatgtaccctaaaacttaaagtataataataataaaattaaaaaaaaatttcttccrctagataccctaggtaatcaattttaagttcaagctttcatagatccctagaacattgacacaatgcagccaaatttttgctaaggcatgacacaagtatcttttgctccagtttccaataacatcctaatttccatgtgagacctgctcagcctggacttcactgtccatatttctgtcagcattttggtcacaaccatttaaacagtctataagaagttccaactttacctcatcttcccatcttcttctgagcccttcaaactcttctgatctctgcctttt

SEQ ID NO: 940673 - DNA, 728 bp, Homo sapiens
attgctctatagcttgcttgaattcctctcctgaaaatgttttttttttcttctctaccacatggctaggctgcaaattttccaaactcttattttccaaacttctgtgtgtattctcgttaatgataaattccaaatttaagtaattcctttgttcctgtatcttgccgtaggtgtttagaatcagccagacttcctcttgaatgctttgttgcttagaaatttcttccgctaggggaacatcacacaccggggactgttgtggggtggggggaggggggagggatagcattaggagatacacctaatgctaaatgacgagttaatgggtgcagcacaccaacatggcacatgtatacatatgtaacaaacctgcacgttgtgcaaatgtaccctaaaacttaaagtataataataataaaattaaaaaaaaatttcttccgctagataccctaggtaatcaattttaagttcaagctttcatagatccctagaacattgacacaatgcagccaaatttttgctaaggcatgacacaagtatcttttgctccagtttccaataacatcctaatttccaygtgagacctgctcagcctggacttcactgtccatatttctgtcagcattttggtcacaaccatttaaacagtctataagaagttccaactttacctcatcttcccatcttcttctgagcccttcaaactcttctgatctctgcctttt

SEQ ID NO: 940674 - DNA, 608 bp, Homo sapiens
caagagtatcctttatataagttttgaataccttattcctcatttccatctgagacatcagaaaagcctttactgcccatatttttaccaacattctgatcacagtcatttaaataatgcctcagaagacgtaggctctttctacagcttttttcttctgagatcttaccagaattgccataatacaccattcatggcaatctaggctttttctagcatgctcctccaaattcttccagcctctacccattactccattccaaagctgttccacatttttagaaattggttacagaacaccccacttctgrtacctgtttctgtcttcatttgttttgtgttgctataacagaataccaaaaactgagtaatttatgaacaatagaaatttatttctcaccattgtggagactgggaagtctaacatcaaggtgccagcatctggtgaggtccttcttgctacatcatcccctggcaaggcaagagaggtaaagagcaggggagcaaagggtcaaactcacagcctcaaaaccttttataattggcttcattccattcatgagagtagagccttgatgacataaacacctcccattagtagctacctc

SEQ ID NO: 940675 - DNA, 737 bp, Homo sapiens
tcctcctggtagttttgagtaattgcagcagcccagatgagtgggtttcccccagcgaagcacaccctctccaccaagggacaaagtgcttcattaaacaggtcctgttccctgtgccatgcaatgaggtgagaccctcaaaaaggggttgtcagacatcctatacaggagtgatactactggcatcaggttggtgccccttgaggtcagagatctcagaataaggagcaggaacttacctttgctgttctccagccttcttgagtgacatctgcaggcataggagtgaaccagaggaatatggcctgaagtgaaaccccagcaaactgcagcagccctacagaagagggacctgactattgaaagaaaaacaaacgaaaagcaacaacagcatcaacaacaaaaaaagtccccacaaaaaccccatccaagagtcagmagcctcaaagatcgaaactagacaaactcatggtgataagaaaaaaatcaacgaaaaaatgttgaaaacccaaaaggccaaagtgccccttcttcaaatgatcgcaacgcctctctagcaagggcacagaattggacagaggatgagatggaagaattgacagaagtaggcttcagaagatgagtaataaaaaaaacttctgctgagctaaaggatgatgatctaagccaatgcaaagaagctaagaacctttataaaaggttagaggagctaactagattaaccagtttaaagagga

SEQ ID NO: 940676 - DNA, 562 bp, Homo sapiens
gggaatatcacataccagggcctgtcagagcatgagggacaaggggagggagagcattaggaaaaatacctaatgtgtgtggggcttaaaacctagatgatgggttgataggtgcagcaaaccaccatggcacatgtatacctatgtaacaaacctgcacattctgcacatgtatcccagaacttaaagtaaaataaaaataaataaataaatgtctgtttgatgtttccaktgcttttcccttatgcatagttttccacaaaaatctctcttgccaactaaagccttacgagtcacaaggtttttcatgaatggcacactttccaaagggcctgagagatgctgcatctggaaaatccttcctcgaacctcaccttgaatactgccccctacacacagactctcctaacctgccctcttccaggtgtcatcaactaatggctccatcatccagaattggcagggcatgacctccaagactaggtcattaaaggcatggctgcttcctccccactgtctcttggattacctgcccttggtaatctcttggattacctgccct

SEQ ID NO: 940677 - DNA, 708 bp, Homo sapiens
aataaaaagttcgaaacaggccgggcgcggtggctcacgcctgtaatcccagcactttgggaggccgaggcgggtggatcatgaggtcaggagatcgagaccatcctggctaacaaggtgaaaccccgtctctactaaaaatacaaaaaattagccgggcgcggtggcgggcgcctgtggtcccagctactcgggaggctgaggcaggagaatggcgtgaacccrggaagcggagcttgcagtgagccgagactgcgccactgcagtccgcagtccggcctgggcgacagagcgagactccgtctcaaaaaaaaaaaaaaaaaaaaagttcgaaacagacaaacattttaaaaatcttaacaatttaaatcagtgaaaattcgagtgttttttcccttctaaatttttacttcatagggtagtgaatgcaacataaacaggtattcatgagtataatacattttacacactccaaatagtcacagagactcttgcattattttcccgtagacattcctattgtctgtctactgctatcaagtgtagggttagaaggcattttaacaaatcgatgactgatttaaaaaaaacaacaaccgaagacatctgtcattaagacaggtctctaatagtggatgcttgttattaagaatccaaaagattttcttaatgttctgtccagtaatttttgttgtcatggtctgtgtt

SEQ ID NO: 940678 - DNA, 708 bp, Homo sapiens
aataaaaagttcgaaacaggccgggcgcggtggctcacgcctgtaatcccagcactttgggaggccgaggcgggtggatcatgaggtcaggagatcgagaccatcctggctaacaaggtgaaaccccgtctctactaaaaatacaaaaaattagccgggcgcggtggcgggcgcctgtggtcccagctactcgggaggctgaggcaggagaatggcgtgaacccaggaagcggagcttgcagtgagccgagactgcgccactgcagtccgcagtcyggcctgggcgacagagcgagactccgtctcaaaaaaaaaaaaaaaaaaaaagttcgaaacagacaaacattttaaaaatcttaacaatttaaatcagtgaaaattcgagtgttttttcccttctaaatttttacttcatagggtagtgaatgcaacataaacaggtattcatgagtataatacattttacacactccaaatagtcacagagactcttgcattattttcccgtagacattcctattgtctgtctactgctatcaagtgtagggttagaaggcattttaacaaatcgatgactgatttaaaaaaaacaacaaccgaagacatctgtcattaagacaggtctctaatagtggatgcttgttattaagaatccaaaagattttcttaatgttctgtccagtaatttttgttgtcatggtctgtgtt

SEQ ID NO: 940679 - DNA, 708 bp, Homo sapiens
aataaaaagttcgaaacaggccgggcgcggtggctcacgcctgtaatcccagcactttgggaggccgaggcgggtggatcatgaggtcaggagatcgagaccatcctggctaacaaggtgaaaccccgtctctactaaaaatacaaaaaattagccgggcgcggtggcgggcgcctgtggtcccagctactcgggaggctgaggcaggagaatggcgtgaacccaggaagcggagcttgcagtgagccgagactgcgccactgcagtccgcagtccggcctgggcgacagagcgagactccgtctcaaaaaaaaaaaaaaaaaaaaagttcgaaacagacaaacattttaaaaatcttaacaatttaaatcaktgaaaattcgagtgttttttcccttctaaatttttacttcatagggtagtgaatgcaacataaacaggtattcatgagtataatacattttacacactccaaatagtcacagagactcttgcattattttcccgtagacattcctattgtctgtctactgctatcaagtgtagggttagaaggcattttaacaaatcgatgactgatttaaaaaaaacaacaaccgaagacatctgtcattaagacaggtctctaatagtggatgcttgttattaagaatccaaaagattttcttaatgttctgtccagtaatttttgttgtcatggtctgtgtt

SEQ ID NO: 940680 - DNA, 641 bp, Homo sapiens
gagctctttatatattccagaaactagtttttttgttgaatatgtgatttgcaaatattttcactgagtttttaggttgtctttttgccctttaatagggtcttttgcagaaaaagttttaaattttgatgaagtccaatttatcaagttttccttttatggatcatactgttggtattaagattaaaaatctcttcatttagctctaggtgttccatgaattttaaagatcttttatcaggtgtctttacagttgtataagaactctgcttaacctcagatcaaaaagatattctgttttttaaaaaagatttatagttttacaatttacatttaaatcccgtggtccattttgagcttttttaaaggtgtgtgtggttcttcttccccttcctcctcttttcttcttcttcatctacmtcttcttcatcttctttctcttcatctttgttttgtctttttttttttttgcccatggatgtccaattgctctagtattatttattgaaaagtctatcctttctccaatgtattgcttttgcacctttgtaaaaaatcaactatccatatttttgtgggtttatttctcagttctttattctgttccattgatctatgcatcaaactcttcactaccatta

SEQ ID NO: 940681 - DNA, 738 bp, Homo sapiens
aagagaccaaatcaacgacttggcatccctgaaatgactcattggcatctctgaaagggagggatataaaacaagcaacttggaaacatatttgaccatatcattcattaaaaaattccccaaccttcctagataggctgaaattctgtttccggaaatgcagagggccactgcaagatactatacaaaacgaccatccccaagacaaatagtcatcacatccttcaagatcgacatgaataaaataatagtaaaggtagctggagaggagatatagttcacctacaaagagaagcccatcaggctagctgcagaactttctgcagaaaccctacagccagaagagattgggggcatatatttagcattttagagaaaataaacttcaaccaaaaatgttatatctagccaaactaagcttcgtaagtgaaggagaaataagatctttttcagacaaggaaatgctaasaaaattcctaactaccagacctgccttacaagaggtccttaagagagtgcttggttttttgtccttgtgatagtttgctgagaatgatggttcccagcttcatccatgtccctacaaaggacatgaactcatcaatttttatggctgcatagtattccagcacaccaacacggcacatgtatacatatgtaacaaacctgcacattgtgcacatgtaccctagaccttaaagtataattaaaaaaaagagagtattaaatatggaaaga

SEQ ID NO: 940682 - DNA, 608 bp, Homo sapiens
cggatgctgagctgcaggcagtgacagcagcgggattaccgctagaatagtcccaaggtattctccatggatctgcctttctgcacatcttggactatcttttcaaggatattcaaataggaaatagccttgaaaactgcagataaatctctatctctggacgaagaagaagaggggaaaaatgggctggtcatcagcagccttatatataacatcatagtttcctaattttgggtttctctcttgaaatgcacccactgaatgtgcaggcacagtttggtcctcattccatctcccttgtagcttgtggaactggcaaaagattttgatctggcttttgctattattaatacattcccttgtctctgacccacaggtcttgtttttttgtagtgtgcakacacacacggcaaaaggctaggttgttaggttgcaagtagggtaaaagctgagacctttaacagtatgtcttaaaaagtgagtcatccatatctcctggacatgttgtttccagatgtgtagtatcccatcctggtttcctgaccctcccagaaactctaataccatctaatgtcttttttcttaaattagctttagtggattccatt

SEQ ID NO: 940683 - DNA, 608 bp, Homo sapiens
cggatgctgagctgcaggcagtgacagcagcgggattaccgctagaatagtcccaaggtattctccatggatctgcctttctgcacatcttggactatcttttcaaggatattcaaataggaaatagccttgaaaactgcagataaatctctatctctggacgaagaagaagaggggaaaaatgggctggtcatcagcagccttatatataacatcatagtttcctaattttgggtttctctcttgaaatgcacccactgaatgtgcaggcacagtttggtcctcattccatctcccttgtagcttgtggaactggcaaaagattttgatctggcttttgctattattaatacattcccttgtctctgacccacaggtcttgtttttttgtagtgtgcatacacacacggcaaaaggctaggttgttaggttgcaagtagggtaaaagctgagacctktaacagtatgtcttaaaaagtgagtcatccatatctcctggacatgttgtttccagatgtgtagtatcccatcctggtttcctgaccctcccagaaactctaataccatctaatgtcttttttcttaaattagctttagtggattccatt

SEQ ID NO: 940684 - DNA, 767 bp, Homo sapiens
gtggctattgcttgtagtctcagctactggggaggctgacgcaggaggatcgttcaagcccaggagttagaagctgagtgagccatgattgctccattgcactccggcctgggcatcagaacaggaccccatctctttaaaaaaaaaaatgggaatgacaataattatatctgcctcatagtgttattgtgaggaytggttaatacaggtaaaggatttagaaaggggcctggcatatagtaagcagtaattttattaattcatttaccttaagccctgtcccaacactccttttttaatatgaaaatactcaggccagcactatggctcacacctgtaatcctaatactttgggaggccgaggcaggaggagtgcttgaggccgggagtttgagaccagtctgggtaatagaacaagactcctgtctctacaaaaataaaaaaattagccaggtgtggtggcatgcacctgtagtcccagctactcagaaggctgaggtgggaggatcacctgagcctgggaggtagaggctgtactgagctgattgtgccactgaactccagcctgggtgacagagtgaggccctgtctctaaaaaaaagaaaagaaaagaaaatactcctggtacaggtaacactcataagtcacgtgtatagtactctccaattgacaaaacatgatctcatttattacctatagcatagtgagggagttatttctgcatttaccgaggaagaaagagaagctcagcgacactgaggagcttc

SEQ ID NO: 940685 - DNA, 556 bp, Homo sapiens
gcactttgggagggcgaggcgggcggatcacctgaggttgggagcttgagaccagcctgaccaaatgtagaaaccccggtctctactaaaaatacacaattagcagggcgtggtgggcgcatgccctgtaatcccagctaccttgggaggttgggcaggagaatcatttgaatctgggaggtggaggttgcggtgagctgagatcgcgccactgaactccaccctgggcaagagagtgagactctgtctcaaaaaaaaacgaaaaaatacaaaaagcattagctgggtgtggtggcgcatgcctgtaatcccagctactcgggaarctgaggcacaagaaccgcttgaacccaggaggttgcagtgagccgagatcgcaccacagcactccaccctgggcaacagaatgagactgtgtctcaaaaagaaagataaagcggttggagataatgatagtacttccagcacagagttgtgagagtgaaataccataatccaggaaatgtgtttagagcacagctctcaataaatgttacgtgggccgggcgtggtggct

SEQ ID NO: 940686 - DNA, 639 bp, Homo sapiens
gcagcactattcacaatatccaagctatgaaaccaatctaagtgtccatcaatgaatggataaaggaaatgtggtttatatacaaaatgcaatactattcagtcataaaaagaaggaaaccctgtcatttgtgacaacatgcatgaacctggaggacattatgctaagcaaagtgaaccagacacagaaagacaaataccacatgatctcactaatgtggaatttttgaaaaagttgatatcatggaagcagagagtagaacagtgcttaccagagacttgagaaaggagcggagaagggaggatggggagaggttggtcaatgggtacaaagtgacaattagattggaggaataagttctggtgttttattgcatcgtggggtgatgacggttaacggtaagttattgtatgttactaaatagctggaagagagtcttctgagtattctcaccacaaagaaatgayaaacgcctgaggtgacgaatatgccaaacatcctgattgggtcatgcattgaaacatcaaattgtatcccataaatatgagtagttacaagatgtcatgaggtggtgtatttgttaattagctacgtttaaccattgcacaatatatattcttcaaaacatcatgttgcatg

SEQ ID NO: 940687 - DNA, 572 bp, Homo sapiens
tggtggtacacgtctgtaatcccagctactcgggaggctgaagcaggagaaccacttgaacttgggagacagaggttgtagtgagccgagatcgctccactgcactccagcctgggcaacagagtgagactgtctcaaaaaagaaaaaaaaaatacgttacttagggctggatatrtaagtaccttaaacagagttggagcactgttagtcaggatattgggcatgaaattaagagatgacacccagaagttcaatgtgtatttgttgattgaatgaacacaaattattccaaaattgtcaatacctctagacaatgaaaacttcctttcttcctgtcttcctctttttgctcaatgtaacaaatgtaagattaatactcacatacacacacacacacacggctggtcaagatggactgatttatactcctacttgaaacaactaaaaaccttgaaaaatgtataaaacaatggctctaaagacattggacattagatactgaaggacagtgatcctagagagatgggaaaaaaatgagtgagccctacaattgccccaccctactgcctgg

SEQ ID NO: 940688 - DNA, 572 bp, Homo sapiens
tggtggtacacgtctgtaatcccagctactcgggaggctgaagcaggagaaccacttgaacttgggagacagaggttgtagtgagccgagatcgctccactgcactccagcctgggcaacagagtgagactgtctcaaaaaagaaaaaaaaaatacgttacttagggctggatatataagtaccttaaacagagttggagcactgttagtcaggatattgggcatgaaattaagagatgacacccagaagttcaatrtgtatttgttgattgaatgaacacaaattattccaaaattgtcaatacctctagacaatgaaaacttcctttcttcctgtcttcctctttttgctcaatgtaacaaatgtaagattaatactcacatacacacacacacacacggctggtcaagatggactgatttatactcctacttgaaacaactaaaaaccttgaaaaatgtataaaacaatggctctaaagacattggacattagatactgaaggacagtgatcctagagagatgggaaaaaaatgagtgagccctacaattgccccaccctactgcctgg

SEQ ID NO: 940689 - DNA, 572 bp, Homo sapiens
tggtggtacacgtctgtaatcccagctactcgggaggctgaagcaggagaaccacttgaacttgggagacagaggttgtagtgagccgagatcgctccactgcactccagcctgggcaacagagtgagactgtctcaaaaaagaaaaaaaaaatacgttacttagggctggatatataagtaccttaaacagagttggagcactgttagtcaggatattgggcatgaaattaagagatgacacccagaagttcaatgtgtatttgttgattgaatgaacacaaattattccaaaattgtcaatacctctagacaatgaaaacttcctttcttcctgtcttcctctttttgctcaatgtaacaaatgtaagattaatacwcacatacacacacacacacacggctggtcaagatggactgatttatactcctacttgaaacaactaaaaaccttgaaaaatgtataaaacaatggctctaaagacattggacattagatactgaaggacagtgatcctagagagatgggaaaaaaatgagtgagccctacaattgccccaccctactgcctgg

SEQ ID NO: 940690 - DNA, 612 bp, Homo sapiens
aagaagatctaaataaaaggagagatataatgtgttcatggatagcaagactcaatattacaaagtatcattcctttccaaattgatctgtagattcaatgcaattccaatcaaaatcccagcagtcttttttggtggaaatgtataagctgattctaaaattaacatagaagtgcaaaggacttgtaatagctaaaaccagtttgtaaaagaagaataaagttggatttacactacttgactttaagacttagaaactggcattaatcaagacagtgtgaaattggcatcaagaaagaaaaacagaacaatgaaacataatacagtacagaaatagaccttctcatatatggccgattgatttttgacagtggtgcaaaggcaattcactggagaaagggtagtttctgttttaacaaacagtgcatgaacatttgtttatccatatacagaaaaatgaacyttttatctatacttggcaccatataaaaataaactcaaaagcgatcatagacctaaaactataaaactttaaaaataaaacacaggggaaaatattgtgatcttgtttctgttctcttttttttgagtcagagtctcactctgccaccg

SEQ ID NO: 940691 - DNA, 451 bp, Homo sapiens
tgactgcacttttgagaagaaagtgaaaacaaagtagtttgagactatcagtcaactcttttttcatttttgattagggccaatagatttgtgagggtaaaggaaacaccgtgaagattttagtgacactgtgggttacatctatcaatgagtcacattctctgccctgtattatttcaaatgattcatatttacttttcagtcatgaagtttgttttttctaacttaatataggatgtgtmcagtgacctacaagagcatccaaatttagtaatctgtagtttgcctaaaatgtgcatatcattgatacataaattcctaggcagtggctgcctcttaagctagaaatgttctgcttattcatgatgagagggtttgttaaattcaggaaattgaggaggaagttccatgagaacattatcatagtttaccagtctagtggtttccttaa

SEQ ID NO: 940692 - DNA, 799 bp, Homo sapiens
tatagaaatgattgacacaagcttgtctaaatattttttctactcatactctgagcaagttcagcataaatacaggaggagtcctcttctatgacagctgccccaacacaaccacagaggtagcataaatcaagccatagcctgcataatgtaatttgcaaagaacaatgctatacagtacaagtcttacaaggcttctcctatgggtgtgaagatcatcccttgttatggactgactgtgttagtccccccaaattcatatattgaaayctaatgcccagtgtgatggtttttgaaggaggggtttttggagggtaattaggtcatgaggatggagccctcccgaatgggattagtgccctcataaggaaaggccaatgagctagctcaccttcttttcacagtgcgaggatatataagaaagtcagcagtctgcatggaaaactgggcatggatcgtacccagctggtatccttatcttcaactcccagcctccagaactgtgagaaataaatggttgtggtttaagccacctagtcaatggtactttgttagagcagcctgaactaagacatctcccgttttcaaaataaaaaagaattccattaccctttcttcatttattctaggaactaaggcacatattcatcagctcatgaccatgaatttaaacaagatctttttggtttaggatgagtcttccagggctgccataacaaataccacaaattgagtggcttaaataatgaaaatatatataatgaatatattctagaggctggaaactggatagtcaggt

SEQ ID NO: 940693 - DNA, 799 bp, Homo sapiens
tatagaaatgattgacacaagcttgtctaaatattttttctactcatactctgagcaagttcagcataaatacaggaggagtcctcttctatgacagctgccccaacacaaccacagaggtagcataaatcaagccatagcctgcataatgtaatttgcaaagaacaatgctatacagtacaagtcttacaaggcttctcctatgggtgtgaagatcatcccttgttatggactgactgtgttagtccccccaaattcatatattgaaatctaatgcccagtgtgatggtttttgaaggaggggtttttggagggtaattaggtcatgaggatggagccctcccraatgggattagtgccctcataaggaaaggccaatgagctagctcaccttcttttcacagtgcgaggatatataagaaagtcagcagtctgcatggaaaactgggcatggatcgtacccagctggtatccttatcttcaactcccagcctccagaactgtgagaaataaatggttgtggtttaagccacctagtcaatggtactttgttagagcagcctgaactaagacatctcccgttttcaaaataaaaaagaattccattaccctttcttcatttattctaggaactaaggcacatattcatcagctcatgaccatgaatttaaacaagatctttttggtttaggatgagtcttccagggctgccataacaaataccacaaattgagtggcttaaataatgaaaatatatataatgaatatattctagaggctggaaactggatagtcaggt

SEQ ID NO: 940694 - DNA, 799 bp, Homo sapiens
tatagaaatgattgacacaagcttgtctaaatattttttctactcatactctgagcaagttcagcataaatacaggaggagtcctcttctatgacagctgccccaacacaaccacagaggtagcataaatcaagccatagcctgcataatgtaatttgcaaagaacaatgctatacagtacaagtcttacaaggcttctcctatgggtgtgaagatcatcccttgttatggactgactgtgttagtccccccaaattcatatattgaaatctaatgcccagtgtgatggtttttgaaggaggggtttttggagggtaattaggtcatgaggatggagccctcccgaatgggattagtgccctcataaggaaaggccaatgagctagctcaccttcttttcacagtgcgaggatatataagaaagtcagcagtctgcatggaaaactgggcatggatcgtacccagctggtatcyttatcttcaactcccagcctccagaactgtgagaaataaatggttgtggtttaagccacctagtcaatggtactttgttagagcagcctgaactaagacatctcccgttttcaaaataaaaaagaattccattaccctttcttcatttattctaggaactaaggcacatattcatcagctcatgaccatgaatttaaacaagatctttttggtttaggatgagtcttccagggctgccataacaaataccacaaattgagtggcttaaataatgaaaatatatataatgaatatattctagaggctggaaactggatagtcaggt

SEQ ID NO: 940695 - DNA, 767 bp, Homo sapiens
cggaggggctcctcacttctcagacggggtggttgccaggcagagggtctcctcacttctcagacggggcggccgggcagagatgctcctcacctcccagacggggtctcggccgggcagaggcgctcctcacatcccagatggggcggcggggcagaggcgctccccacatctcagatgatgggcggccgggcagagacgctcctcacttcctagatgtgatggcggctgggaagaggcgctcctcacttcctagatgggatggcggccgggcggagacgctcctcactttccagactgggcagccaggcagaggggctcctcacatcccagacgatgggcggccaggcagagacactcctcacttcccagacggggtggcggccgggcagaggctgcaatctcggcactttgggaggccaaggcaggcggctgctccttgccctcgggccccgcggggcccgtccgctcctccagccgctgcctcccgggcggcgcttgccggcgcggcrgcaaagacttcacatccctgttaaaggcatcccatttttatttcttttgtaaagagtggaaacttttggcaggagaattatcaaccacgtgactcctttaggtgtaatatttgcttaagatgtgatatacaccaatgaatggtaagaagccttctacataggaaaatttagtcaataaatgtttatatgggcacctaatatttgtaaggatattatgtttggtttgtaaagtataaaagaacaaataagacattt

SEQ ID NO: 940696 - DNA, 602 bp, Homo sapiens
tatgaatacatgctgctctagtccttcaacaagcccattatacattttcaccatgtcatctataggcacttttgcttcagtgttatcatcatcttcatcatcactattatcactgtcaccctgattcaaaaccattttggctatttcaccattgttcaataaatgaacacctggagcctcattatggatgttgaaaatcttcaatatccacttctcccagcttactaacggactctgaasgtatagtttttgcatctgtaaggaggtcataccatcatttttcttcctcacttaacataaataattatcttgctcatcatcatcacttaacatagttgcaggacagagcgtgttccaggtatgcacaactgtgtctttagtcattgtgttccaagtatgggcaaccacatacatgacatcttcatgctaagcttcttttgaaagccttctatcatccacgcctctgttcactgctgctagcatgcttctcaagaaggtgtttttacatttatttctcattgatctaagaataccctggtcacatgactgaattaataaagtaacatttggggtaaagtacatggcataaacattttttatga

SEQ ID NO: 940697 - DNA, 584 bp, Homo sapiens
ttctgcatctattaagatgaacaaataatatttcttcttaagtttgttaacatggccatttatatcacttgttttttaatgttgaattagccttgcactcttggaacaaacctcactggttgtgatgtattcttcttatatattgctgaattacatttggcattattttgttgaggatttttgtgtctatgctcatgagagatactggtctgtagttttcttwacttgtaatatctttgtctggtcttggtgtaagtgtaatgctggcctcataaaatgagttggaatgtgttctctcatcttctatttttttctggaagaggctgtgtagaatgggaattatgccttccttaaatgtttggtaggattaaccaatgaaaccatttggtcctggagttttctttgttggaaggtgtttaactgtgaattcaatctctttaatagatataggactattcaggttagtggttcatatctgtaatcccagtgacttgggatgctgaggcagaaggatcagcccaggagtttgaaaccagcctgggaaatatagtgagaccctgtctccacataaacaaaacaaaaca

SEQ ID NO: 940698 - DNA, 589 bp, Homo sapiens
tgttatggaggtcagcccatgctcctaggaaggtgaaggcattcaaaaaactagcagagaaactggtgggggtggagattctgcctgcattcttgacacagtcctgggaggatcagggtcttggtgatcatgtagacctagtttttaaatcctggtgcagccatttacaacttaaatggctttgagtaactggcaaytctcagtggggatgctaatacctactgcattagtaagggttctctagagagacgaactaataggatagatgtatatatgaaagggagtttgttaaggagaaatgactcacacaatcacaaggtagagtcccgcaataggtcgtctgcaagttgaggagcaaggaagccactggtggatgagtccgagtcccaaagcctcaaagataggaaagccgacagtacagcctttattctgtggccaaaggcctaaagagccctggcaaaccactggtccaagagttcaaaagttgaagaacttaaagtctaatgtttgagggcaggaagcatccagcatgggagaaagatgaaagcaggaacactcagaaagtctgctcttccatcttctgcctgct

SEQ ID NO: 940699 - DNA, 589 bp, Homo sapiens
tgttatggaggtcagcccatgctcctaggaaggtgaaggcattcaaaaaactagcagagaaactggtgggggtggagattctgcctgcattcttgacacagtcctgggaggatcagggtcttggtgatcatgtagacctagtttttaaatcctggtgcagccatttacaacttaaatggctttgagtaactggcaactctcagtggggatgctaatacctactgcattagtaagggttctctagagagacgaactaataggatagatgtatatatgaaagggagtttgttaaggagaaatgactcacacaatcacraggtagagtcccgcaataggtcgtctgcaagttgaggagcaaggaagccactggtggatgagtccgagtcccaaagcctcaaagataggaaagccgacagtacagcctttattctgtggccaaaggcctaaagagccctggcaaaccactggtccaagagttcaaaagttgaagaacttaaagtctaatgtttgagggcaggaagcatccagcatgggagaaagatgaaagcaggaacactcagaaagtctgctcttccatcttctgcctgct

SEQ ID NO: 940700 - DNA, 611 bp, Homo sapiens
gaactgttaagatggagaacattggtgacctttatacaattggtttcaatggcatgaagagcatgagaacagcaaggatagaagtggagacagcttgtgcggacagttttcagaaggtttagccaggaagagagacttgaggcagactcagtgagaggacaaaaaaacgaaggagacttttgttttgctttgttttgtctgaggaaggaagatacttgagcatatttaaacatcaatagcattatccatagtagagggagagattgatggtgcaggaaacaggaagaaaatctaaagaaatgcagcccttaagaatgtctgaggagatagggacagagctcctctgaagggactaattttgacaggacgacagagactccctctcacatgacaggaaagaaggaggagaaggctggagcacatgcagatggaacgtgggtttaggggcgagaagaagrtaaaatcctcatctggtggctttgattttctctgtaaaatattaggtgaggctggggaagagttgcatcaaccgtttgaggagagccaatgaatgtaattagtcatccaggatcatggaaaaacgagccggccagtgaatcatatcagggttg

SEQ ID NO: 940701 - DNA, 706 bp, Homo sapiens
agaatatttcaacagcctcgttcttcctatctgaagtgcatgcactctgaccgatgggccacatttggcctgccactagttttggtaaataaagttttttcggaacatagccatgcccattcatttacgtattgtctttggctgctgtcacactacaaaggcagggttgagtagttgtgactaagactcatatggcctgcaaagctgaaaatatttactctctggctagarttaccatatttagcaaatgaaaatatagaatgcctgattaaatttgaatttcagataaacaatgaataatatcgcatgggtcatacagacactaaaaacttatttgttgtttatctgagcatttacagtcatttattatttgcagattctatatttgcatatttgcctaatgctgaaatttatttgtattccctaaatcaatactcccagtgcttttgtggtcattcacagacatgcagagagcagcaaaaaattgagttgcccagtgcatatgttttcagcaggggctggacaaggtgatgctttaccttcttgttctagctctcctactataaacaactgttctttcctagtctacgtagcatcacagttttttttttgtatttttgtgctttttgttggtgattttgctgtttaaaatagccaccaaacatagtgctgaagccctgcctagcattcctaagccagagaaggc

SEQ ID NO: 940702 - DNA, 600 bp, Homo sapiens
gaagggaggaagaggattatattactttccatatcacaggggttgtacaccttcccagtgattttttttcctaatatccaggggcataaaggattatattactcttaatattgcaggaggtgtacactcgctctatgatatttttcctaatatacagggggcgcgaggacaatattgctccaaatatcgaagtgttgtacacccttcctttgatatttttcctaatatttaggtggagagataatattacttccagtatcccagggtgtgtacacccaccctttgttatttttcctaatgccyagtggtggataggatgatattaatctcaatatcacaaggtgcggggggaaggaacctcctctgtgatattattcttaatatttaggttgggagaaaatgatattcctctcaatatcgcagggaaagtacaccaccccaggagatattgtttctaatatcgaggggtggagaggatattattttcactataatagagggtgtacacccccacctgtgatattgtatctaatatcaaggagggaagagatattactctcaatatcgcagcaggtgtacagctttcctgtgatattgttt

SEQ ID NO: 940703 - DNA, 625 bp, Homo sapiens
cgtgtttgaataccctttatttctttctcttgcctgattgacatggccagaacttccaatactatgttgaataggagtggtgagagagggcatactggtcttgagagaactccaatattaagaagtgaaagagagaacaattaaagtagtttgaaaataaatagccagtgagacaaagagaaagcaaacaagagagtgtaacaccctgaaagtcaaaaggagaaagtgtgtaaggagaaggaaatgatctaaagtatcatatacttatcatgaytcaagtaacatgactggaaactgatcattagattcagcaactttgaactcatgggtgacttcaaaataaagttccagaatatctagctcttgcataccctttgtgtttattctcatttgttgttgttgttttagacagggtctcaatctgtcacccagactggaatgcagtggtgcgatctcaatctcagctcgttgaggccttgacctcctaggttaaagggatcctcgttcctccgccgcccgtactagagctgggaccaggcacactacgtccacgtaattttaatatatttagtagaggcatgggttctccatgttgtctaggtttgtccggaacttctgggctgag

SEQ ID NO: 940704 - DNA, 625 bp, Homo sapiens
cgtgtttgaataccctttatttctttctcttgcctgattgacatggccagaacttccaatactatgttgaataggagtggtgagagagggcatactggtcttgagagaactccaatattaagaagtgaaagagagaacaattaaagtagtttgaaaataaatagccagtgagacaaagagaaagcaaacaagagagtgtaacaccctgaaagtcaaaaggagaaagtgtgtaaggagaaggaaatgatctaaagtatcatatacttatcatgattcaagtaacatgactggaaactgatcattagattcagcaactttgaactcatgggtgacttcaaaataaagttccagaatatctagctcttgcataccctttgtgtttattctcatttgttgttgttgttttagacagggtctcaatctgtcacccagactggaatgcagtggtgcgatctcaatstcagctcgttgaggccttgacctcctaggttaaagggatcctcgttcctccgccgcccgtactagagctgggaccaggcacactacgtccacgtaattttaatatatttagtagaggcatgggttctccatgttgtctaggtttgtccggaacttctgggctgag

SEQ ID NO: 940705 - DNA, 625 bp, Homo sapiens
cgtgtttgaataccctttatttctttctcttgcctgattgacatggccagaacttccaatactatgttgaataggagtggtgagagagggcatactggtcttgagagaactccaatattaagaagtgaaagagagaacaattaaagtagtttgaaaataaatagccagtgagacaaagagaaagcaaacaagagagtgtaacaccctgaaagtcaaaaggagaaagtgtgtaaggagaaggaaatgatctaaagtatcatatacttatcatgattcaagtaacatgactggaaactgatcattagattcagcaactttgaactcatgggtgacttcaaaataaagttccagaatatctagctcttgcataccctttgtgtttattctcatttgttgttgttgttttagacagggtctcaatctgtcacccagactggaatgcagtggtgcgatctcaatctcagctcgttgaggcctygacctcctaggttaaagggatcctcgttcctccgccgcccgtactagagctgggaccaggcacactacgtccacgtaattttaatatatttagtagaggcatgggttctccatgttgtctaggtttgtccggaacttctgggctgag

SEQ ID NO: 940706 - DNA, 774 bp, Homo sapiens
aggcacttagacaaatagaaaagaataaagaacccaaaagtgaagccaaatacttacagccaacttatctttgacaaagcatacaaaaccttaaagtggggaaaggagaccctattcaataaatggtgctgggataactgccaagccacatatagaagaatgaaactagatcctcatctctcaccttatacaaaaatcaactcaagatgaatcaaaggcttaaatttaagacctgaaaccataaaaatcctagaagataacatcataaaaactcttctagacattggctttggcaaagaattcaggastaagaacccaaaagcaaataaaacaaaaataaataaatggacctaattaaactaaaaatcttctgcacagcaaaagaaataattagctgagtaaacaggcaactcagagaggggagaaaatctacacaaactgtgcatccaacaaaggactaatattcagaatctacaaggaactcaaacaaatcagcaagataaaaacaaataatcccattgaaaagtgggcaaaagacatgaatagtcaattctcaaaagaagatatacaaacaaccgacacacatagggaaaaaaatgttcatcttcagtagttttcagagaaatgcaaattagaaacacaatgagataccaccttactcctacaagaatggccataattaaaaaatcaaaaaataatagatgttggcataaatcgggtgaaaggggaactctttacactgctggtaggaatgtaaactagtacaaccactat

SEQ ID NO: 940707 - DNA, 610 bp, Homo sapiens
cttggttccattctccccgtcactttcaggtacaccagtcagacgtagatttggtcttttcatatagtcccatatttcttggaggctttgttcatttctttttatgcttttttctctaaacttcccttcttgcttcatttcattcatttcatcttccatcactgataccctttcttccagttgatcrcatcggctcctgaggcttctgcattcttcatgtagtcctcgagccttggctttcagctacatcagctcctttaagcacttctctgtattggttattctagttatacattcgtgaaaattgttttcaaagttttgaacttctttgcctttggtttgaatttcctcctgtagctcggagtagtttgatcatctgaagccttcttctctcaacctgtcaaagtcattctccatccagctttgttccgttgctggtgaggaactgtgttcctttggaggaggagaggcactctgctttttagagtttccagtttttctgctctgtcttttccccatctttgtggttttatctacttttggtctttgatgatgttgatgtacatcatcatgggtttttggtgtgaatgtcctttctgtttgttagttt

SEQ ID NO: 940708 - DNA, 571 bp, Homo sapiens
tggtacctgcaaatcaaaaaacatgcagtaaatacacaaaaaataaaaaggaagctactaaaccatgccacaagagaaaatcttcactaaagggaaaacagaaggaaggaaagaaagaaaaaaattataaacaaccagaaaacaaataatagaatggcaagagtaagtcctcacttatcaataataacattgaatgtagatggactaaactctccaatcaaaagacatagagtgtctgaatagatgaaaaaataagagtcaatgatgtgttgcctacaagaaacacgctgcacctawaaagatgcacatagactgaaaataaaagaatgaaaaaagatattccatgccaatggaaaccaaaaaagagcaggagtcactatacttatatcagtcaaaatagatttcaagacaaaaactgtaggaagaggcagaggagatcactatgtaatgataaaggggtcattccagcaacaggacatacaatgataaatatatgtgtacccaacactggaacacccaattatatagagcaaatattattagaactagagagagagatagaccccaatac

SEQ ID NO: 940709 - DNA, 586 bp, Homo sapiens
aagccagtatcaccctaatgccaaaactgggaaagaacataacacacacaaaaaatctatagaccaatattcctgatgaacacagatgcaaaaatcctcaacaaaacactgactaactgaatccaacagcacatcaaaacaataatacattatgatcaaatgggtttcataccagagattcagggatgatttaacatatgcaagtcaataaatgtgatacatcacataaacagatttaaaaacaaaaattgtatgatcatctcaatagacacaggaaaagcatttgataaaattcagcattcctttagtattaaggccctcagcaaaaytggcatataagggacacaccttaaggtaataaaagccatttatgaaaaaggcgcagccaacataatactaaactgggaaaagtttaaaccattccccctgagaactgaaacaagacaaggatgctcgccctcaccccttagattcaatgtagtaataaaagtcctagccagagtaaccagccaacattaataataaagggcattcaaatcagtaaagaggaagtcaaactgtcattgttcaccaatgatatgattgt

SEQ ID NO: 940710 - DNA, 598 bp, Homo sapiens
tagccaagcctgctgtatcccctttcattcaaacagcccatgttgcgcatctttcacaaggctgtgttctaggtgctaaagaaacacagaaaaatcccaagatcccttcctgtacaggagactgaacttaggttggcaaggtatgatgtttaggaaccttaagtacataataaaaacattataaaatatggaaacctagagctttgaagaaatgttgagcatattgaaacttatgcatgtaatggaagaggaagtggagtttgacttttgcctmtttcaagtttgcatgcttctgccgggctttggaaacagtacctctatttttcagatctcactgactccctgtcaggttatcttttcatgacatcaacttatctattaagtaattagggcatattttaacatgtaaagtgtatgtctgggagccatatattttggaaatgtacagtgtgcacctgtggtcccaggtacttgggaggctgaggcaggaagatcccttgagcccaggagttcaaggctgcagtgagctatgatcttgccactgagtccagcctgagtgacacaacaagagtctatctctttaaaacaaaatttaaaa

SEQ ID NO: 940711 - DNA, 427 bp, Homo sapiens
ctctgtaaattttgaagcaatttcaaatgcttcccaggaaagtgtagggaacacttaattcatggcctataaagacagggaatattagagcttttacgttatttctacaggaataaaagacactaccccagtatgcgaggatttgaggcaccaggcaaaaccctcaagattactcaagcccatgtcgaaaatcctattatctatagcactttacaaacagattgtctgaagtggctttttaatacttgaattttctctcctttttaaaaaagttttattttggccrggtgtggtggctcatgcctgtaatcccaacactttgggaggccaaggcaggtgagaggtcaggagtttgagactagcctggccaacatggtgaaaccccttctgtactaaaaatacaaaaaaaaaaaaaatagctgggcgt

SEQ ID NO: 940712 - DNA, 587 bp, Homo sapiens
tgaggttctttccttagctaggtctattttgctgataatatttctgatggtacactaaaattcctgtagtgagtttttcagttctatcaatcagtttggttctttctcaaaatggctattttgtctttcatctcttgtatcattttactatattccktagattctttcgattgggtttcaactttctcttgaatctcagtgatcttcattgacaaccagattctgaattctaagtctgtcatttcagccatttgacctggtgaaaaaccattactgaggagctagcgcggtcatttgcaggaaagaagacactctagctttttgagttgccagttcttgtgctggttctttctcatctatgtgggctgacggttctttaattttggaagttgctgtcttttggatggggcttgttgctatgatattctctgaggtccttgagggtttgattgtggtattagttgggttcagtcgactggcttcatttctggatgatttctggggtcccaggttcagctcaccactcctgggcttcatgctctaacactggggtgctgggaccaggcttgtcctctggccctcgaggt

SEQ ID NO: 940713 - DNA, 809 bp, Homo sapiens
aaaacctagaagagatggataaattcctggacacatacaaccttccaagactgaaccagaaagaaattgattctgtgaacagaccaataataagctctgaaactgaatcaataataaatagcctaccaaccaaaacaagactaggatcagatggattcacagctgaattctgccagatgtacaaagaagggatagtaccattcctatttaaattattccaaaacattgaggagggacttttctccaactcactctgtgaggccagcatcatgttgataccgaaacctggcagacacacaaccaaaatagaaaattttaggacaatattcttgatgaacaytgatgcaaaaattttcagcaaaatacttgtaaaccgaattcagcaacacatcaaaaagctaattcaccatggtcaagtaggcatcatccacaggatgcaagtttggttcaacatatgcagatcaattaatgtgattcatcacataaacagagctaaagacaaaaaaaacatgatagacacataaaactcaatagacacataaaagactttcaataaaattcaacatcccttcatgtttaacaccctcaataaactagatattggagaaacatacttcaaaataataagagccatctatgacaaacaaacccacagccaacatcgtattgaatcggaaaaagctggaaacattccccttgaaaaccagcacaagataaggatgctctcttaccactcctattcagtatagtattggaaaccctggccatagcaatcatataatagaaagaaataaaggacatccaaatag

SEQ ID NO: 940714 - DNA, 629 bp, Homo sapiens
tttgtcttgtgtctttatttcttacaatctctcatctttgcacacggggagaacacctgctaagccctgtagggctggaccctacacctaatgatcatgtgtagcttccttccttcctttctattataagatgttccagactcatcttgtacatttcctgccctagatctagaatcagccatgatttcttttaatggaaaatagatttcagattcacaatattggctctagagatattcattgatactaggttgatcattatttcttggcttttcagtggacagagcaagggaatttttaaaagataaaataccttacaagttaatattgatacttctctatttcaaattcagcaacacaaggttttaacttaacttcttctaatactttatcattgktcttccttattgataattgccttaacttgccatgatcagtggtcctttagggctatagatagttgggtgagggtaggactgactgatcctgatggagcgaagacactggaggtactctttgggaaaagctcagttccaatagggtaagatattatggttagtaagttaggcctgagcttcttcaagttatcactgtactagaatttagaccatgttagtaaactaaaccta

SEQ ID NO: 940715 - DNA, 545 bp, Homo sapiens
agtttagtaagtcacctgaaaaaacaatgctgagctcaaataagattgagaaacatcagattgtataacattgagcagatttctttactgcagcacttatttaagttcaaaatatggtaataatcattgtgatttccaaaatgggaatgtgttaagtacagttttccaaacttatttatcaacagaatcctttttatatggagcatcttgcaaaattagtgttctgagagtcataacatgggaaacaatgcttaattgttttgaatgtggtccaaggacgcttgcatcagaatcrctgtggatgctgattattgatacaaaaaatcatcgccacgtcttgttatgtcagaagctcttctaccagaagctgaaagagaatagcctttcaaggaacatggagaagttaacgtgaggatgtcagaacaagaacacagagggtcccttggtccctaatacttgggggccaccatattatccctggactgcttagcatggaccgttatataatagagaaatagatttatttcctgtatttgccattgcta

SEQ ID NO: 940716 - DNA, 459 bp, Homo sapiens
gttggagtttactggaggtccactccagaccctgtttgcctgagtatcagcagtggaggatgcagaacagcggatattggtgaaccgcaaatgctgctgcctgatcgttcctctggaagttttgtctcagaggagtacccggctgtgtgagatgtcagtccgcccctactggggggtgcctcccagttaggctactygggggtcagggacccacttgaggaggcagtctgctggttctcagatctcaagctgcatactgggagaaccactactctcttcaaagctatcggacagggacatttaagtctgcagaggttattgctgtcttttgtttgtctgtgccctgcccccagaggtggagcctacagaggcaggcaggcctccttgagctgtggtgggctccacccatttccagcttccaggccactttgtttacctactcaagcccaagcaatggct

SEQ ID NO: 940717 - DNA, 459 bp, Homo sapiens
gttggagtttactggaggtccactccagaccctgtttgcctgagtatcagcagtggaggatgcagaacagcggatattggtgaaccgcaaatgctgctgcctgatcgttcctctggaagttttgtctcagaggagtacccggctgtgtgagatgtcagtccgcccctactggggggtgcctcccagttaggctacttgggsgtcagggacccacttgaggaggcagtctgctggttctcagatctcaagctgcatactgggagaaccactactctcttcaaagctatcggacagggacatttaagtctgcagaggttattgctgtcttttgtttgtctgtgccctgcccccagaggtggagcctacagaggcaggcaggcctccttgagctgtggtgggctccacccatttccagcttccaggccactttgtttacctactcaagcccaagcaatggct

SEQ ID NO: 940718 - DNA, 689 bp, Homo sapiens
tccctagactgcacacagcggaaatacccttagcctggcccacaaaatcacattttccttctaggcctccaggcctgtaatgagaggggctgccatgaagacctctgacatgccttggagatattttccccattatcttgggggattaacatttggcttctcattacttatgcaaatatcagcagcaggctttaatttctcctcagaaaatgggattttcttttctatcgcattgtcagggtgcaaattttctgaacttttatgctctgcttcacttataaaactgaatgcctttaacagcacccaagtcacctcttgaatgttttgctgcttagaaattttttctgccagatatcctaaatcatgttcctcaagtgcaaagttctacaattctctggggcaggggcaaaatacctccagtctcttttctaaaacataacaagggtcacctttgctccatttcccaacaagttcctaatctctgtcttagaccaccttagcctggatttcattgtccatatcattatcagcattttgrtcaaagccattcaacaagtctctagggaattccaaactttcccacattttcctgtcttcttctgagccctccaaactgttccaacctctgcctgttgcccagttccaaagtcaattccacattttcaggtatcttttcagcagtgcccact

SEQ ID NO: 940719 - DNA, 622 bp, Homo sapiens
aataaaataaatttgcacagaagtttatcatttaaagaagaaaatgcagaattaaaatgaaataacactgatcgatgaatattatcaccagataaaataattatatggtagcacgacaaatttctatgtttgtgaattacattttctacctataaaattatttcagtatgacagagctattttatgcttacttgtccacataacagttctataaggagatgcggttttgtagcttctcattttaaagatgaggaaactgaggcttaaagtttaattatttatgcttggatttatagctatataagtaacagagccaagagctcattagagagatcttatccttctgaactgagcagctctccatcgtttcacatatatgcctggagaaaatcacatagatgtagaaaacaarttccagcagctaagagagtcacaagcgcgtttgctacatgttctttattttaaagcctgccacttgcttcctcagtcttgcattgtttcactttgcagagctctgaaggccagagcatacatgagtaattcagaacgattcttagctttcatttccgttttaatccatgaccctaactcatacattgtgtttcacctcatttttttccag

SEQ ID NO: 940720 - DNA, 566 bp, Homo sapiens
gttgccacaaaggacatgattttgttcttttttatggctgcacctatctttttctattaagatgtctttttcttatagacttatatgacttctttatgtattttgatactacctcatttgtatgttgcaacaaatagcttctccatttttaattgttttttaaattctctaacagtttcttttggtgaacatatgttccaattttagcttagccaaacttatcaaacatttcctttatagtttatatttttgtataaactatttatacaacaactttgtatgcaatctttcttactgaatgttataatcacattgcctatattatcttctaaaagttttatagtttagcctttcatgtttaggcctacagtctatgtgaaaytgatgtttgtgttcaataggatagatccaatagaaataggatcatatttctttttttttttttcctgtgtgaatactcagtactctcagcaccgtgaatttccacactgtgagcaatggcagctttgtcataaatgtacatatacatatgggtctgtttctggaacctattctatttcattgtt

SEQ ID NO: 940721 - DNA, 552 bp, Homo sapiens
ggtgaggtcagagggatagggatggtggaagagttaagaaggacatggtttgagtatagaccagacgggccatcaatgatggaatatttcaaagatgcctgtattcatttcctgttgttgctatagcaaattatcacagacttacttgctcaaaacaacacaaatttattatcttacagtcctacatgtcagaaatatgatatgggtttcactgggcactccctacagaggcttaggagaaactctgtttatttgctttacctagcttctgctagaagtcacctgtattccttgactcatggtcccttcctccatcttcaaagctgayagtgtagcatcttcacattgctctctgacggtaacctgcttccatcatcacgtctccttttctaactcaaacccttctccttccctgttttatatatatatggagagagagagagagagagagagagagagagacagacagacaggatcttgctctgtcacccaggctggagtgctgtggtgtgatcagacactgtaacctttaacttcggggctcaagcgatc

SEQ ID NO: 940722 - DNA, 609 bp, Homo sapiens
ttggtgtaatcccagcaccttgggaagccgaggcgggcaaatcttggggttggaagttcgagaccagcctggccaacatggtgaaactccgtctctactaaaaatacaaaaattagttgggtgtggtggcatgtgcctgtaatcccagctactcaggaggctgaggcaggataattgcttcaacctaggaggcagaggttgcagtgagccaagatcgtgccactgcactccagcctgggcaacaaagcaagactctgtcttgaaaaaaaaatttttgtttaaataaaaaaaaaaattaaagtgtattgggaggagggggtgttcagaactctaagatgtcagagtttctttctgggggatgtggggaaaagctacatttacccccaggctgcccttgaccttgacccaaartgccccctcctcactcagcccaggcagtagtctgaaatgtgcaaaaaacaaaaacaaacaaacaaaaaccaaacttcttcagagcaggcttttcagtgttcccaactgctcaaggagtaggtaggtgtaggtgccaggctgggcgtaagcaggctgctcctgaacaggtccccagacccgtttccctttccccctgtg

SEQ ID NO: 940723 - DNA, 612 bp, Homo sapiens
cttgcctatgtgactatctctcatatttccttaaagagaggaacagggggacatttaagtcacttcatatccccagtgctctgcccagggcctggcatgtgtgtgttgactatttgaatccatcctgcactggatgaagtctcaggacagtaaggatgccagcttcagatgcttggtctgctggactgagggcttgaggaagctctgaggacaagctggactctagtgggtccactgggtccagccagtgacatcctatgctgtgtccatataggtgggaacagaggtggcactctatttcaaggaccacattttctactagctcttagccaacctggctggggacctaagaacttagtatctcctctaagacctgagtgtggtgctttgtctccataagctaccccaagaccatctgctgaactcacaggaaacagtttcagtkcctatcttctctcctggtgcatggactcttggcttgatcacctccaaccataagggattatcatacagacccaccgaggagtggggctgctcaagagacctggtgttctgggaccttgtgccatccaaacatttccattcatggacataaccagtggctcaagtcct

SEQ ID NO: 940724 - DNA, 742 bp, Homo sapiens
cctgactcacaaaattatttttcccttctcagcctctaggcctgtgatgggagaggctgctgtgaaggtctctgacatgccctggaaaccccatgatcttggctattaacattcagctccttgttacttaggcaaatttctgcagcaggcttgwattcttccccagaaaatgggtttttcttttctaccacatggtcaggctgcaagttttccaaacctttatgctctgtttcccttttatacatacgttccaatttcaagccatctatttgtgaacaaatataactgaatgctttcagaataagccaggtcacctcttgaatgtttttctgcttagaaatttcttctgccagataccctaaatcatctctctcaagttcaaagttccacagatctctggggcaggggcaaaatgccaccagtctctttgctaaagcatagcatgagtaacctttgctccagttcccaacaagttcctcatctccatctgagaccacctaagcctagattttatcatccatatcactattatcattttggtcaaaaccattcaacaagtcccttggaagtttcagacttttgcacatcttcttgtctttttctgagccctccacagtgttccaacctctgcctgctacctagttccaaagtcacttccacattttcagtttatagcagttccccactccctaccaattctctgtgttagtccattgtcatactgctataaatatactacctg

SEQ ID NO: 940725 - DNA, 621 bp, Homo sapiens
ttttattccaaggtttacataagcttgagttgtaattggaattacagctattatttctacttttacctagtaagatcttcagtggtagtgacctttcttaataaggtataaagttcacaaccaagcagtgattgcataggtaacaagrattgtgatcaccgacattgctgataatagaatttgtgtgtgtatgtggtctaaaattttctccgtatcttcttttttttactttttttttctttctttctttctttttttttttttttttgagacaaagtcttgctctgtcgcccaggctggagtgcagtggtgcgatctcggctcactgcaacctctgcctcccaggttcacggcattctcctgcctcaggctcccgagtagctgggacaacaggcgcccaccaccatgcccggctaatgtttttgtgttcttaatagagacggggtttcaccgtgttagccaggatggtctcgatctcctgacgtcgtgatctacccgcctcggcctcccaaagtgcggggattacaggtgtgagccaccgcgcccagcctccctatcttcttaaactcactgggtcctttggtagatgtgtttgttgaggcatggtgagacttaggttat

SEQ ID NO: 940726 - DNA, 613 bp, Homo sapiens
agtgcaaagaaactgtaccttctcagacagcactttggggatgcatattgttttcagtgtcatttgaatttaaaggtaatttcaagttttatagttgaaacacttctcaactggttcccttggtgtggtgcctggcatgtagtaggcatgcaataagtgtttattgaatgaaggatattttcatacaggattgcaakcaattacattagcagaagaaaatttctcataatgtatttccaaaagaaaatttgtttgcctaccagaataattatgaaaaataaacaaacaaaacctaaaacaaaaatcataatgcattaaaacatacattttgaagaataatgctagccattgtcctatttgcttatagaagttttagactcttttaagcttcacaacaacaacaacgtgtgatacttttatttatactcctgtcttgtagatgaataagatgcagagaagttaaagttgcccaattaacaagcaagtgttggagctaagatttggacactgcccttttgattgccaagtctgtgttcttatatctttgtagcacccacagtatgcttgtaggttttagatagcataaagatcagaaggctgtagaaagaggctt

SEQ ID NO: 940727 - DNA, 613 bp, Homo sapiens
agtgcaaagaaactgtaccttctcagacagcactttggggatgcatattgttttcagtgtcatttgaatttaaaggtaatttcaagttttatagttgaaacacttctcaactggttcccttggtgtggtgcctggcatgtagtaggcatgcaataagtgtttattgaatgaaggatattttcatacaggattgcaatcaattacattagcagaagaaaattkctcataatgtatttccaaaagaaaatttgtttgcctaccagaataattatgaaaaataaacaaacaaaacctaaaacaaaaatcataatgcattaaaacatacattttgaagaataatgctagccattgtcctatttgcttatagaagttttagactcttttaagcttcacaacaacaacaacgtgtgatacttttatttatactcctgtcttgtagatgaataagatgcagagaagttaaagttgcccaattaacaagcaagtgttggagctaagatttggacactgcccttttgattgccaagtctgtgttcttatatctttgtagcacccacagtatgcttgtaggttttagatagcataaagatcagaaggctgtagaaagaggctt

SEQ ID NO: 940728 - DNA, 613 bp, Homo sapiens
agtgcaaagaaactgtaccttctcagacagcactttggggatgcatattgttttcagtgtcatttgaatttaaaggtaatttcaagttttatagttgaaacacttctcaactggttcccttggtgtggtgcctggcatgtagtaggcatgcaataagtgtttattgaatgaaggatattttcatacaggattgcaatcaattacattagcagaagaaaatttctcakaatgtatttccaaaagaaaatttgtttgcctaccagaataattatgaaaaataaacaaacaaaacctaaaacaaaaatcataatgcattaaaacatacattttgaagaataatgctagccattgtcctatttgcttatagaagttttagactcttttaagcttcacaacaacaacaacgtgtgatacttttatttatactcctgtcttgtagatgaataagatgcagagaagttaaagttgcccaattaacaagcaagtgttggagctaagatttggacactgcccttttgattgccaagtctgtgttcttatatctttgtagcacccacagtatgcttgtaggttttagatagcataaagatcagaaggctgtagaaagaggctt

SEQ ID NO: 940729 - DNA, 613 bp, Homo sapiens
agtgcaaagaaactgtaccttctcagacagcactttggggatgcatattgttttcagtgtcatttgaatttaaaggtaatttcaagttttatagttgaaacacttctcaactggttcccttggtgtggtgcctggcatgtagtaggcatgcaataagtgtttattgaatgaaggatattttcatacaggattgcaatcaattacattagcagaagaaaatttctcataatgtatttccaaaagaaaatttgtttkcctaccagaataattatgaaaaataaacaaacaaaacctaaaacaaaaatcataatgcattaaaacatacattttgaagaataatgctagccattgtcctatttgcttatagaagttttagactcttttaagcttcacaacaacaacaacgtgtgatacttttatttatactcctgtcttgtagatgaataagatgcagagaagttaaagttgcccaattaacaagcaagtgttggagctaagatttggacactgcccttttgattgccaagtctgtgttcttatatctttgtagcacccacagtatgcttgtaggttttagatagcataaagatcagaaggctgtagaaagaggctt

SEQ ID NO: 940730 - DNA, 669 bp, Homo sapiens
tctcctgcctcagcctcccgagtagctgggactacaggcgcccgccaccacgcctggctaattttttttttttttttttttttttgtattattagtagagatggggtttcacagtgttagctaggatggtcttgatctcctgaccttgtggtctgcccgcctcagcctcccaaagtsctgggcttacaggcgtgagccaccgtgcctggccaatttttaatacttgtatcttgataagatagtatttatggtaaggttaattatttttcctttttctgcactggcgtgagttaatatttgaatgatcaaaacgctaatgaaaattatatatatatatatatatatatataattggcatgagataggacatataaaacccttctgtctcctagagagaacaaaatcttctcatgattggaagaaataatctgtttatttaatgtctcgataccaaatggaaactatttttattagaacataagagaggtgattctctaagaagtaagtgtcatgagtgggagttaacaaatagctattttatagccacaacagaaacgttagtctaagatttgttttcctatgtaaaacaaatatgtaccgatgttttaggaaagaattagcaggatgacttataattatttaagatctttcatgcttttttgggttaac

SEQ ID NO: 940731 - DNA, 669 bp, Homo sapiens
tctcctgcctcagcctcccgagtagctgggactacaggcgcccgccaccacgcctggctaattttttttttttttttttttttttgtattattagtagagatggggtttcacagtgttagctaggatggtcttgatctcctgaccttgtggtctgcccgcctcagcctcccaaagtgctgggmttacaggcgtgagccaccgtgcctggccaatttttaatacttgtatcttgataagatagtatttatggtaaggttaattatttttcctttttctgcactggcgtgagttaatatttgaatgatcaaaacgctaatgaaaattatatatatatatatatatatatataattggcatgagataggacatataaaacccttctgtctcctagagagaacaaaatcttctcatgattggaagaaataatctgtttatttaatgtctcgataccaaatggaaactatttttattagaacataagagaggtgattctctaagaagtaagtgtcatgagtgggagttaacaaatagctattttatagccacaacagaaacgttagtctaagatttgttttcctatgtaaaacaaatatgtaccgatgttttaggaaagaattagcaggatgacttataattatttaagatctttcatgcttttttgggttaac

SEQ ID NO: 940732 - DNA, 733 bp, Homo sapiens
ggtcatttatattcttctctaaactggttattcttgttagcaaatcctctaaccttttttcaaggttcttaccttccttgcattgggttagaacatgctactttagcttggaggagtttgttattacccacctctgaagcctacttttgtcagtttgtcaaactcattctccatccagttttgtttccttgcaggtgaggagttgtgatcctttggagaagaggtattctgrtttttatacttttaaccctttttgcactggtttttcttcatttttgtggatttatctacctttggttattgacgttggtgatcttaggatgaggtttttgtgtggacatcctttttgttgatgttgatgctattcctttttgtttgttagttttctttctaacagtcaggcccctctgctgccggtctgctggagtttgctggaggtccactccagaccctgtttgcaagggtatcaccaatggaggctgcagaacagcaaagattactgcctgttttttcctctgaaagcttcgtcccagagggacacctgacagatgccagccagagctctcctgtatgaggtgtctgttgaccactcctgggaggtgtctcctagtcaggaggcatgggggccaggaacccacttgaggaggcagtctgtttcttagcagagctcaagcgctgtgctgggagatccactgttcttttcagagccagcaggcaggaacgtctaagttgg

SEQ ID NO: 940733 - DNA, 673 bp, Homo sapiens
tagatatgctctcctaacagtggaacgcggtttgatcccttctcctcacatacacagtcataaatgagtcgtcagagttaccccaaagggaaatggtaacatctccctacagagaaaactagcacagaacttatgggmctcattgaacagttacgtgggttggttggacagaaaaatgttggttcaattttcaaatactaaggagagcttatttcaggagtcccttttcttactttgttgaggggaggcatcagagcacatgctgggaggataggccaggaagcaggcagtggtaacgtgggacatcgtgcacgtggtggagcatgccgccatctctcccttcaccctggcagagctctccgttgaacggggaggtgaacttggacatggacaacaaccagcctgtgtcaagggggtttccttaccaggactcctttctagtttcctttcacctacaatgtggtcatggggcaaaaaccccagagaccacatatgtattggtggaaagagaaagaacaggactgtggagccaaagctacctcactagcttttgtgaaagtcaggctggaaagtgcttccagccacagaaataggctgtgggtgtaaatattaaccttggccatcaaataagtaggcatagagtgtgactcgccctctcttggtcttccctgaa

SEQ ID NO: 940734 - DNA, 606 bp, Homo sapiens
tttgcctactaattgccccttttctatgctcataaaggactgaactcaaatgtcactgcctcagaaggccttctctgactatcctaacaaatattaaactatcccaagcattcatgttttatgtctcacaaaacactgtagctctccaaatggtcttatttatgtgcttactgcttgtctgtatctcctactggaacataagattcacgagggcaggggtgtatttattttgtatttattttgacttcatgrtcctcagcacctagcataattcctagcacatagtaaatacttcataagtattttctggtgaatcaatgaatgcatgaatcctgagcctgacagaatgcatcataatttggtgtcccttaatttctccactgtgaacacctgagttcctttcaagcttatcttcctattataccttaccatgaatcatgattttgaaactttgcataagctcttttctttctttatgctgaaattatacttcttttaaggcctgcttcagatttcatcttctctatgaagcttttcatggaggtcatattgcttttcttttttttctttctgtgaactttaacggtgtatagatagtcttaataa

SEQ ID NO: 940735 - DNA, 657 bp, Homo sapiens
agaaggcttagaattcaaagacatgagtttcctcaccaatcccccacgtgacatacatttatgcagtactgtgtatgaccaagaagttaatctgtcttcttgaatacctgcaagaagcatagataatcacactcagaaggatagcttattttcaccattgagtgtctctaggtggaatttttgtcctgtcaagccaaagtttgctttctgtataacttggacctgttggttctttttttttctttttcttttcttttttttttttttttgagacagagtctcgctctgtcacccaggctrgagtgcagtggcacgatttcagctcactgcaagctccgcctcctgcgttcaccccattctcctgcctcagcctcccgagtagctgggactacaggcgcccaccactgcacctggctaattttttgtatttttagtagagatggggtttcaccgtggtctctatctcctgacctcgtgatccacccacctcagcctcccaaagtgctgggattacaggcatgagccgccgtgcccggccttttttttttttttttttgagacaatgtcttgctctgtcgtccaggttgcagtgcagtggcatgatctcagctcactacaagctccacctcccaggttcacgccattctcctgcctcag

SEQ ID NO: 940736 - DNA, 622 bp, Homo sapiens
aatgggtaaaggacagtcttttcaacaaatggtgctgggaaaatggatatatatatgcaaaagaatgacactggaccctcattttatatcatacacaaaaactatctcaaaagggattaaagatttaaatttaagacttgaattataaaatccctagaagaaaacataggagaagrgcttcatgatattggtcttgacaaagatttcttgtatatgatatcaaaagcacagccaacaaaagcaaaaatagacaatcaggactaaatcaaactaaaaagcttctgcacatcaaagaaaacaacagagtgaaaaagcacactacagtatgagcaaaactatatgcaaacttgatttaaaaaaacttgatttttaaatgtgcaaaggagttgaatagacatttctctaaagaagacatacaaatggccagcaggtacataaaaagacggtgaacatcacaaatcatctgggaaatgcaaatcaaaaccacagtaagatatttactttacaactgttaggatagctataattttaaaaaccataaaacaaaataaaaacagaaaataaacattggtgaggatgtagagaaattgcaacccttgtgcactgttggtggaaatgtaaa

SEQ ID NO: 940737 - DNA, 768 bp, Homo sapiens
aatagtatcatcaaaaggccaactggctataccaagattctcaaataagcaagttaaggtttccaaaatatttccaaccagataaaagtttacacaggtcttcagcaaataaaaaatatatatttgtatgcatatgcaaatgcatacacatatattagtgtaagattgccaaatgttctctcttaaaaggatcatccctctgaaatcatggccttcttctcatggtaagttttcccccacatacttgacaaacaaaaagctsgcaatgtcatccattgccaatagatttttatttttattaattttctaagtccatgaaactctgaaatctagaatatctagaagtaaacagaacacaacagctccctggccaaattccaaatacaaaatggttgatcttttattcattaacatactgtctcttcattcacccaagtccaattttcattacccattgtctatactattctagtagatcttaataataactcagacaatattaacaatatttatctgatcatgtgtctcaaaatggcatggatcttcccaggaagtgcttaaatcctgtcacattgcttagaaacactattatcaaactctgtttgaccttgttctttgtaactttttaacttttcatgtatccctctaagtaaatcttgtcacagagaagctaagaacatttagagcagaggtgtccaatcttttggcttccttgggtcacactggaagaagaagaactgtcttgggccatacataaaataacactaa

SEQ ID NO: 940738 - DNA, 573 bp, Homo sapiens
gcatttagtatatgtgggaagggcaggtctaagtgataaagggtaattttcatcatgaaagaacatattttacagggccagagttgctggtgactatgaaaatttgctctcagaaggctttcattgaaggggaaaataatyttaaagttcaatgaaatgttgaacatttacaacaagcagctctctccatctcccactgtatatgatggggacaggatcaaagggagttctgggttgtgtgcatttgagcaagggccctgggtcacctgcactaggtggctgggggtggccgcttactcaggctggtccagtgaggatggaggagcaggttacatgggtggcagtgcagaataatggctaagagcacagtctggggtcaaacactcctatgttagaattctttctctacctcttagtagttgagcttccattgaaagatgggggagtgaggtgagagagatatagagagcgaggaagagagagtggtagatattagagaccctgaactgagttgagcttgggcctctgcttccttcttaatggcagtaggtccaatatcattttaggaaatgt

SEQ ID NO: 940739 - DNA, 573 bp, Homo sapiens
gcatttagtatatgtgggaagggcaggtctaagtgataaagggtaattttcatcatgaaagaacatattttacagggccagagttgctggtgactatgaaaatttgctctcagaaggctttcattgaaggggaaaataatcttaaagttcaatgaaatgttgaacatttacaacaagcagctctctccatctcccactgtatatgatggggacaggatcaaagggagttytgggttgtgtgcatttgagcaagggccctgggtcacctgcactaggtggctgggggtggccgcttactcaggctggtccagtgaggatggaggagcaggttacatgggtggcagtgcagaataatggctaagagcacagtctggggtcaaacactcctatgttagaattctttctctacctcttagtagttgagcttccattgaaagatgggggagtgaggtgagagagatatagagagcgaggaagagagagtggtagatattagagaccctgaactgagttgagcttgggcctctgcttccttcttaatggcagtaggtccaatatcattttaggaaatgt

SEQ ID NO: 940740 - DNA, 523 bp, Homo sapiens
aattcaacaaacaaacaacaaataaccccattttaaaaatgggcaaaggacaacagacacttctcaaaagaagacatacataccagtggccaacaaacatgaaaaaatgctcagcatcactaatcagagaaatgcaaatcaaaaccacagtgagataccatctcacactagtcagaatggctactattaaaaaattaaaaaacaacagatgytggccaggctgctgagataagagaacgcttataccttgtaatgtatacacttataccttgaaatgtaaattagtccagcctgtgtgaaaaacacctggagacttttcaaagaacttaaacagagctaccctgcaatcccattactgggtatatatccaaaagaaacaaattgttctacaaaaatatacacacacttgtatgtccatcactgcactattcacaatagcaaagacatggactcacccaggtgtccatcaatggtagatgggctaaagaaaatgtatattttcttatatgccatggaatactat

SEQ ID NO: 940741 - DNA, 575 bp, Homo sapiens
ctcagcaattaatgtgtattagaattggatttcttcaaatgtgctctaactatatggcctacattggtcatttatcagaatatacaacttacatgcctcttcgcattaacacatcataatggattcaaaggtttacctttaataagtttaatttaaaacttaaataagttttaaatatgaaacaagtttaaatgctataaaacaagagttaatatatgtaaataacctaaaggcttactttatattccatcgcagactttgtcttaaaatatctggtagttataagatagggtgaaaatagatgcattttcaaaaackggggcttatttcatgaaggaaatttggcttaataattagagctttcagccgagcgcggtcgctcacggctgtaatcccagcactttgggaggccgaggcgggcggatcacgaggtcaggagatcgagaccatcctggctaacacggtgaaaccccgtctctactaaaaatacaaagaaaaattagccaggcctggtggcgggcgcctgtagtcccagctactcaggaggctgaggcaggagaatggcgtgaacccgg

SEQ ID NO: 940742 - DNA, 585 bp, Homo sapiens
agtctctcatttcagaactcagacaacataaagatgtccattttcaccacttctactcaacacagcactgaaaatcctagcttgagcaatcaggcaagaaaataaaaggcatctgaattggaagatgggaagtcaaattgtccctttttgcaggtgacaaaaatctcatatctagaaaaatctaaagactccaccaaaaaactcctagatttgacaaacaaatttggtaaggtttcatgatacaaaaatcaacatagaaaactcagtactgtttctcatagaagggagcaactcayactggggcctgtcagagggtgaagggtgggaggaaggagaggatcaggaaaaataactaatggatactaggcttaatacctggataatgaaataatctgtacaaaaaactcccatgacacaagtttacctatgcaacaaacctgcatatatacccttgaacttaaaagctaaaaataaaataaagaagaagcttaaaaaacaaaatttagtattgtttctatataccttaatgaaatagctgagaaaaaatatcaagaaagcaattccatttacaatcgacacacatat

SEQ ID NO: 940743 - DNA, 668 bp, Homo sapiens
tggagttctgccaggccactgctagtgttcacttaatgcccaagagttcttcagacagcttgtggtaaacgctgcacagcctgggactcacccttcaaggtagcgggctcccttctggcccaggacaggcctagaaatgctaggagcccgggcctggactcagggaccccaagtgcctgcttattgctctgccccactgtgtgcaagctggtacctaaggtgcaagaaaatttcccctttacttttscctctgcttttctcaaatggaagtcttttataatagccaccattgctgggaatcttctgggtcacatctgaagccagcatgtctcagggcccaaggcccattgtgtactctctggggatcgttgcaggttattcagtgcccaagagctctttagacagcaggtgatgaatcttgccagaactggattgtttcataaaagcaatggatttccttttggcccagagtgtgtctagaaatgttatctggagctagggccttgaatgcctctgcccagtaccctctcctactgtggctgagtaggtatccacaatacaagacagagtcgtctttactctttactctccaccccctaagcagaaggaaggggacacttttgttcctgtgagttgcactgccttgggttgggggaggatggcataag

SEQ ID NO: 940744 - DNA, 765 bp, Homo sapiens
gccacccttcttcccaatccaaagcctcctttgcgtcctcctcttgtattcccccaccttaacccataagtataggatacctctactccctccttggtgaccgatcacgcaccccttaccatctcattaaaacctaatcacccttaccccactcaatgccaatatcccatcccgcagcgcrctttaaaaagattaaagcctgttatcactcgcctgctacagcatggccttttaaagcctataaactctccttacaactcccccattttacctgccctagaaccagacaagtcttacaggttagttcaggatctgaaccttatcaaccaaattgttttgcctacccaccccatggtgccaaacccatatactctcctatcctcaatacctgcctctacaacccattattctgttctagatctcaaacatgctttctttactatccctttgcacccttcatcccagcctctcttcactttcacttggactgaccctgacacccatcaagctcagcaaattacctaggctgtactgccgcaaagcttcacagacagcccccattacttcaatcaagcccaaatttcttcctcatctgttacctatctcggcataattctcataaaaacacacgtgctctccctgctgatcgtgtccgactaatctcccaaacctcaatcccttctacaaaacaacaactcctttccttgctaggcacggttagatactttcgactttagatatctggttttgccatcctaacaaaac

SEQ ID NO: 940745 - DNA, 765 bp, Homo sapiens
gccacccttcttcccaatccaaagcctcctttgcgtcctcctcttgtattcccccaccttaacccataagtataggatacctctactccctccttggtgaccgatcacgcaccccttaccatctcattaaaacctaatcacccttaccccactcaatgccaatatcccatcccgcagcgcactttaaaaagattaaagcctgttatcactcgcctgctacagcatggccttttaaagcctataaactctccttacaactcccccattttacctgccctagaaccagacaagtcttacaggttagttcaggatctgaaccttatcaaccaaattgttttgcctrcccaccccatggtgccaaacccatatactctcctatcctcaatacctgcctctacaacccattattctgttctagatctcaaacatgctttctttactatccctttgcacccttcatcccagcctctcttcactttcacttggactgaccctgacacccatcaagctcagcaaattacctaggctgtactgccgcaaagcttcacagacagcccccattacttcaatcaagcccaaatttcttcctcatctgttacctatctcggcataattctcataaaaacacacgtgctctccctgctgatcgtgtccgactaatctcccaaacctcaatcccttctacaaaacaacaactcctttccttgctaggcacggttagatactttcgactttagatatctggttttgccatcctaacaaaac

SEQ ID NO: 940746 - DNA, 625 bp, Homo sapiens
ctaggggactcgggtcactgaaatgagaaagtgaccgaggactgttccccagagccagcgcatgcgccccagtacctgccagaggaagacggctgtgcattaacacctacgacacagtcacaggctgatctttgtgtattttgctttcaggaaaacatagtcacagggcagaggacagcactgtagaatgagaaccagaagagcctaggggtgtgcagagggttgctgaagtggccagagtcacagcgcggctggtgacagagcagagtctggccccagcctcccctgcacagccgccatttattagctcagatgcttccaaattcaaaatgcagtgtcaccagaaaccgctgacacaggctgatggttcagcaactcacagccatcccctggggaygggctcctactcagaagtagacaaggtccttttggagacagagccttcctggttctcactcactgaggccttccaggaagacgttccattctgagtgctttggcccaagtggattttagtgcagggatatggtgaaatgggggagcgggctgggcttacatgaggctgtccctttaggaataatccaggaagtgtcccggaaaagagagagaagacatcagagcctaa

SEQ ID NO: 940747 - DNA, 623 bp, Homo sapiens
ctaggggactcgggtcactgaaatgagaaagtgaccgaggactgttccccagagccagcgcatgcgccccagtacctgccagaggaagacggctgtgcattaacacctacgacacagtcacaggctgatctttgtgtattttgctttcaggaaaacatagtcacagggcagaggacagcactgtagaatgagaaccagaagagcctaggggtgtgcagagggttgctgaagtggccagagtcacagcgcggctggtgacagagcagagtctggccccagcctcccctgcacagccgccatttattagctcagatgcttccaaattcaaaatgcagtgtcaccagaaaccgctgacacaggctgatggttcagcaactcacagccatcccctggggatgggctcctactcagaagtagacaaggtccttttggagacagagccttcctggttctcactcactgaggccttccaggaagaygttccattctgagtgctttggcccaagtggattttagtgcagggatatggtgaaatgggggagcgggctgggcttacatgaggctgtccctttaggaataatccaggaagtgtcccggaaaagagagagaagacatcagagcct

SEQ ID NO: 940748 - DNA, 534 bp, Homo sapiens
tcttgaaaactcatggaaaaaccattcaaaatcctaactcctggacccttattatgattgtggggaaaataacttttaaaacctgatatgttcacttatgcacaaaggtatatttttacagtatagcaaaaaaggtaaattaggaatattcttatattccaaatgacctggtattattttattttgtcataaattgcatgtatcctgatgtgattgaaaccctaccagggtttgaagttataaccgcagctaatgtatttgaaaaaataaaaagctttttgtcagtatgatttctgcttcaaactgtgcaagatacacttattctccaagatagaagcaccccccaacttttttttttttwacaaaaacattaaaagactaagcaggaaataacgcacactcatggagacattttagccaaaaaagaataattgaatgcaagtgagaaagggaatatattttaaattaaagaattttgacaggccagtgaaagaacaaagggctgtattctacattacttattttctcaggggt

SEQ ID NO: 940749 - DNA, 619 bp, Homo sapiens
ttgttacaaaggatatgacttaattcttctgtagggctgcatagtattccatagtgtatatatactacattttctctatccaatctgctgttgatgggcatctaggttgattccatggctttactattgaatcatgtatttattgagtgcaaagcaccgttttaggttctcrgtttaaaacactgaacaaaacagataaaaattattgccatgatggagcttacattctagttagaagagactggcaatataaattaacaaacaaaaatgaataaaacatataatatgctacttggcaattcatgttatggagactaaatggagaggttgatgcatttttttgtttgtttgtttgttttactttttctatgggtgatgcaattttaaattgagtgactggtaaaggcctgacttaaaagtgaggtttgagccaagacccagaagacatctgtgtagatgttagggatgagctttcctggcagaggagacagtgatgacttgctttttaaaaggctcactgtgggccagacgcggtggctcacgcctgtaatcccagcactttgggaggccaaggcaggcagatcacgaggtcaggagattgagaccatcctggctaacg

SEQ ID NO: 940750 - DNA, 581 bp, Homo sapiens
gttgttactaccctaggtctgaaggagtaagagagaatgatgtctctgcagccccttgagatcaggagctgttagggaggagctgcctctggccaatgttgtgatcacaagagggcagagccacttctagacacagggcccagaccagggagggagtggagaagaaatagcctgacttctgagggctcttttctgttccattggtctatatctctgttttggtaccagtaccatgctgttttggttactgtagccttgtagtatagtttgatatcacacatctacaaccatctgatctttgacraacctgacaaaaacaagaaatggggaaaggattccctatttaacaaatggtgctgggaaaactggctagccatatgcagaaagctgaaactggatcccttccttacaccttatacaaaaattaattcaagatggattaaagacttaaatgttagacctaaaaccataaaaaccctagaagaaaacctaggcattaccattcaggacataggcatgggcaagaacttcatgactaaaacaccaaaagcaatggcaacaaaagccaaaattgacaaatg

SEQ ID NO: 940751 - DNA, 594 bp, Homo sapiens
ttgcacaagtaacaaggagctgaatgttaatcaccaggacaatggggaaaatgtctccaggccatgtcacagatcttcacagcagtccctcccatcacaggtctggaggcctaagagggaaaaatggtttcatgggcygggcccagggccctgctggtctgtgcagcctcaggatttggtgtcctgcatcctagccactccagttccagctatggctaaaaggggccaagatacagcttgagctgttgcttcagaggatgcaaaccccaagcctggcagcttccacatggtcctgggtctacaggtgcacagaaggctagaattgaggtttgggaaccttcacctagatcttagaggatgtatggaaatgcctggatgtccaggcagaagtctgctgcaggggtggaaccctcatggagaacctctgcaagggtagtgcaaaggggaaatgtggatttggagctaccacacagagtccccactggggcactgcctagtggagctgtgagaagagggatgctatcctccagaccccagaatggtagatcccctgacagcttacactgtgcacctggaaaagctggaggcacacaa

SEQ ID NO: 940752 - DNA, 561 bp, Homo sapiens
aaagcagccagactgttttccacgcaggttcacgtccccgccacttctctctaaacaaggcctcccagcccgacagcccagccacccactgctacctgggctatctggccggcagcagctctgcacttccctgggactgagctcccagtggtggcaggyaggactgccatttttgctactctgcagctttgccccctactgccctgagtcttgggagggagaaaagtgattaagaactaaagtgggccctcagcaagcatagctaccttacagaaaggcagccagacagtattccatgtatatccctgcccctgttaacttcactgggcagggcctcttgtcctgggcccccagcacaaccatcgtgccactacctaaacacttcagttggtagaggctctgcatttctctgcaaaggaaatgccagagaaaacctacagccactctcccattgcagttgcatggaaccactcttactgcccatatgctggaaaaggaacaaatggcctggttgtgtcaccggcacctccaacacaccacagcaacaatacagagaggagg

SEQ ID NO: 940753 - DNA, 627 bp, Homo sapiens
gtgatagacacaaggactgatagagagaaaaagcggtaggctttattgagcagagtgaaagtacaaagcttccacagcgtggaaggggtccctcccgaatgggtagccagagttagattatacaactgccttttaaactctttaaggtgggaaatacgtgcagcgggaagatgttaccagagcragaaaaaaagacaaccatttgtgacatgtcttagatcttaaggaaaaccggaattgcaacttaggttttatttattttatgacctcgcagcggcatggcaaaggagacagcatcttacaggactttacaaagtatgttcacaaggaattgggattgggagtatagataaggtccactggtcacagaaaaatggccagttaacattctttttactttagtttcgggggagggggaaggggagagagggagagaggacacagagaaacgtacaggaaaattttcgctgtttatggctttcttggggaagaaaacacatgcagaaatcctggtgttaggaatagtttaagcatgtatcttcaatattatccatccaggaccaaagtaagtcctgatgcaggaaataagggagtttcacagctttctgagcccctactcgacccagg

SEQ ID NO: 940754 - DNA, 555 bp, Homo sapiens
gatgggcttccctttgtgggtaaccagacctttctctctggctgcccttaacattttttccttcatttcaactttggtgaatctgacaattatgtgtcttggagttgctcttcttgaggagtatctttgtggcgttctctgtatttcctgaatttgaatgtgctatggtggtttgctgcatccagcgacctgtcatctacattaggtgtttctcctaatgctgcccctcccctagaccctcaccccttgataggacctggtgtgtgatgttcccctccttgtgtccatgtgttctaattgttcaactcccacttatgggtgaaaatatgtggtgtytgattttctgttcttgtgttagtttgctgagaatgatggtttcaagcttcatccatgtccatacaaaggacatgagctcatccttttttatggctgcatagtattctgtggcgtttatgtgcaacatttttttttatccagtctatcattgatgggcgtttgggtgggttcgaagattttgctattgtgaacagtgctgcaataaatatacgtgtgcat

SEQ ID NO: 940755 - DNA, 681 bp, Homo sapiens
ggaaaacagtatggatgttcctcaaaaaactaaaaatagaattcccatataatccagcaatcccacttctgggtatacatccaaaaaaattgaaataagtatgacaaatgggtatctgaactcccatgttcactgcagcattattcacaatagccaagatagagagatacctaagtgtccatcaatggactaatgaataaagaaaatgtagcacatatacatgatagaattctatgcagcattaagaaaagaaaattctatcatttttgacaacatagatagcctgaaagacattatgttaagtgataaaagccaggcacagatagatactgtgtgatctcacttatatgtggaatctaaaaaaattgatctcagcttccggagccaagatggccgaataggaacagctcyggtctacagctcccagcgtgagcgacgcagaagacgggtgatttctgcatttccatctgaggtaccaggttcatctcactagggagtgccagacagtgggtgcaggacagtgggtgcagcgcaccgggtgtgagtcgaagcagggcgaggcactgcctcactccggaagtgcaaggggtcagggagtacccgttcctagtcaaagaaagggatgacagacggcacctggaaaattgggtcactcccaccctaatactgcgcttttccaaa

SEQ ID NO: 940756 - DNA, 612 bp, Homo sapiens
tgcccttttttatctttctcttgtctgattgctctggtaagcacttcctttctatgcagaattgaagtggttaaagtgagtgcgtatccttgtcttgttccagttctcagagggaatgctttcaacttttttctgttcagtacaatgttggctgtgggtttgtcatagatggcttttattaccttcaagtatgtcctttctatgccaattttgctgaggattttaatyatagaggaatgctacattatgtcaaatgctttttccgcttctattgagacgatcatgtgattttgtttttaattatgatgtatcacatttattgacttaagtatgttaaaccatccctgcatcctgggtatgaaacccacttgatcatggtggattatctttttgatatgctgttggatccagttagctagtattttgttgaggatttttgcatctgtgttcatcagggatatcagtctgtagtgtttttgtttgtttgtttgtttgttcaatatgtcctttgctggttttggtattagggtgatactggcttcatagaatgaattagggaggatttctttctcaataggattggtaccaattcttctttgaatgtctgataga

SEQ ID NO: 940757 - DNA, 572 bp, Homo sapiens
gaccctacattgtgtattcatgctttttagattttttgatgtaagcatttaagggtacgaactttctcaagtactgtctttgctgtagaatttttaaatttccatcttgattttattgttgacccaatgatcattcaggagcaagttatttaatttccatgtatgtgcatggttttgagtgtcccttttkgtattgatttctagttttatcaactgtgatctgagagagtaattgatataattttgattttcttaaatttactgcaatttgttttgtggcatattatatgttctatcttggagaatgttccatgtgctgatgaatggaatgtatattctgcagttgttgggtaaaatgttctgtaaatatgtgttaagcccatttgttctagggaatagtttaagtccattgtttcttggttgactttctgtcttgatgacctggctagtgttgtcagtggagtattacagtcccccaatattattgtgtggccatctaatttgttacatctgttagtaattgttttatacatttgggagctccagtgtttggtgcatatatatttagaatt

SEQ ID NO: 940758 - DNA, 572 bp, Homo sapiens
gaccctacattgtgtattcatgctttttagattttttgatgtaagcatttaagggtacgaactttctcaagtactgtctttgctgtagaatttttaaatttccatcttgattttattgttgacccaatgatcattcaggagcaagttatttaatttccatgtatgtgcatggttttgagtgtccctttttgtattgatttctagttttatcaactgtgatctgagagagtaattgatataattttgattttcttaaatttactgcaatttgttttgtggcatawtatatgttctatcttggagaatgttccatgtgctgatgaatggaatgtatattctgcagttgttgggtaaaatgttctgtaaatatgtgttaagcccatttgttctagggaatagtttaagtccattgtttcttggttgactttctgtcttgatgacctggctagtgttgtcagtggagtattacagtcccccaatattattgtgtggccatctaatttgttacatctgttagtaattgttttatacatttgggagctccagtgtttggtgcatatatatttagaatt

SEQ ID NO: 940759 - DNA, 572 bp, Homo sapiens
gaccctacattgtgtattcatgctttttagattttttgatgtaagcatttaagggtacgaactttctcaagtactgtctttgctgtagaatttttaaatttccatcttgattttattgttgacccaatgatcattcaggagcaagttatttaatttccatgtatgtgcatggttttgagtgtccctttttgtattgatttctagttttatcaactgtgatctgagagagtaattgatataattttgattttcttaaatttactgcaatttgttttgtggcatattrtatgttctatcttggagaatgttccatgtgctgatgaatggaatgtatattctgcagttgttgggtaaaatgttctgtaaatatgtgttaagcccatttgttctagggaatagtttaagtccattgtttcttggttgactttctgtcttgatgacctggctagtgttgtcagtggagtattacagtcccccaatattattgtgtggccatctaatttgttacatctgttagtaattgttttatacatttgggagctccagtgtttggtgcatatatatttagaatt

SEQ ID NO: 940760 - DNA, 641 bp, Homo sapiens
ctgtccttcccaaggtgggagtgatggtgcaacattccattactctacagcagcatggccaggcggggcagcaaaccttgttcactccaatgcaatgtgctcacttttgacccttttgaaaaccctcctgattcaacttgtgggagagaggagcaggcccctctatagtcatcatcgtacaaacaacacgctcctgatattaggggacctggctgcaccctccacatggaccatcttctgggaaggtgagacatccatctgctttcatgacctttttagacagtrggtcagtgggaagaggggaggacccaggattggcctgagctgcttctaaggacagcctggaatcaacatcatgactcctcaggggtttggtgtacttgggtctaaccttctagggggtttaatcagagagatggaacatgcaggaggcatgggatagttaggatttccgaacagaggaacattcaccacaggcaggtggcttcatgggggtggggcctgtctaggccatcagggtggaagcaggacccctctcagcagccgagggaagggtatggtgaccagttcctgccctccagagagagagagagagagagagagagagagaggttattccagcaaggaggaggcagattgtc

SEQ ID NO: 940761 - DNA, 491 bp, Homo sapiens
atcctgttgggattctaattggaattgcattgaatctatagatcaacctgagggaattgacatctttgtgattttgagtttttttaatccaataacatggtttattactccatttgtttgggtttttttaatagctttcaaaaaagttttacagttctatttataactattttgtcagctttattcctagatttattcctatttatatttttgttgctagaataatggttgtatttcaaagccacattttaaaaactgttgttggtattaaaaaatgcaattaattgttgtgtattgattttacattgagcaacattattaaaatattttagtatttccaaaaatttktctgtagattcattccaggttttctacagagctattaataattatagcatttggaagtattggcaatttgattgttttttatttttataactttcatttactttatcttaaactctgcactgcaggacttctaatataaaact

SEQ ID NO: 940762 - DNA, 603 bp, Homo sapiens
ttgcacttacaaattattcgtattcctaagggagaagataagtcaaataggttcctgaaaacctatttcaggaaataatcaggaaaaacttcccaagtctagcaaaagtgttagacatcaggatacaggagacccagtgatccccagaaaatacaytgtaaaaagaattttaccatagcatattatgttcagactatctaaaatcaatgtgaaagaaagaattttacaacgagcaagagtaaagcatctggtcacctataaaggaaaccccatctgagtaacagcagacttttcaatagaaaccttatacgcgagaagagaatggaatggcatttttgaagtgctgaaagaaaaaaaactgtcagctaagaatgttatatcctaccagaataaacttcataaatgaagaagaaatagtcttccccttacaagcaaatgctgagagaatttgtcattaccagaccagttctataggagatgcttgctcatacatgtcttaaatatggaaacaagaggtcaatattcaccatcgtgaaaatataaaactcataggtcttacaaaacaattacacaaaggaggaagagccaggagtcaaatgacat

SEQ ID NO: 940763 - DNA, 603 bp, Homo sapiens
ttgcacttacaaattattcgtattcctaagggagaagataagtcaaataggttcctgaaaacctatttcaggaaataatcaggaaaaacttcccaagtctagcaaaagtgttagacatcaggatacaggagacccagtgatccccagaaaatacactgtaaaaagaattttaccatagcatattatgttcagactatctaaaatcaatgtgaaagaaagmattttacaacgagcaagagtaaagcatctggtcacctataaaggaaaccccatctgagtaacagcagacttttcaatagaaaccttatacgcgagaagagaatggaatggcatttttgaagtgctgaaagaaaaaaaactgtcagctaagaatgttatatcctaccagaataaacttcataaatgaagaagaaatagtcttccccttacaagcaaatgctgagagaatttgtcattaccagaccagttctataggagatgcttgctcatacatgtcttaaatatggaaacaagaggtcaatattcaccatcgtgaaaatataaaactcataggtcttacaaaacaattacacaaaggaggaagagccaggagtcaaatgacat

SEQ ID NO: 940764 - DNA, 531 bp, Homo sapiens
ctttcaaatcttgtgaagctgagtgtgacattgtgcctattttttaccaccctgacttcctgcatcaacatttcaaggggagaaaaggagcacataatagtatgtctcaagttaactccctatcttctagttttctttatttgcaccatgtaaagatgcagatcccttttctgtttttgttttgtgtttgtttttgtagagatggaggaactggctatgttgcccaggctggtcttgaactcctggcttcaagtgatcctcccacctcagcctcccaaagtgctgggattacagacataagccacagagcctggccagatgcaggtcctttaccccamgtatgggtcaaaggtggccaggacccttcttcctgtgctgacctccccctcctcacctcctcttcttcacttttttcgctttccccagcccaactgtacatgacacaccaaaatcacccccacatttcccaggttcttgctgcaggtaaagagtcccaaacaagaccaccatcattcccttctagtttgtggt

SEQ ID NO: 940765 - DNA, 741 bp, Homo sapiens
tactggggtcatctgtcaatcaatgaaaagtcagaaaaactgtactttcttttttgttgtttttgtttttagagactgggtcttgctctgtcacctagattggaatgcagtggtgcaatcatagctcactgcagccttgcactcttgcactcttgggcccaagagatcctcctccatcagcctcccaagtagctaggacaaaagccatgcaccatgcccagctaatttttttttttttttttttggagaccgagtcttgctctgtcacccaggctggagtacagcggcccaatcttggctcactgcaagctccacctcccaggttcatgccattctcctgcctcagcctcctgagtagctgggactacagccatctgccaccatgcytggctaattttttgtatttttagtagagacggggtttcactgtgttagccaggatggtctcgatctcctgacctcatgatctgcccgccttggcctcccaaagtgctgggattacaggtgtgagccaccacgctcggccgcccagctaatttttaataaaaattttgtagagacaggatcttgctctgttatccagtctcctcttgaactcctgacctcaagagatactcctgcctcagtctcccaaagtgctgggactacaaacataagccaccatgcctggccaaaaactgtactttctgagctacttcctgatctaaatttcatatcttgggaggcatcggataaacagaa

SEQ ID NO: 940766 - DNA, 688 bp, Homo sapiens
ttctaccagaggtgcaagaaggagctggtactattccttctgaaactattccaatcaacagaaaaaaagggaatcctccctaactcatttaatgaggccagcatcatcctgataccaaagtctggcagagacacaacagaaaaagataattttagaccaatatccgtgatgaacatygatgcaaaaatcctcaataaaatactggcaaactgaatccagcaacacatcaaaaagcttatccaccatgatcaagtgagcttcatccctgggatgcaaggctggttcaacatacgcaaatgaataaacgtaatccagcatataaacagaaccaatgacaaaaaccacatgattatctcaatagatgcagaaaaggcctttgacaaaattcaacagcccttcatgctaaaaactctcaataaattaggtattgatgggatatatctcaaaataataagagctacttatgaaaaacccacagccaatatcatactgaatgggcaaaaactggaagcattccctttgaaaactggcacaagacagggatgccctctctcaccactcctattcaacatagtgctggaagttctggccagggcaattaggcaggagaaggaaataaagggtattcaattaggaaaagagtaagtcaaattgtccttgtttgcagatgacatgatcgtgtatctag

SEQ ID NO: 940767 - DNA, 568 bp, Homo sapiens
ctgaagttaggtaaagagttcttagacatgacagtaaaacacaacctatagatgaaaaaagtgatcagctgactttatcaaaattaaaaacaagtgatctgcagtagacactgtcaagaggacaaaaaagacaacctaccaactggaagaaactatttgccaatcatacatccaacaaaggacctgtattcggaatacataaagaacactctaaactcaacaacagaaaaacaaacaaacaaatgaattaaaaaacaggcaaagcttattcactgaaaaggatacatggatggcaaataagcacatgagaagaaggtcatcatcattaaccattaggcaaatgcaaattaaaaccacaatgagatactacttccaaaccatattagagtggttaaaatgaggccgggcatggtggctcatgyctataatcctagcagtttgggaggctgaggcaggtgaatcacgaggtcaggagttcaagaccagcctggccaacatggtgaaaccccgtctctagtaaaaatacaaaaagttagctgggcatagtgacaggtgcctgtaatgccag

SEQ ID NO: 940768 - DNA, 784 bp, Homo sapiens
gtatgataattcctttaaaaattaaaaatagaattaccatatgatctagcagttctacttctgggtatatacccaaagaaattgaaagcagggacttcagtagatatttacacatccatgttccttgcagcattattcacaatagctaaaagttagaagcatcccaagtgtgcaccaacagatgaataaagaaaatgtatatgttactcatcctttgaaaggatggaaattctgacatattctacaggaatggatgaactttgaagacattatgctacgtgtaataagccagacaccaaaggacaaatattgtatgattccatttgtataaagtacttagagtactcaaatccatacaatcagaaagtagaatggtggtttccaggagctgagaggaggggagaatggggaattgttggttawtgggtatacagtttcagttggggaagatgaaacatttctggagagagtgatgatgattgcacaacaatgtgaatgtaggcctgagggaggattaagatggcagataggaggcaggactagcttgcagctcccactcagacagacagagcagtgtatagagactctcatcatgaacttttgctccaagaactaccacaggaacataccagggaagccgagagaatccacagaccctttgaaggaactggatcaccactgcagggttccctgagatgtcaaaaacctgtgtctgtttgctttctcagccagtggggaggcttgtggtctggggtaagttctcagccctgatcattggctgcct

SEQ ID NO: 940769 - DNA, 796 bp, Homo sapiens
tacaaaggggaccccggagaatctccaactggcctgcgcactgggagagtggggtggagccggggaagtttgccccgtttgcagcggggaggagcctggcccctcctgttcctgtgtggtaacctgggattcaatccgtgaggtggagagcccgcctgttagcaggacctcatctcactttgctgtgttgttctaactttttccttttcacccaataacttccattctccctcacccttcaaagtgactgcgagcctattctttcctgatcttgtgacaagaacccggtttttcctccaacacagtcctatcttgtattrtttcctgctctagtccgagattcagccatttctccaaggatccttggttccttttattggagaatggcattagagacaaagatctgggcattaggtgtgcttgtggctgcaggggtgtcattacttcttggccctcttagctgacggagcaaagagatacgtgaaaggaaaataaatctcgggactcccaaatcactaagccaaagggaaaagtcaagctgggaactgcgtcaggcaaacctgcctcctgttttattctgttgaatttcaccctggcaacgtaagttgatagctcatcttcacaagtatgggaaaaggacagaactcaaagtcatccctctgctcaccaaatgcctatctgattgcttcttcggccctattgtttatttattttaccgtatgtaaaaatgcagattcacagagccagacctctaccttgcccccgacctgtaaattttgtatttggtgaaaggctg

SEQ ID NO: 940770 - DNA, 796 bp, Homo sapiens
tacaaaggggaccccggagaatctccaactggcctgcgcactgggagagtggggtggagccggggaagtttgccccgtttgcagcggggaggagcctggcccctcctgttcctgtgtggtaacctgggattcaatccgtgaggtggagagcccgcctgttagcaggacctcatctcactttgctgtgttgttctaactttttccttttcacccaataacttccattctccctcacccttcaaagtgactgcgagcctattctttcctgatcttgtgacaagaacccggtttttcctccaacacagtcctatcttgtattgtttcctgctctagtccgagattcagccatttctccaaggayccttggttccttttattggagaatggcattagagacaaagatctgggcattaggtgtgcttgtggctgcaggggtgtcattacttcttggccctcttagctgacggagcaaagagatacgtgaaaggaaaataaatctcgggactcccaaatcactaagccaaagggaaaagtcaagctgggaactgcgtcaggcaaacctgcctcctgttttattctgttgaatttcaccctggcaacgtaagttgatagctcatcttcacaagtatgggaaaaggacagaactcaaagtcatccctctgctcaccaaatgcctatctgattgcttcttcggccctattgtttatttattttaccgtatgtaaaaatgcagattcacagagccagacctctaccttgcccccgacctgtaaattttgtatttggtgaaaggctg

SEQ ID NO: 940771 - DNA, 560 bp, Homo sapiens
gggtgcccagcaggtcctggcttgcctcatagcgcccacgcatgttctggggcgtggggatcacagagtctagcgggggtcctttgaggcctccagagcccacctactctcttctggttccagggatacacactagcctacgctaggcggggtccagggcctggacctgccctggggcaggataggggcctaggcctgagagccaggcttccactcccctcctatgtgccctcaccaccctctgaaccctcayctccctggggtcccggacaactcctatcaaagcccccgggatgccaaactcccaggcacactcgtctcctgggttctgatcccacccccagggctcccaggctcctcccccttgcatcctggttccactctcacactcctccctaccctggctctgcccctagttcccaagctctcatcctaggctgtgatttcccttgctagaccttttcccagggtcctggctctgtatgaccagggacctgtctccctctctaccaggaccctaacactgccgcagcctcctccctccaccggctgcccaagca

SEQ ID NO: 940772 - DNA, 703 bp, Homo sapiens
gatctcctctgatcctccatttcatcatctgttaaacggggatgaggataaactacataggcatgttatgaagacaaaatgaggttatgtctaaaatacttagctgggtgcttgacgcatagtaagtgctgagtcagtaatagggtttttgtttgtttgtttgtttttgtttgtttgttttgagatggagtttcactcttgttgcccaggctggagtgcaatggcgcgattttggctcacctcaacctccrcctcccaggttcaagcgattctcctgcctcagccttccaagtagctgggattacaggcacgcgccaccatgcctggctaattttgtatttttagtagagacggggtttcaccatgttggtcaagctggtctcgaactctcgacctcaggtgatctgcccacttcggcctcccaaagtgctgggattacaggcatgagccaccgcacccagcctgtttgattttttgagacagagtctcactcttgtcgcccaggttggagtgcagtggtgcgatctgagctcactgcaacttctgcctcttgggttcaagcgattctcctgcctcagcctcccaagtagctaggactacatacgtccgccaccatgcccagctaattgttgtatttttagtagagacagggtttcaccgtgttggccaggctggtcttgaactccttacctaaggtgatcca

SEQ ID NO: 940773 - DNA, 601 bp, Homo sapiens
gctgctgatctcctctgatcctccatttcatcatctgttaaacggggatgaggataaactacataggcatgttatgaagacaaaatgaggttatgtctaaaatacttagctgggtgcttgacgcatagtaagtgctgagtcagtaatagggtttttgtttgtttgtttgtttttgtttgtttgttttgagatggagtttcactcttgttgcccaggctggagtgcaatggcgcgattttggctcacctcaacctccgcctcccaggttcaagcgattctcctgcctcagccttccaagtagctgggattacaggcacgcgccaccatgcctggctaattttgtatttttagtagagacggggtttcaccatgttggtcaagctggtctcgaactctcgacctcaggtgatctgcccacttcggcctcccaaagtgctgggattacaggcatgagccacygcacccagcctgtttgattttttgagacagagtctcactcttgtcgcccaggttggagtgcagtggtgcgatctgagctcactgcaacttctgcctcttgggttcaagcgattctcctgcctcagcctcccaagtagctagg

SEQ ID NO: 940774 - DNA, 713 bp, Homo sapiens
aagttgctgctgatctcctctgatcctccatttcatcatctgttaaacggggatgaggataaactacataggcatgttatgaagacaaaatgaggttatgtctaaaatacttagctgggtgcttgacgcatagtaagtgctgagtcagtaatagggtttttgtttgtttgtttgtttttgtttgtttgttttgagatggagtttcactcttgttgcccaggctggagtgcaatggcgcgattttggctcacctcaacctccgcctcccaggttcaagcgattctcctgcctcagccttccaagtagctgggattacaggcacgcgccaccatgcctggctaattttgtatttttagtagagacggggtttcaccatgttggtcaagctggtctcgaactctcgacctcaggtgatctgcccacttcggcctcccaaagtgctgggattacaggcatgagccaccgcrcccagcctgtttgattttttgagacagagtctcactcttgtcgcccaggttggagtgcagtggtgcgatctgagctcactgcaacttctgcctcttgggttcaagcgattctcctgcctcagcctcccaagtagctaggactacatacgtccgccaccatgcccagctaattgttgtatttttagtagagacagggtttcaccgtgttggccaggctggtcttgaactccttacctaaggtgatcc

SEQ ID NO: 940775 - DNA, 608 bp, Homo sapiens
tggcttggccgggcgtgctgactcatgcctgtaatcccagcactttgggaggctgaggtgggcggatcacgaggtcaggagatcgagaccatcctagctaacacagtgaaaccctatctctcctaaaatcacaaaaaattagctgggcatggtggcacrcgcctgtagtcccagatacttgggagggtaaggcagaagaatcgcttcaacctgggaggcagaggttgcagtgagccaaaatcacgccactgcactccagcctgggtgacagagcgagactctgtctaaaaaaaaaaaaaaaaaagaagtggcagctctgtctgcttctcacagagttgctagggacaactgctgaggcaggcacctgccctcgggctccctgggtgggctgctatttgcctgtgggctctgcctgcccgcctgtccagtccccagggatctgaactgtgacctcccccttgctcttcttgccctttgcattgcctggcttggcctcattaatgtccccaaatctgtgttcttctctccagctcctctggcaacccctgacccccttcattcctcacagccagtcctaactctcctccatcccaaccccaatccctctt

SEQ ID NO: 940776 - DNA, 772 bp, Homo sapiens
cagcctccaggcccaacgcaggctccaggccagctcctgtagccccaggattcagactgaaacccaaagactcagcctccgggcccagtccagccccatgtcagccgctacaactctaggttccaggctcactagaatgccaggtcagtcctcacagccctagactccaggccagcacccatggacccacgctccagcaaacccaggacccatgcccactctatagactcagagtccaggcctgcctcagtaaactcagcatccacagccttaggcaccaggctagcacctgtgaacccaggctccagaccaagccccgtggacccagkctcaccccagcaccaggccaatcccaggctctaggctggtccctgtgaccccagactctaatagacccaggatccaagctcattccagcagacccagggtccaagtccaccctggtcaaccctagtgccaggttgccccacagatccaggctctaggattgcccctgtggacccaagatccagacaggtccccacaggcccaagaaccaggtctctttctgcatactcaagctccaggctcaccccagcaccaggctaacccccatggactcaaactcaaggcccatccacatggacccaggcacccagacaatcctagtgccaggctggcccccacagactcaggctcaaggcccactccagggccaggctggccagacttcaggccagcccctacagacacatgctccaggctcgcacccatgagctcagtcaacagactc

SEQ ID NO: 940777 - DNA, 640 bp, Homo sapiens
caggccagctcctgtagccccaggattcagactgaaacccaaagactcagcctccgggcccagtccagccccatgtcagccgctacaactctaggttccaggctcactagaatgccaggtcagtcctcacagccctagactccaggccagcacccatggacccacgctccagcaaacccaggacccatgcccactctatagactcagagtccaggcctgcctcagtaaactcagcatccacagccttaggcaccaggctagcacctgtgaacccaggctccagaccaagccccgtggacccaggctcaccccagcaccaggccaatcccaggctctaggctggtccctgtgaycccagactctaatagacccaggatccaagctcattccagcagacccagggtccaagtccaccctggtcaaccctagtgccaggttgccccacagatccaggctctaggattgcccctgtggacccaagatccagacaggtccccacaggcccaagaaccaggtctctttctgcatactcaagctccaggctcaccccagcaccaggctaacccccatggactcaaactcaaggcccatccacatggacccaggcacccagacaatcctagtgccaggctggccccca

SEQ ID NO: 940778 - DNA, 465 bp, Homo sapiens
ctctttaaatatcaagctctgctgttagaagggtctacaatccaattgaaaacttgtcctcacctaaacccaaccactttcctccccgaggaaactggggaacctgaacatgactgtgagcaagttgtggtacagacctatgcagccagggaggatctcagggacactcccctacaaaatccaggctggacccttttcatagatggaagttcctttgtagagcaaggagtctgtaaggcaggatatgcagtcatcactctgaatggtgtttttaaagtgcatccctctctscaggcacaagcactcaactagctgaactaatagctcttataagagcacttgaattaaggaagggaacagtagctaatatttacactgcctccaagaatgcttccttagttctctatgcttatgctgccatttggaaggaaaaacactttcttactgctaatggatctcctataa

SEQ ID NO: 940779 - DNA, 631 bp, Homo sapiens
aactgtacccatacatatttcagtatgtttattttaaaccccacaagatatcattttctatactactgtaattttataccaataacattcatttagatttacccacacgtttaccctaccctccgggtcctgtttgaaaatcaaacccatgctcacaggccaattttttttcttttagagacagggtctcactttgtcacccaagctggagtgcagtggtgtgattatagctcaatgcagcctccaattcctggactcaagggaccctcctgcctcagcctgccaagtagcttggactatagctgtgtgttttattattagtttgtagacatggggtctggctatgttgtccaggctattctcaaaattcccagcctggagcaatcctcctgcctcggtctctcaaaggttgggattaccggtgtgaggcaaggcacccagctcagccacagagccctgttgcatctctcttactaggagcaagagctgrctgccccctcatccccattccagagtgttggggctgtgttcagccgaggccaggccactggcatggcccagggagtgggatcattcactgctgcccaaatctgagatcattccaccttgacaacacttcctcatccaatcc

SEQ ID NO: 940780 - DNA, 624 bp, Homo sapiens
ctcaaaatttggccataatttttccctggggaattcaggttttaaaaaaacacttcccctatacttattcctatcacaatcccaggatcagggtggctcttcacattgaaaccaggcaaggatgccacacctttcttggcatccagattgttttcttggcaagtgattccagaatacttactagattcacgcctcagaggggccacctgcaccacctgcaatacagaaacaaaacttttgaggggtatgtcatgttgtggattgtttgcacaaggctctgtttctctcaatgaatactgaaaacttgatcagaagtgtagtcaacttcaaggcctccagaccaagggtaggatacacactggaaaagacatcagcttctggatggtgkatctctcaggtccacgtaggttggcaagtgcaaaatactgaatccaaggagaagacattgcttccaaggacaaggatcccaaggatacagtctacaacctgaagccgtcatagctaaatgccattttggattacatatcagttgctaagagtcacttcttcctccccctcagaaaactgcatttaatacctgtcatggacattgtcattttttcacatgtaaagtcagttgaaaaa

SEQ ID NO: 940781 - DNA, 717 bp, Homo sapiens
aacataattttggtagatgatacaacatgggtggacattgagaacattatgcttagtgaaataagccagacacaaaaggaatatattgtataattgtacttacatgaagtgcctagaatagtcaaattcatacaagagaaagtggataggaatcaccatgggctggaaatagggggaaggcgctatattgcttattgtggacaaggttttgtaagaaatcatcaaaattgtgggtgtagatagtggtgttggttatgcaaccctgtgaatatattgaatgccacggagtgcacactttggttaaaaggttcaaatgataaatattgtgttatatatatttcyccaagatagcaaacatgcacagccaagcccagatgccagtcttgttagctgccttcctttaccttcaagagtgggctgaagcttgtccaatctttcaaggttgctgaagattgtatgatggaagtcatctgcattgggaaagaaattaatggagagaggagaaaacttgagaatccacactactcaccctgcagggccaagaactctgtctcccatgcattgctgacccgtctcagtatttcctgtgaccacctcctttttcaactgaagactttgcacctgaaggggttcccaggtttttcacttcggcccttgtcaggactgatcctctcaactactgaccatttcacctccattcatgtccatgccacatca

SEQ ID NO: 940782 - DNA, 604 bp, Homo sapiens
gttttttggtaaatgctacactgcatacaatggtggtcgcttaagataacagagctgaaaaattcttaccatctagtaacactgtggccatgatgacatcatagcacaacgcattactcatgtgtttgcagtgaggctggtataagcaaacccactacatttgtcagtggcattaaaggttagcacatctaattatgtaccatatgtcatacttggtaatgataataaatgatcatgtgactagtttatgtacagttgctccttgaacagcatggatttgaaatgcacaagttcacttatatgcaaatttccttctgcttctcccacccctgagacaacaggatcaacttmtcctcttctcttcctcaggctgctcaacatgaatatgcagacgaagacctttatgatgatccactttcacttaatgaatagtaaacatatttcctcctccttatgattttcttaatagaattttcttttctctttctttaagaatacagtatataattaacaaagtatgcattaattgtttatttgatcagcaaagcttgcagttaagaataggctattagtagttaagtttggggatagcccagagttatat

SEQ ID NO: 940783 - DNA, 776 bp, Homo sapiens
catacaatggtggtcgcttaagataacagagctgaaaaattcttaccatctagtaacactgtggccatgatgacatcatagcacaacgcattactcatgtgtttgcagtgaggctggtataagcaaacccactacatttgtcagtggcattaaaggttagcacatctaattatgtaccatatgtcatacttggtaatgataataaatgatcatgtgactagtttatgtacagttgctccttgaacagcatggatttgaaatgcacaagttcacttatatgcaaatttccttctgcttctcccacccctgagacaacaggatcaacttctcctcttctcttcctcaggctgctcaacatgaatatgcagacgaagacctttatgatgatccactttcacttaatgaatagtaaacatatttcctcctccttatgattttcttaatagaattttcttttctctttctttaagaatacagtatataattaacaaaktatgcattaattgtttatttgatcagcaaagcttgcagttaagaataggctattagtagttaagtttggggatagcccagagttatatatggattttcaactgcacaggagctggtcccctaacccttgcactgttcaagggtcaacagtatttacaatactatacattttattcatattttagagtgtagtacttctactcatgaaaaataattaactataaaacagcgtcgggaaggtctttcaggagttcttccagaagaaagccttgttatcatagaag

SEQ ID NO: 940784 - DNA, 818 bp, Homo sapiens
atatggtcctgtgtggcataatggttttttggtaaatgctacactgcatacaatggtggtcgcttaagataacagagctgaaaaattcttaccatctagtaacactgtggccatgatgacatcatagcacaacgcattactcatgtgtttgcagtgaggctggtataagcaaacccactacatttgtcagtggcattaaaggttagcacatctaattatgtaccatatgtcatacttggtaatgataataaatgatcatgtgactagtttatgtacagttgctccttgaacagcatggatttgaaatgcacaagttcacttatatgcaaatttccttctgcttctcccacccctgagacaacaggatcaacttctcctcttctcttcctcaggctgctcaacatgaatatgcagacgaagacctttatgatgatccactttcacttaatgaatagtaaacatatttcctcctccttatgattttcttaatagaattttcttttctctttctttaagaatacagtatataattaacaaagtatgcattaattgtttatttgatcagcaaagcttgcagttaagaataggctattagtagttaagtttggggatagcccagagttatatatggattttcaactgcacaggagctggtcccctaacccttgcactgttcaaggrtcaacagtatttacaatactatacattttattcatattttagagtgtagtacttctactcatgaaaaataattaactataaaacagcgtcgggaaggtctttcaggagttcttccagaagaaagccttgttatcata

SEQ ID NO: 940785 - DNA, 730 bp, Homo sapiens
agtagctgggattacaggcccatgccagcacacccagctaattttgtatttttagtacagatggcgtttctccatgttggtcaggctggtctcgaacttctgacctcaggtgatccgcccgcctcggtctcccaatgtactatgtttttactgtatcttttccatgtttagatattactattgtgatataactgcctacagcagtggtccccaaagttttgacaccaaggactggttttgtgaaagataatttttccrtggagtggggatggctttgggctgaaactgttccacttcagatcatcagatcatcaggcattagattctattttttcttttttttttttttagactgagtctcccactgtcgccaggctggagtgcagtggcacaatctcggctcactgcaacctctgcctcctgggttcaagtgattctcctgcctcagccccccgagtagctgggactacaggcatgcgccaccacacccagctaatttttgtattcttagtagagacggggtttgcatgttggccaggagtgtcttgaccttgtgatccacctgcctcggcctcccagagtgttggattacaggcgtgagccacagcacccagcctagttagattcttataaggagcacacaacctagatcccttgtatgtgcagttcacaatagggtttgcgctcctgtgaaggtctaatgctgctgctgatctgacaggaggtggag

SEQ ID NO: 940786 - DNA, 730 bp, Homo sapiens
agtagctgggattacaggcccatgccagcacacccagctaattttgtatttttagtacagatggcgtttctccatgttggtcaggctggtctcgaacttctgacctcaggtgatccgcccgcctcggtctcccaatgtactatgtttttactgtatcttttccatgtttagatattactattgtgatataactgcctacagcagtggtccccaaagttttgacaccaaggactggttttgtgaaagataatttttccayggagtggggatggctttgggctgaaactgttccacttcagatcatcagatcatcaggcattagattctattttttcttttttttttttttagactgagtctcccactgtcgccaggctggagtgcagtggcacaatctcggctcactgcaacctctgcctcctgggttcaagtgattctcctgcctcagccccccgagtagctgggactacaggcatgcgccaccacacccagctaatttttgtattcttagtagagacggggtttgcatgttggccaggagtgtcttgaccttgtgatccacctgcctcggcctcccagagtgttggattacaggcgtgagccacagcacccagcctagttagattcttataaggagcacacaacctagatcccttgtatgtgcagttcacaatagggtttgcgctcctgtgaaggtctaatgctgctgctgatctgacaggaggtggag

SEQ ID NO: 940787 - DNA, 715 bp, Homo sapiens
gtactatgtttttactgtatcttttccatgtttagatattactattgtgatataactgcctacagcagtggtccccaaagttttgacaccaaggactggttttgtgaaagataatttttccatggagtggggatggctttgggctgaaactgttccacttcagatcatcagatcrtcaggcattagattctattttttcttttttttttttttagactgagtctcccactgtcgccaggctggagtgcagtggcacaatctcggctcactgcaacctctgcctcctgggttcaagtgattctcctgcctcagccccccgagtagctgggactacaggcatgcgccaccacacccagctaatttttgtattcttagtagagacggggtttgcatgttggccaggagtgtcttgaccttgtgatccacctgcctcggcctcccagagtgttggattacaggcgtgagccacagcacccagcctagttagattcttataaggagcacacaacctagatcccttgtatgtgcagttcacaatagggtttgcgctcctgtgaaggtctaatgctgctgctgatctgacaggaggtggagctcaggaagtaatgctcggctggccagccactcatctcctgctttgtgcccagttcctaacaggacacgaaccggtgctggtccatggcttgggtgttggggactactggcctactgtatt

SEQ ID NO: 940788 - DNA, 730 bp, Homo sapiens
agtagctgggattacaggcccatgccagcacacccagctaattttgtatttttagtacagatggcgtttctccatgttggtcaggctggtctcgaacttctgacctcaggtgatccgcccgcctcggtctcccaatgtactatgtttttactgtatcttttccatgtttagatattactattgtgatataactgcctacagcagtggtccccaaagttttgacaccaaggactggttttgtgaaagataatttttccatggagtggggatggctttgggctgaaactgttccacttcagatcatcagatcatcaggcattagattctattttttcttttttttttttttagactgagtctcccactgtcgccaggctggagtgcagtggcacaatctcggctcactgcaacctctgcctcctgggttcaagtgattctcctgcctcagccccccgagtagctgggactacaggcatgcgccaccacacccagctaatttttgtattcttagtagagacggggtttscatgttggccaggagtgtcttgaccttgtgatccacctgcctcggcctcccagagtgttggattacaggcgtgagccacagcacccagcctagttagattcttataaggagcacacaacctagatcccttgtatgtgcagttcacaatagggtttgcgctcctgtgaaggtctaatgctgctgctgatctgacaggaggtggag

SEQ ID NO: 940789 - DNA, 715 bp, Homo sapiens
gtactatgtttttactgtatcttttccatgtttagatattactattgtgatataactgcctacagcagtggtccccaaagttttgacaccaaggactggttttgtgaaagataatttttccatggagtggggatggctttgggctgaaactgttccacttcagatcatcagatcatcaggcattagattctattttttcttttttttttttttagactgagtctcccactgtcgccaggctggagtgcagtggcacaatctcggctcactgcaacctctgcctcctgggttcaagtgattctcctgcctcagccccccgagtagctgggactacaggcatgcgccaccacacccagctaatttttgtattcttagtagagacggggtttgcatgttggccaggagtgtcttgaccttgtgatccacctgcctcggcctcccagagtgttggattacaggcgtgagccacagcacccagcctagttagattcttataaggagcacacaacctasatcccttgtatgtgcagttcacaatagggtttgcgctcctgtgaaggtctaatgctgctgctgatctgacaggaggtggagctcaggaagtaatgctcggctggccagccactcatctcctgctttgtgcccagttcctaacaggacacgaaccggtgctggtccatggcttgggtgttggggactactggcctactgtatt

SEQ ID NO: 940790 - DNA, 751 bp, Homo sapiens
aaaggatggtcaatggattgaatcatttgaaagaaaaagaaccccaatatgaaaaagagaaagcagaaagagaagtaagtatcaagaaaaataagtatttttcaaacttcctgaagcaaaatttaaagtaatatttggttacagctgaatrttggatctagttgaatataaaaaaggatacatatgataaatatatctgcttagaaacattccttgtttccaacaagtcaaagttagatctgagagatgttttcctctgattaaagtcaatgtgtcacttataaaattttaagttataaaatgttaatatagactaatagtaataatatagtcatactactgaaataataattttaatgtatttatgttgcaacattttaagaccatgataaatcagatatatggaaatgctcatacctaaaatggtattttgaagttgattcaataaagtggggtactttgacagttaatttcagatttcctagatgagctgaagtgtattccctatttcataattacttttcttcagtagctttaaatatgtcttagttggtaaaattttgtttttcttcatgtcagtttgacttaaatctgaaactatttcaatctcaagttatgtatagatatgatcattctattttcaaaggcatttaattttacttataatatggggaaaatgcagtaaattttagccaaatcatatttgatttaatcttcccactggcatttataatttactttcatttttaaa

SEQ ID NO: 940791 - DNA, 516 bp, Homo sapiens
ccagtgatggtgtcattgtcaaggggccattgaaatgtccttaagcagtcattggccaaatcctgtcctctatggatccagagccacagaatgttccagcagaaatatgtcttagccagcagctctttattgaggactgattgtgggctaggctctgtgctagggtctttacagatgttactaaatcttctcaataaccctatgagacaggcattattatccccatcttaccgatgagaaaactgaggcttagagaggttaagcagcttatccaagaccacagttaataagtgacaaagccagcatcggaacccatgctagtsctctctaaagccttcttagaaatcatgtgatagatgagaagatcaaggtctggagaagaaaagcaagttgtctgagatgacacaatcagctctaattggtggcaaagctgcgcctataactcacctgcgcttttcacaacctgcagtacgtgaccactgccgaaatgaagaggcagcattgtgccccctccca

SEQ ID NO: 940792 - DNA, 633 bp, Homo sapiens
ccccacattctaactatgtgggtttccaggcttgctcaagcaacagagcaccaccaaacagtagccctttcaataaatgagccaggacttgcataagcgtccactgggatgacagtaggggatgagagtgaggtcctgcaagtcattctcctgcttaagacaagtgaaagrattttcttccttgatgctgcagttgcccttttaatcccttattttgaattgataacagtggggatgagtctttaatctaaagaggaatattgttgttattaatgatgatgaaaaataattacctcatctaatcctgtcaatgtcatgccctaagaagtaggcactattagtatctccatttttcacatgagaaattggagctttggtaggttaaggaagaaccacaggattacagagttaagaagtctccaaatccagccccttaaccattagtgctatagatggtgactgttcaggagcctgattatctctatgaatcatcctggtatgactcctgggggaggtcgccctcctgggaaaattgctattccctgccccatccagaccttttatttttcacataaaacaagcacatccagaatggctagcaggcatcctcactataataagagctacattttg

SEQ ID NO: 940793 - DNA, 542 bp, Homo sapiens
ccattcaataaggaatattgagagacccacagccgctgagactgcagaaccctgcatttaggacaattgtcccaccccactggaggtccccacctgctctgttcttggatttcatgagggacgtgagaaagggactggaggccgactccatctgcttcccttctcrgcaccagtgcactaagggaccaggaaaagaggtgttgggactgtgtggttgtgttttcctcctgcgcaaggaggaaattggctttggggttttcttttcctgttttctcatggaatctcaagatttctaggagcaaccctgcctacatgcaatcagtccctgagaggattgtgatgtctaattccaggggaggagcaaatgcacgaggatctcattgggaagggttaggctagcgctgctcagggggaattgtggtgggcctttctttggagtcttggaaactcttggactgggcctcagcaggatactaaaagcaacactagcctgagagctcaaaaggggccccgagagcctctgctccacactgcttgctttg

SEQ ID NO: 940794 - DNA, 824 bp, Homo sapiens
ctgaagtcctgagtaactcttgctacaattctgaacaaaacaaaggaaaatcctctcttgactgacctggcatgtattaaaaccatgcaaaataaaagtattgtgattatagtaaaatgaaagtaggttctaggctcagaggcataatttttgcccatatgaatgtcattcgaaagtcacacaggacacgaggcagagttttgttgcatggagttgtcccagatacgattttacatctttaatggctttattccattgaatatatacccctccccaaatcaatatggcaaccagagacctgcttgcaattagctgccttattgagaactgctgtcacgggctgtggggtgggcagccgtgggcagtagcatgccccatttgccatttagggaaatcccctggctgtggctaggccgagagggagggagtgtcatatgcaggccaattataagaggctgagaaagagatcattgagggcccaaatagggaatggtcatgtggagagagcagggagccaaggggtgttaaggacagagggactcaggggtagtaacagtttgagtggcaggcgcctgtgccactggcttcccatgcagctcaccctgcattctttccttgtctctcatctgacttgcttctctccacttgaaacatytctcctgccgcagccactggccacctctatctctagcattactgtctgttgtctttaataaagagcagtgtcttcctccctcagtgcccatctctttgcacctgccactctggctgctgctcacaccactgcacagaaaccgctttctccagacttaccggcaaccacc

SEQ ID NO: 940795 - DNA, 544 bp, Homo sapiens
ctgtcttgtggcatgtctgtgggtgcggccccctgacacaggcagggcaggcacagcccaaggaccttgcaggccgtagcagcagtggagcggccctctgccttcaggaccctgcgctgataatgggatgaggagatacagacccttcccaccacgtgtggggacacattctgagcgtggggacacattctgagcgtgaggtccccagtggccactgtggctggccatgtgtcctgagtggcaagggacactagaatgttcccggaagggacactaggaggatgagcgctgagtgacagggccacccacctgtgacaggcgctgcccctgctttgtgctggtctcctgtgtgggcaggtgtggggggtggtctagctragtccaccccacctgctgcctcacatgagccccctctgccccagtgaggtgttctgccgggatagaaaggtgcttcgggagggggagagactgaccctgccgcgggtggctgacacctatgagacgctggccattgagggtgcccaggccttctacaatggcagcc

SEQ ID NO: 940796 - DNA, 558 bp, Homo sapiens
atctgggaaggagtcagtcagagagccttgggccagagttccaggggctctgggagtggctgccaggtgagttgaatagtccgattttcagtggggtcccacacagatgggacgcggcttaggaggaatcccgggctrcgggcattccttggcccggtggccagatttccagcacgtgtagcaagctcctgggggaggaggttctggaggaatgcctagctgctgcggttcaggcatttggaagttcttgtgtgctggagatgcggctggggtttgtctcacagtggaggcaaggaattgcaactttttttctgttattgtacaccttgaaggtgaggttaattaagtcctgttgtggggtttgagggccagattccaatttttggagttttatttaatgtcgggagcagattgggtaataaaatgtattttgagaataagacggccttttgaccttttagggtctagggctgtaaagtgtctcagggttgctgccaaacgagccatgaactgggctggatttttatatttgatgaaaaagagcctaaacactatctg

SEQ ID NO: 940797 - DNA, 554 bp, Homo sapiens
ggttaggaatgaagagttaatttcaaaaatgactcctgtgtggctttattggcccagctttcttcctgcctcagcccctgctgcatgccttggctaacagcatctcattatgtttttagcagcaatagaagcaactttttcttggctctgtttccaccaccgccatgaggatattatctttttcctttttcttatatatttatcctttaaacccaaaaagatacttttaatagatatgtataataaggtataaagtttrtaataactataataaatagcataacttataaagtataataataaaatgaacatatgtgaacctaccacccaacttaaataaaacaacattaatgctgttgaagctacctgtgtgtccctccccaatcacttctctcctctccattctccagaattttttttttttttttgagacggagtcttgctctgtcgccaggctggaatgcagtggcacgatctcagctcactgcaacctctgcctcccgggttcaagcgattcccctgcctcagcctcctgagtagctggaattacaggc

SEQ ID NO: 940798 - DNA, 610 bp, Homo sapiens
tgcccccctcagccccgggatgcagcttccaccctgagaaaactttactagttctgggctcttctctcccccttcctaaaggcttccaatttgctagaggtgggaggggggctatggctgactccagggctggatgacacatctcctccgtccccccaccttgctgcctctactcctgctgctggggacaggcagcaacagggacagatggtctgggtgatgtccctccccttctctactcactcccaagcccttgtgctggagccactgggagttgtggctctggagagatgctgagtttgtgtccattcactggaggtgtaaatagaggcccagagctttgggctctagctcctcagagctatttacccaggcctagacaatgcctgttcattctctagagagagaaatggaggctctgagagttkttttttttttttttttacaaaattggagagaaacccaggcgtcctgcctcctgtctcttcaggtttttgagctaacacatttcaagtggcccggaaactgaggaggcaggggtggttaagctatgggagaaaggatggcctagttgggggatgagggccaggtctgagaatctactcttggg

SEQ ID NO: 940799 - DNA, 652 bp, Homo sapiens
aagtgaaagtggatcattataaaggtcttcatcctcatcattttcctgctgagcaggctgaggaggaggaagtgggggttggtcttctgtctcaggaatggcagaggcagaagaaaatctgcgttggctgggtccagtggtccatgtctgtaatcccagcactttaggaggccaaggtgggcagagcccctgaggtcaggagttcgaaaccagcctggccaacatggtgaaacccgtctctactaaaaatacaaaataattagctagacrtggtgccgcccacctgtagacccagctacttgggaggctgaggcaggagaattgcttgaacctgggaggtggagattacagtaagccgagattgccccactgcactccagcttgggcgacagaatgagactccatctcggaaaaaaagagaaaatttgcgattaggtggacccacgcattacaagttcatgttgatcaaggccaaatgtacttgcaaaacataccattggctgtcagtgtgatggacagagaggagaatggatttgagaactagaccagcctaagtttgaatcctgtctctgccactttgtagtcttgtcactttgggcgagtttcttaacttctctgcacctaatttccccatctgtacaatggggataac

SEQ ID NO: 940800 - DNA, 594 bp, Homo sapiens
tgctgtccctgggatatttttacctctctcttattcattttgtttttaaataattttgttgacacataatttacattgccataaaaggttgccaattgtaatgtactattcagtaggtttcagtatatttacagcattgtataaacatcatcagaatgtttccatcacctaaaaagaaactttgtgcccatcacagtcgcttcccatttccactgccatccccaggcagccagtaatcctccctcagtctctatatatttgccttttttggatgtttcataaaaatggaagcaaaaacctgtggtcttttgtatctgacttctttcactgagcataagttttttaaggttcatccacattgtagcatgcatcartatttcatttctttacattgatgaataattcattataaatctaccacatcttatttattcatttatcagttgatggacatttgggttgtttccactttttggctactatgaataatgctgctatgaacattgtgtacagacttttctatgaacatatgtttttatttctcttgggacctctacattgaattttctgaagaactgccaaattgttttctaa

SEQ ID NO: 940801 - DNA, 756 bp, Homo sapiens
ctcatacagcaaaaaaggatggactcatcacacccagtcaagaaagtgccacccccgccacagagttgtgggccatagtcccagaggaaaaccctaccaaactaaagctaagaaaaatctaacgcttttcatctattactctttcttctttcygcgctctattgctgaccctctagttattaacataaccaagtcaattttgcctcaaactattgcatttaatgcttgcccttttataccctgtggggacgtgccaagtcaaagacagctctctacttcagaaaagcacttctgtccccctgactctcctcagactgggcgttagtaaactaggaccatttaatcccgggagatttcgataaacaccccagtgccaaccaggagtcttgccccccgatgtagagcttccctgccatagttggtccaatgttctgtggaccactaaagagcaaggatggactgccccaaccagtttttgtaatttcctaaaaccatacattcattttactagaggattatagaagttaaagacttaaaacaaactttagcaattaagacaggataccacgatgcaaatgcctagttaaaatggatcaaatattccatctgcacgttaaacaaaagcaattgttatgctcgtgcacatggcagaccagaggcccagattgtcccctttccactaaggtggtcctccagtcgaccaggcgtgggctgcatggtagctcttttccaggattctacagtctggagtaacaa

SEQ ID NO: 940802 - DNA, 756 bp, Homo sapiens
ctcatacagcaaaaaaggatggactcatcacacccagtcaagaaagtgccacccccgccacagagttgtgggccatagtcccagaggaaaaccctaccaaactaaagctaagaaaaatctaacgcttttcatctattactctttcttctttccgcgctctattgctgaccctctagttattaacataaccaagtcaattttgcctcaaactattgcatttaatgcttgcccttttataccctgtggggacgtgccaagtcaaagacagctctctacttcmgaaaagcacttctgtccccctgactctcctcagactgggcgttagtaaactaggaccatttaatcccgggagatttcgataaacaccccagtgccaaccaggagtcttgccccccgatgtagagcttccctgccatagttggtccaatgttctgtggaccactaaagagcaaggatggactgccccaaccagtttttgtaatttcctaaaaccatacattcattttactagaggattatagaagttaaagacttaaaacaaactttagcaattaagacaggataccacgatgcaaatgcctagttaaaatggatcaaatattccatctgcacgttaaacaaaagcaattgttatgctcgtgcacatggcagaccagaggcccagattgtcccctttccactaaggtggtcctccagtcgaccaggcgtgggctgcatggtagctcttttccaggattctacagtctggagtaacaa

SEQ ID NO: 940803 - DNA, 777 bp, Homo sapiens
tctgtggaccactaaagagcaaggatggactgccccaaccagtttttgtaatttcctaaaaccatacattcattttactagaggattatagaagttaaagacttaaaacaaactttagcaattaagacaggataccacgatgcaaatgcctagttaaaatggatcaaatattccatctgcacgttaaacaaaagcaattgttatgctcgtgcacatggcagaccagaggcccagattgtcccctttccactaaggtggtcctccagtcgaccaggcgtgggctgcatggtagctcttttccaggattctacagyctggagtaacaagacgtgccaagctctctctgctatatcccaaagtccagcaccctgagggtcagcccccgagggccatccagcttccatcttccaacactaagttcatttcgtgtctctcatgacagggaggaaacttagcattccttggatacctgaaaggatgcagtgagcttaagaattttcgagagcttatcaatcagtcagcccttgttcatccctgagcggatgtgtggtggtattgtggtggacctttactgggcactctgctgaataactggagtggcacttgtgctttagtccaattggctatccctttcaccctggcatttcatcaaccagaaggaaaaaaaataagacactgtaaagcgagagaagccccttacgggtctttcgactctcgtgtctatttaaatgcaactggagtcccacgaagaatagcagatcaatttaaagcttgaaa

SEQ ID NO: 940804 - DNA, 836 bp, Homo sapiens
taaacaccccagtgccaaccaggagtcttgccccccgatgtagagcttccctgccatagttggtccaatgttctgtggaccactaaagagcaaggatggactgccccaaccagtttttgtaatttcctaaaaccatacattcattttactagaggattatagaagttaaagacttaaaacaaactttagcaattaagacaggataccacgatgcaaatgcctagttaaaatggatcaaatattccatctgcacgttaaacaaaagcaattgttatgctcgtgcacatggcagaccagaggcccagattgtcccctttccactaaggtggtcctccagtcgaccaggcgtgggctgcatggtagctcttttccaggattctacagtctggagtaacaagacgtgccaagctctctctgctatatcccaaagtccagcaccctgagggtcagcccccgagggccatccagcttccrtcttccaacactaagttcatttcgtgtctctcatgacagggaggaaacttagcattccttggatacctgaaaggatgcagtgagcttaagaattttcgagagcttatcaatcagtcagcccttgttcatccctgagcggatgtgtggtggtattgtggtggacctttactgggcactctgctgaataactggagtggcacttgtgctttagtccaattggctatccctttcaccctggcatttcatcaaccagaaggaaaaaaaataagacactgtaaagcgagagaagccccttacgggtctttcgactctcgtgtctatttaaatgcaactggagtcccacgaagaatagcagatcaatt

SEQ ID NO: 940805 - DNA, 836 bp, Homo sapiens
taaacaccccagtgccaaccaggagtcttgccccccgatgtagagcttccctgccatagttggtccaatgttctgtggaccactaaagagcaaggatggactgccccaaccagtttttgtaatttcctaaaaccatacattcattttactagaggattatagaagttaaagacttaaaacaaactttagcaattaagacaggataccacgatgcaaatgcctagttaaaatggatcaaatattccatctgcacgttaaacaaaagcaattgttatgctcgtgcacatggcagaccagaggcccagattgtcccctttccactaaggtggtcctccagtcgaccaggcgtgggctgcatggtagctcttttccaggattctacagtctggagtaacaagacgtgccaagctctctctgctatatcccaaagtccagcaccctgagggtcagcccccgagggccatccagcttccatcttccaacactaagttcatttcgtgtctctcaygacagggaggaaacttagcattccttggatacctgaaaggatgcagtgagcttaagaattttcgagagcttatcaatcagtcagcccttgttcatccctgagcggatgtgtggtggtattgtggtggacctttactgggcactctgctgaataactggagtggcacttgtgctttagtccaattggctatccctttcaccctggcatttcatcaaccagaaggaaaaaaaataagacactgtaaagcgagagaagccccttacgggtctttcgactctcgtgtctatttaaatgcaactggagtcccacgaagaatagcagatcaatt

SEQ ID NO: 940806 - DNA, 776 bp, Homo sapiens
taggtgaggttaggaagacttccaagatgagatgatgcttacattgaatatttgagggagaataagagtaaagaagccaaggggaggccagtgtttatggcaaagagaacagtgaaatagcatatctagtttggggaattggaaaatgtatgctcttggatggaatgagcaaagctatgggagatgtggctagagaaggatcccatcatgacgggctttgaatgccatcccaaagaacttaaacgttcctaaatgcagtgggaagttatggaagaattttaagcagaggagtaacatgttcagatttggtctttaataagattactatggcatcagtgaggtggccttgaggaaattacattaaagttaggtacattagaagtaatgaggacttggaatttargtgaactggtgatagggatggagactatgaaataatcaatattggctggacatggtggctcatgcctataatctcagcactttgggaggccgaggcaggtggatcacttgaggtcaggagttcaagaccagcctggccaacacggtgaaacccagtctctactaaaaatacaaaaaattagccaggcgtggtggcacacctgtagtcccagccacttgtgaggtgggagaattgcttgagcctgggaggcggaggctgcagtgagctgagatcatgccactgcactccagcctgggcaacagagtgaggctccctcttggcagggggggaagtcgatatttaggaggcagtcttaaatttagaacctaacaca

SEQ ID NO: 940807 - DNA, 682 bp, Homo sapiens
  misc_feature 135: n = A,T,C or G
cagatgatccagcagcaggaatgagggtgcctgtggcaagcaccagcccatgccatcaccctcacagagccccgggtatgtttgaccattgagggccaggaggttaactgtctcctggacactggcacggccttncacagtcttactctcttgtcccggaaaactgtcctccagatctgtcactatccgaggggtcctaggacagccagtcactagatatttctcccaaccactaagttgtgactggggaacattactctttcacatgcttttctaattatgcctgaaagccccactcccytgttagggagagacattctagcaaaagcagcggccattatacacctgaacacaggaaaagaacacccatttgttgccctctgcttgaggaaggaattaatcctgaagtctgggcaacagacggacaatatggacgagcaaagaatgcctgttctgttcaagttaaactaaaggattctgcctcctttccctaccaaaggcagtacccccttacacccgaggcccaacaaggactccaaaagattgttaagaaactaaaagcccaaggcctagtaaaaccatgcaatagcccctgcaatactccaattttaggagtacagaaacccaatggacagtggaggttagggcaagatctcaggattatcagtgaggccattgtccc

SEQ ID NO: 940808 - DNA, 798 bp, Homo sapiens
cactgacctcttgctgtctctcaaatgggccaggtacacttaagacttagggcattgcactagctgttccctttttccccagatatcaacatggcttatgccctcatctttgcattttttttctcaaatgccacctcttcaatgaagccaataccaacaactctttgaagttacaaacaacyccccatgaatttcaatccccctcttctactctattccccccaacaccactttctaacataaaaataatttacttatttatatttatgacctctccacctctcctagagtataagctctacaaggccagggaccttggttttattccttgatgtagcctgagatccttgagcagtgcctggcacatagtaggcattaaaaaatgtgttgagtctgggcacgatagctcatgcctgtaatcccagcactttgggaagccaaggcaggtggatcacttgagctcaggagtttgacaccagcctgggcaacatggcgaaaccccgtctctactaaaaatacaaaaaattagccacatgcctgtaatcccagctacttgggaggctggggcacgagaatcacttgaacatgggaggcggatgttgcagtgagccaagatcatgtcactgcactccagcctgggcgacagagcaagactctgtctcaaaaaaacaaaacaaaacaaaaccaaaaaatgtgttgaatgaatgaatctctgtaacctccctcaaatcccagagatggagttactcttttacctattttttttaactttttgtacataccactcatttagtccat

SEQ ID NO: 940809 - DNA, 678 bp, Homo sapiens
ttgggacagaacacacgcagcttcagtcagttggtaaacgggtccctttcctctggggcagaaacgctttggggtttgactcaaatcatggactccttgggggcctattcttcgggctaactctttgcatgttctgcagggagccaaacaagccgctcctacacttcgctggtcctgggcgtcctggtgggcagtttcatcattgctggtgtggctgtaggcatcttcctgtgcacaggtggacggcgatgttaattactctccagccccctcagaaggggctggattgatggaggctggcaagggaaagtttcagctcactgtgaagccagactccccaactgaaacaccagaaggtttggagtgacagctcctttcttctcccacatctgcccactgaagatttgagggaggggaratggagaggagaggtggacaaagtacttggtttgctaagaacctaagaacgtgtatgctttgctgaattagtctgataagtgaatgtttatctatctttgtggaaaacagataatggagttggggcaggaagcctatggcccatcctccaaagacagacagaatcacctgaggcgttcaaaagatataaccaaataaacaagtcatccacaatcaaaatacaacattcaatacttccaggtgtgtcagacttgggatggg

SEQ ID NO: 940810 - DNA, 678 bp, Homo sapiens
ttgggacagaacacacgcagcttcagtcagttggtaaacgggtccctttcctctggggcagaaacgctttggggtttgactcaaatcatggactccttgggggcctattcttcgggctaactctttgcatgttctgcagggagccaaacaagccgctcctacacttcgctggtcctgggcgtcctggtgggcagtttcatcattgctggtgtggctgtaggcatcttcctgtgcacaggtggacggcgatgttaattactctccagccccctcagaaggggctggattgatggaggctggcaagggaaagtttcagctcactgtgaagccagactccccaactgaaacaccagaaggtttggagtgacagctcctttcttctcccacatctgcccactgaagatttgagggaggggagatggaraggagaggtggacaaagtacttggtttgctaagaacctaagaacgtgtatgctttgctgaattagtctgataagtgaatgtttatctatctttgtggaaaacagataatggagttggggcaggaagcctatggcccatcctccaaagacagacagaatcacctgaggcgttcaaaagatataaccaaataaacaagtcatccacaatcaaaatacaacattcaatacttccaggtgtgtcagacttgggatggg

SEQ ID NO: 940811 - DNA, 593 bp, Homo sapiens
cgtgcatggtggcacatgcctgtaatcccagctactcgggaggctgaggcaggagaaccgcttgaacccaggaggcagaggttgtggtgagccgagatcatccacataaatggtgttctctggctataccaaaattaaataagaaatcaataatagaaaactcccccagcctgaccaacatggcaaaaccctgtctctactaaaaatacaaaatgtcattgcataacattgtatgcaatgtctaatgttattagacataatgttattgcacatttattagactataatatagtataaacataacttttatttattattgtttttctttttagacgaactcttgggcrtgatagtgcgcgcctgtaatctcagctattcaggaggctgaggcaggagaattgcttgaatccaggaggtggaggttgcagtgagctgagatcgcaccactgcactccagcctgggtaacagaacaagactctgtctcaaaaaaaaagaaaaaaaagaaaaaaaagagaactctcaaatatttagaaattgttaatatacttctaaataatccatgggtcagagaaaaaatcttaaagtaaatcag

SEQ ID NO: 940812 - DNA, 593 bp, Homo sapiens
cgtgcatggtggcacatgcctgtaatcccagctactcgggaggctgaggcaggagaaccgcttgaacccaggaggcagaggttgtggtgagccgagatcatccacataaatggtgttctctggctataccaaaattaaataagaaatcaataatagaaaactcccccagcctgaccaacatggcaaaaccctgtctctactaaaaatacaaaatgtcattgcataacattgtatgcaatgtctaatgttattagacataatgttattgcacatttattagactataatatagtataaacataacttttatttattattgtttttctttttagacgaactcttgggcgtgatagtgcgcgcctgtaatctcagctaytcaggaggctgaggcaggagaattgcttgaatccaggaggtggaggttgcagtgagctgagatcgcaccactgcactccagcctgggtaacagaacaagactctgtctcaaaaaaaaagaaaaaaaagaaaaaaaagagaactctcaaatatttagaaattgttaatatacttctaaataatccatgggtcagagaaaaaatcttaaagtaaatcag

SEQ ID NO: 940813 - DNA, 642 bp, Homo sapiens
ttagaagaaatattcatgtgggttgactgtagcagaaatgtgaataacaatataactcaactgggaaaagtgcagatctataaattttttcatttctctggacttactcacttgggtgatttcatttgaaggtcaccaaagagttcaaaaatacagttgacagcataaagtgataagattgtcctttcagtctcaaaactctttgcaacttattttgttgaatcttggtgctagatgccaacatyaaggcagggcacatggcattttcttcacaaagatgtgattacaccaaaagcagtataatcaatatgtaatcactgttactttccacaatagaaataactgattgacaaaacaatgggtcaaatcaccgtcaattttattgccataggaggctcttttctcaaattacaatataaattattgctctataccctttcattaaatgtagttttttatttcaccattatagaaaattctatgcttgaattccctataaagtcatataaggttattaactacaggggctttgagcttgatgtttgggtactttaattgtcactgtaattgattttacctttgacttgctgtagtgattgccttgtaatttgttgatgattaatgaccatcctctgggtattg

SEQ ID NO: 940814 - DNA, 535 bp, Homo sapiens
ccaacccagcgtcctcccccaagccagggttattttgaagcaaatcccagacattatataatttcatgtatgaatatttccttatgtatatctaaaaaattaggaattctcatttgaaaaacataaacttaaggggtatagcccatctaaaataataactcctaatatcatcaaatatctagccaatgttaaaattttgctagtaacctcataacatttttttaagtttgtccagaaataaggtccatactggtcatggagcagtgtgactcttcagtctctgtctgcagttgctgccaccgtacctgtctctgttgtttcttttttatgtatttattgaagaagccacattgtactgtagagcgtccaccccacagtctggattctktttttgtatcctggtggtaacataaaggtgttgttctgtcccctctttagctgtaaattgggagttagatctagatgcatgattagatgcttttttttgtttttggcaagagttctttgtagcaggtgacgtttgcgccacctcctg

SEQ ID NO: 940815 - DNA, 599 bp, Homo sapiens
aatccctaggtgaggacatttttccagtggaagtttagcctccagattcccgtgtcactatttttatagttttcaatagctttggcccttcccagcagactgggaaggcctggaacataccataatgctcatatttaagcaacaaataaaaaaaaaccctattgctgtcaagattgttggtattgtattaatctttatgttagaaatctccttggaaacctagaggggaataaaggttctttacaatgggatagrgaactttagatttatgatgtttcaccaaaccatctttgctttgggctttttcactgagtaaatatcaaagttagtagtaagggcagaaacttggtcctttttggactcattatattggaaattgaataaaatgactgaaacagagacagttaaaaggtgtcagttgggtttctttttctttttttctttctttctttttttttttttttgtagacagagtctcactgtcacgcaagctggagtgtaatggcacgatctcggctcactgcagcctccacctcctgggttcaagcgatttcctgcctcagcctcctgagtagctggaattacaggcgtgtgccatc

SEQ ID NO: 940816 - DNA, 567 bp, Homo sapiens
gaaatctcacttctggcgtctgcacctggaggggacaggccttgtgaagtgggcacaggaccaatcttgggggccctatttgaattaagggtttctaagaccagcaggtcttctctaatatcctcagagtcaatcaggagggcagggaagatgagctgcaaatgggggcccaggagcctaggtcccaagtcctaaataactgtgtaatggccgggtacggtggctcacgcctgtaatcccagcactttaggaggctgaggcgggcggatcacgaggtcagragatcgagaccatcctggctaacacggcgaaaccccatctctactaaaaatacaaaaaattcgctgggtgtggtggtgggcgccctgtagtcccagctactcaggaggctgaggcaggagaatggcgtgaatccgggaggcggagcttgcagtgaggcgagatcgcgccactgcactccagcctgggcaacagagcgagactctgtctcaaaaaacaaaaacaaaaaaacaaacaaacaaaactgtgtaataatatggcaggcggatatcttttttagattttcaa

SEQ ID NO: 940817 - DNA, 727 bp, Homo sapiens
atattccaaatttgattatattccaaatttgattatattcagattcaaccttgaggacattagaaatatagatggcttctgtatccaaatctgaatggaaatgagattacccttctgggttcagatacccctcccaagcccccgtcttttctgtaaccacccctcctctgagccccatcatggctggggttggtatggaatgggagcagctctgtatctggggaagtcctccagcctcaccttcttggctcttaagtggtaggctgttaccacttgccagcctgggcctcctctctccccaccctttcacaaggcaggctgcccttccgcactcactggcccatcccttctttctcatcgtcccacccttccacccccgtgcatggctgctgtaggtctggtttttttggtttttgttttttttaagacggagtctcactctgccgccaggctggagtgcagtggcagaatcttggctcactgcaacctctgcctcccrggttcaagcgattctcctgcctcagcctcccgagtagctgggactacaggcacgtgccaccatatccagctaatttttgtatttttagtagagatggggtttcaccatgttggccaggatctcttgacctcgtgatctgcccgcctcggcctcccaaagtgctgtgattacaggcgtgagccaccgtgcctagccaggtcttgttttgaaaacctcactgtgggagat

SEQ ID NO: 940818 - DNA, 711 bp, Homo sapiens
ttctgggtcggttggggacttggagaactcttgtgtctagctaaaggattgtaaacgcaccaatcagcactctgtaaaaatgtaccaatcggcactctgtaaaatggaccaatcggtgctctgtaaaatggaccaatcagcactctgtaaaatggatcaatcagcaggatgtgggtgggggccaaataagggaataaaagctatccaccagagctggtaaaataaagctggctgctgctagggttttgtgtccaggctaacttatgagctgtaaccctcaccacgtggggctgcgaagtcagtgagaccaggatgccaccagggaggaacaaacagctctgcacatgccacctttaagagttgtaacactcattgtcaaggtctgcctcttcactcctgaagtcagtgagaccaggaacccgccagaaggaagaaactctggagacatctgaatattagaaggaacagactccggatacactatctttaagaactgtaacactcaccgtgagagtccatggcttcattmtttaagtcagcgagaccaagagcccaccagaaagaaaaaattccggacacagcaccactacactccagcctggagacagagtgagagtctgtatcaaaaacaataacaaaaattgatttctaaatgtttatagttttatgctttatatttagacagcttgagtaatttttttgtataaggta

SEQ ID NO: 940819 - DNA, 481 bp, Homo sapiens
attcctactggatccagatatacccactgagtctcaacacattattcccatagccattaattatcctcagaattggatgtaagttgaaggctgtttgtcataccttcacaatatgatggatactaaccatatgttagtatataatacaatgatatgatgttgtgytaatcataacctaaacagattacttgcaattttacagcccttgtaaaaaaatcttaattttttttatctgaatccctccccatccttttagaacaaagaccgattctatatgataaccagtgttctgcatactctggccccttcctgcctttccaacctcatcttgaacttctttaacccattttttctgtggtctagacacagagagaatctttcagttcctcaaatagtctatgctccttctgccataaagcctttgctcatgcttttctttctgtctgtgatatttatcctttccttctcttcttcctttaga

SEQ ID NO: 940820 - DNA, 576 bp, Homo sapiens
ggctcactgcaacctctgcctcctgggctcaagctgttctcctgcctcagcctcccgagtagctgcgattataggcacctgccaccacgcccagctaattttttgtatttttagtagagatgggttttcaccatattggccaggctgatctcgaactcctaacctcaagtgatctgcccacctcagcctcccaaagtgctgggatgattacatatattttttaaactccaggtttgaaattatagtatggtggacgttatcttcatttcagaaaaaatttagaacmttttcttaatatattgtttataagccttaggtaaagctgatggtaaattattttatgaacaaaagttctttgaaaaggagtttggaggaaagagactttattccagtgaacagtttacaaacctggaagctgcagcctttggtgtgaaagaaagtatattccagagaactcagggagggtttgggttttatagtgatgggtcctgcccaggtcccattcaggtcaatttatgcacatgaaggattcaaatttggttagttctgattggttgatacagctaagccctgatt

SEQ ID NO: 940821 - DNA, 627 bp, Homo sapiens
tcagatggatagattgcaaaaattttctccccttctgtaggttgcctgttcactctgatgatagtttcttttgctgtgcagaagctctttagtttaattagatcccatttgtcaattttggcttttgttgccattgctttcrgtgttttagtcatgaagtctttgcccatgcctatgtcctgaatggtattgcctaggttttcttctagggtttttctggttttaagtcttacatttaaatctttaatccatcttgagttaatttttgtataagatgtaaggaaggggtccagtttcagttttctgcatacggctagccagttttcccaacaccatttattaaataaggaatcctattttatctttgaatctgtgttttataggtgaaaaattgatggaacaatggggctagtctccagggccagttcttggccatccactccctgtcttctgctgccccatcccactgctgaccacacatctgtgagttggtggcagggttacatggctaggggtgggggcatgttttgctcttgctcttctcctcataaagatgagcataggtgtggaaagagtcaggccagacattgggccccctgtgtctcagggtgggtcaaggcagtgacc

SEQ ID NO: 940822 - DNA, 668 bp, Homo sapiens
atggcaccaagtccccaggctgcaaacagcacggggaccctgtgcctggcccatgaaaccactttttcctcctgggcctctgggcctgtgatgggagggactgccatgaaggtctctgacatggcctggagaaattttccccattgtcttggggattaacattaggctccttgccacttatgcaaatttctgcagccagcttgaatttctcctcaaaaaatgggtttttcttttctaccacatcgtcaggctgcaaattttctgaacttttatgctgtttcccttttaaaaaggaatgcttttaacaacacccaagtcacctcttgaatgctttgaagcttagacatttcttctgccagatacccgaaatcatctctctcaagttcaaagttccacaaatttctagggcaggggcaaaatgccaccagtctctttgctaaaacgtaacaagagtcaccttcactccagttcccaataaattcctcaactccatctgaggccacctcagtctggaacttattgttcatatcaytatcagcatttttgtcaaagccattcaacaagtctctaggaagttccaaactttcccacattttcctgtcttcttctgagccctccaaattgctccaacctctgcctgttacccagttccaaagttgcttccacat

SEQ ID NO: 940823 - DNA, 605 bp, Homo sapiens
ttttcatttttctcttttgaacattctaaaatagaattctgggtaatctggtaagtgtatacttaactttataagaaattgccagaaaagtttaccaagtggttttactattttttttttatcctcactggcaattttgccacatgctctccaacacttgatattgtcatagtaaaacaattttagccactgaagtactatctcaccgtaggttaatttacatttccctgatgactagtgacattgaacactttcatgtgcttaatgaccatcttttgtgaattgtctactcaataatttcttgtccatttattactgcattgtttaactttttactattagtctatctgcatttttatatgatctggatgaatttttcggatatatgtattgtagtgggaaatcagcgactggagagaccaagyggtgttcaggagggcatattttaggtgtacactggctcagcggacaggcatcctgaaagtctgagcagcaaacaaagaaaacaaacaccttttatgcaccttgaggcgggaattacatgatgcaggaagctggcttacaaaagcgagaacaaagtagttaattatcaggtgacattctta

SEQ ID NO: 940824 - DNA, 587 bp, Homo sapiens
actctctcccatcaacgagtccagcgcatgcagagagtgatggaatcttgaggcccactggtctaaccactcacctaagcttgactcccctgtgcctgtggacatcctgcgtgcagatagatgcacattcccactaatggcagccaggggaaagcactattcgaaagttcttctttactttgaactsaaattgggctcaggggtcctggatacaggacaaccccaatctcttatttattcaatggacaacaggtgagcacatactaggcctggacactgatgtaggtaggcactaaagcttcagagagatgcagatgaacaatctttaccctgaaggagctcatgttctatgggttcatttcctttccctgtgtcttacaaacaggttccagtttgtttccgtccttcagagtgtactgcctagaactgcatgcttttctccacaagtggcctgaccagcttgtggacaaggatgaagcaagcagacgaccttctttcagtgcagacaagatggctgtttagaggccacatcacatggcagacacctgccaactaaaaccctccatccttcccacggcctccccctc

SEQ ID NO: 940825 - DNA, 769 bp, Homo sapiens
cagcctccaggcccaacgcaggctccaggccagctcctgtagccccaggattcagactgaaacccaaagactcagcctccgggcccagtccagccccatgtcagccgctacaactctaggttccaggctcactagaatgccaggtcagtcctcacagccctagactccaggccagcacccatggacccacgctccagcaaacccaggacccatgcccactctatagactcagagtccaggcctgcctcagtaaactcagcatccacagccttaggcaccaggctagcacctgtgaacccaggctccagaccaagccccgtggacccagkctcaccccagcaccaggccaatcccaggctctaggctggtccctgtgaccccagactctaatagacccaggatccaagctcattccagcagacccagggtccaagtccaccctggtcaaccctagtgccaggttgccccacagatccaggctctaggattgcccctgtggacccaagatccagacaggtccccacaggcccaagaaccaggtctctttctgcatactcaagctccaggctcaccccagcaccaggctaacccccatggactcaaactcaaggcccatccacatggacccaggcacccagacaatcctagtgccaggctggcccccacagactcaggctcaaggcccactccagggccaggctggccagacttcaggccagcccctacagacacatgctccaggctcgcacccatgagctcagtcaacaga

SEQ ID NO: 940826 - DNA, 701 bp, Homo sapiens
atccagcctccaggcccaacgcaggctccaggccagctcctgtagccccaggattcagactgaaacccaaagactcagcctccgggcccagtccagccccatgtcagccgctacaactctaggttccaggctcactagaatgccaggtcagtcctcacagccctagactccaggccagcacccatggacccacgctccagcaaacccaggacccatgcccactctatagactcagagtccaggcctgcctcagtaaactcagcatccacagccttaggcaccaggctagcacctgtgaacccaggctccagaccaagccccgtggacccaggctcaccccagcaccaggccaatcccaggctctaggctggtccctgtgaycccagactctaatagacccaggatccaagctcattccagcagacccagggtccaagtccaccctggtcaaccctagtgccaggttgccccacagatccaggctctaggattgcccctgtggacccaagatccagacaggtccccacaggcccaagaaccaggtctctttctgcatactcaagctccaggctcaccccagcaccaggctaacccccatggactcaaactcaaggcccatccacatggacccaggcacccagacaatcctagtgccaggctggcccccacagactcaggctcaaggcccactccagggccag

SEQ ID NO: 940827 - DNA, 864 bp, Homo sapiens
atccagcctccaggcccaacgcaggctccaggccagctcctgtagccccaggattcagactgaaacccaaagactcagcctccgggcccagtccagccccatgtcagccgctacaactctaggttccaggctcactagaatgccaggtcagtcctcacagccctagactccaggccagcacccatggacccacgctccagcaaacccaggacccatgcccactctatagactcagagtccaggcctgcctcagtaaactcagcatccacagccttaggcaccaggctagcacctgtgaacccaggctccagaccaagccccgtggacccaggctcaccccagcaccaggccaatcccaggctctaggctggtccctgtgaccccagactctaatagacccaggatccaagctcattccagcagacccagggtccaagtccaccctggtyaaccctagtgccaggttgccccacagatccaggctctaggattgcccctgtggacccaagatccagacaggtccccacaggcccaagaaccaggtctctttctgcatactcaagctccaggctcaccccagcaccaggctaacccccatggactcaaactcaaggcccatccacatggacccaggcacccagacaatcctagtgccaggctggcccccacagactcaggctcaaggcccactccagggccaggctggccagacttcaggccagcccctacagacacatgctccaggctcgcacccatgagctcagtcaacagactcacccagtggacctcaccaccaggtttcccccatggacccggggtctagtccttcaaacccaagatccagacctgtcccagtgggcccag

SEQ ID NO: 940828 - DNA, 620 bp, Homo sapiens
tgaccttaggctcatccttgtcacctgctcggtggcagtgcctgcgtgcagacccctcccaacactcaggtgtggcccgtggacttgtggtttcgctgctggctggggaaccccctccggctcctcacttccccaccaagcgctggtcacagaaacgcccttctctggtcactgctctctggcctggcttggtggtggctttggtggcagccccgtcacccctgggatccgtgtcctcctgtttctttcgtttctcctgaaggttttccaagtgcctrtttgcttctgggaattttctctctgccttccttcgacttggtgatagccgtttttttattccggcctcccaagattgcgtggagcccggccactgccagggcggccctgtgatgagctacatgggacacaagaggcagccccaggcgcccgcctccacctataccagcagcgtcttcgctttcacttctgccttctgcggcgtcttcctctgtggagttggcgtcggccactggctgtggggcaacctcagcctctccagcggacgctgcaccatccctatggtggagtctcagctttggggatccagggtgcctgccggatttcagacagcgcattcacag

SEQ ID NO: 940829 - DNA, 682 bp, Homo sapiens
accaaaagatacccctgtgaagttttaaaaatggcaaaaataaaagcaatcaatataaaaaaaatctcaaaggtgcttcagggtgcagataaaagccccagccaggccgggcatggtggctcacgcctgtaatcccagcactttgggaggccaaggcgggyggatcacgaggtcaggaaatcgagaccatcctggctaacacggtgaaaccccgtctctactaaaaatacaaaaaattagctgggcatggtggtgagtgcctgtagtcccagctactcaggaggctgaggtaggagaatggcatgaacccaggaggcagagctggcagtgagccgagatcgcaccactgcactctagcctgggcaacagagcgagactccctgtcaaaaaaacagaagccccagccagttttataaaagactttgtgaggccagcacatggtaaacacagcatttataaggcaggcccagggaaaatggctaaacttgctcatgtcccagttcaaacctggaaaaaatagtccccagattcactttttagtgaatggttgtcatctttcaataatttaaagactctaataaaaagctttatagttaaaagatgtctaattctcccttgcctcctgcctctattaatcaaaagtatccagtcaactgtagaggcaatggtaacaaagcatact

SEQ ID NO: 940830 - DNA, 636 bp, Homo sapiens
aatacttaagtataaatctaataaaatatgtataagatctatgaggaaaactgcaaaactctgatcaaagaaattaaagaataactaaataaatgaagagatataccatttccattgctatgaaggctcaatactgtgaagatgtcagttcttcccaaactggcctayggaatcaattgcaatccaaatcaaaatcccagcaagttattttgcggatattgaaaaactgattgtaacatttatactaagaaggaaaacactcagaatagccaatataatattgaagggaaagaacaacatttgaggactaagactacacaagttcaaatctgactatagatttttttccatgatgtcagagtagaggcttttagcatgcctcagctacgtggaaatagcaggatagtgcataaagataaactctgtgagcttcaattcaagaaaaaaaagggaatcactggaattgtgaaggacacctgtgatggttaatattgagtgtcaatttgcttgcattgaaggatgcaaagtattgttcctggctgtgtctgtgagggagttgccaaagaagattaacatttgagtcagtggactgggagaggcagacccatcctcaatctgggtgggtaccatgtaatc

SEQ ID NO: 940831 - DNA, 628 bp, Homo sapiens
accctttctcaaaaaaaaaaaaaaaaaaagattaagtgtataaagcaataaataacggcacatcatttggcactgtggttaacaactgtttcaaagtgactgttccttgggagcaggactaaaattagcttggaggggggtcagttctttttttttcactgtaaggttttttaaccatgtgatatctatgtatattaacttgataatttaaacaattttgactaacagactaaaaatgtacaactgtataaaataccttcaggtaagattttacaggtaaraaaatgctgtgtgaggacagaggccccctcctggggcgaggagcagggtactggcatgagagagcacagcctctactggctgggggagacatggtcatattcctaagcctaaaaatggaaaatgaaacacccacctcgtagggtggttgtgaggattaaatgagaacctggctgaaagtggtcaggatgtgtcagctgctacagcagtagctgaatatccccaaacaagtttatgctcacattgatctccctaaactacactttactcatctataaaatgagggtattgctttctctagccatcttggtaggtctgagaattgttcagactcatctcccagaaacct

SEQ ID NO: 940832 - DNA, 726 bp, Homo sapiens
tcagggtggagttgctgaaggttggggtagctgtgacaacttcttaaaataagacaacaatgaagtctgctgcatccattggactcttcctttcacaagagatttctctgcagcatggaatgctatctgacagcattttacccacagtagaayttatttcaaaattggagtcagccctctcaaatcaagccactgctttaccaactgagttcatgtaatagtccacatcctttgttttcatttcaacaatgttcacagcatcttgaccaagagtaaattccatctcaagaaactactttctttgctcatccataagaagcaactcctcccccatttaagtttaatcatgagattgcagcaattcagtcagaccttcaggctccactactaattttagttatcttgctattgcagttaacttcctccactgaagtcttgaacccctgaaagtcatccacaggggatgcaatcaacttcttccaaactcctgttaatgttgacattctgacctcctcccaagaatcacgaatgttcttaatggcatctagaatggcgataataatcgattctcaattacaggtgaaacaggaggttttcgatgtactttgcccagatccatcaaatgaattactatccatgacagctacagccatatgaaatgtatttcttaaataagacttgaaaatcagaattactccttgatccacaggctgcagaataaatgta

SEQ ID NO: 940833 - DNA, 582 bp, Homo sapiens
ctgctcgggaggctgaggcaggagaatggcgtgaacccagaaggtggagcttgcagtgagctcccactgcactccagcctgggtgacagagggagagagggagactcagagacagtctcaaaaaaaaaaaaaaaatccctgaaaatgtggaagtttggaactgggtaacaggcagaggttggaacagttaggagggctcagaagaaggcatgaaatgtgagagaagatgttgcagttctgctgtatcacagatctaattccaaaggttgagtatttcctttaatttactgagacagaggagtacctggctatgagatgaagactggaaatgagaccccagatatttgacatttggaatctatgwgttatttctacctcaggaatatgattatctatctatctatctatctatctatctatctatctatatctatctatatctatctatcatatccaaaaaaaaaacaaaaacaaatttggaggaagaaaaccaatgcagaacatgtgatgttttaagggtacaggtttttgtgactataaatatttaaaggagttatatgagctcatgaatttattccaggt

SEQ ID NO: 940834 - DNA, 678 bp, Homo sapiens
taatatataatgtatattataatatataatatatacatataaataatgttatatataatgtatatgtatatataatatatgtttatatattatatatgtccacaatatataattgtatattatatgtaatgttacataattattatgcaataattataacatattataataatactcatataattatatgcttgatatatgcataactacatatattatatataattatatatagtatacattaaatattaaagcaacaatatatattatcattggcccaaattactaatgagaagcttaagttttagagaaatttagaagaagttgacaattctctactatattctgtatccatgatttatatacagtttgtagtaataagctcygttatctctgtttctatgatttgtattactcctttgcctcatgcctttgatcttgcacatatatctgtcttccggtcaagacattggctcctccccactgtaatttgacccctcttgttcatgaacacatctacatacctcgttcccacccggatagctcctgtcttgtatgatgaacctgaatattctctctctgctaatgacaataccatggatcccacattgtcttcagttatgagacatctgatgtatcattctcttatgtaccacagaagctgggcattgccaatat

SEQ ID NO: 940835 - DNA, 614 bp, Homo sapiens
gaagttaatggcaagtctatctaatcactgaggccagaagctttagaatgatcttttccttttaacacacagccaatctcttagtaaatcccataaagtaaacatgaacactatattcagcatcttctgtgacctccactgctaccacctttgtccaagccactgccatctctcgcctggactcttaggacagtctcttctgtcattgcttcccttgattctattctctgcccagcaagcagagttgtcctgatcagttttgtctcgcctctactcaaaatgctccacgggctttccatctcatttaaaaggaatagccaaggtcattacgttgccctggaaggctctacgtgatccattccttgttacctttccaatcgtattccctttctctttctccatagcttcatycaagacctgttggcctcctcatatgaggaggagagcatggggcatgcttccttctcaaggcctttgcaagggctgttcccgatgccctgcacactcttccccagagagccatgtgacttgccccttcccaactactacattttccttgaagggacaccttcatggccaccttatctgaaactgcaattcctgctcacaccttc

SEQ ID NO: 940836 - DNA, 524 bp, Homo sapiens
tgttctcagtcataggtgggaattgaacaatgagaacacatggacacaggaaggcgaacatcacacactggggactgttgtggggtggggggaggggggagggatagcatttggagataggcctaatgctaaatgacgagttaatgggtgcagcacactaacatggcacatgtatacatatgtaacaaacctgcacrttgtgcacatgtaccctaaaacttaaagtataataataaaataaaaaaatgtatatagggaatgattaaaaaaactgtcattaggcattagctagctgcatcaatcagagacacggaaaacaaacatatgagtacatgtgaaattttggagcaagggccagactaatgtaggaataggtggcattttcctaatatgcttattctatggcagatggttcctatattttacagcctgaatagttccatcactgtgaattctctatctctagtaaaatacaatcatatttggggactagctgtacataccacagcacctcttatttccac

SEQ ID NO: 940837 - DNA, 703 bp, Homo sapiens
aattacagaattaaggagaaaaattttgtgattctttcaatagttacagaaaaagcaactgataaaatttaatatgaacaattaaagtctcagtaaactatgaatcaaaaggaattgcctcaatatgataaaggtattcctacaamagctttaactaacttctgcaatggcaaattaataaatttgtttgcacgaaaatcatagagaagttaagaatgtctgcttttatctctttgttttaacattgtagtggaggttctagccgtgcaagaaagtgaaagaaaaaaataggcatatgattgagagaaaagaagtaaaactgcctccattccaagacaatatgattgtttatgtagaaaatcataaggaacctacaaagcaattgtaattaatttttaaatttaaatgattgtgggatatcagatcaaaataaaaatataacacctagtaaatataaaaaaattcaattgcatttccttctataaactggcaatcaaaattaagaaataactttacaaaacaataaagtttacaatagcaacaaaaaacatactttggaattgttattaatgtgcgagagctctacactgaatacattttaaaggaacaaagagaaattaagaaagacaaataaatgaagagataaactacatagattggaagactcagtattattaagatactgattatctctgcactacca

SEQ ID NO: 940838 - DNA, 605 bp, Homo sapiens
ggatgcctcagttgctaaatccctgagatacaaatctgaaccaagtcactctggtgtttaattaccttcattgtttccacactgccaacagggtaaagtccaaacaccagcttagcaagtctggtttcatcctgccttagtaaattcagttcccattactctgttcacatttaaagcagcaccaaacatctaggtattcttattacatgatggaatgtgatgtgatggttggtttcccaattttgcacatgctctttctctcaacttaaaagaccattaaatcttctgatatctgatggtagataaattgatatacaaatgaactgatagataaatttaccaaacaaggatttgttaactccatatatccaattgttctccaaatacattctttcatgctttgggtactatakccttcaaggaggaggtggtgtaaatatataatcagactgagaataaagatgagatggtaagtcctcatgttaacaggttatcagaatagcaataaagcactacactaacaatccacaaagagacataaaaagatgaaaacttttttttttttgagacggagtctcgctctgtcgcccaggctggagtgcagt

SEQ ID NO: 940839 - DNA, 808 bp, Homo sapiens
aagacaacagggtccctgccccatgtgaatctcatattccagggggagagaaaagcaataaacaagtgagctgatgaccaaatgaaatatcttcagagaccgagagtggctatgaaaacaatgaagtcatgtggtggagagtggctgggtggggcgacgttacatggtgtgggctgagggggagtcacctgaactgacacctgaaggcaaaggaggcagcagcacacagcacaggaagggagctccagccccagaagagcaagtaccaaggccctggggcaggagcaagcttgcatgttggggaaacagaaagaagccagtgagcctggagctttataagcaagaaggaggcagtgagggcagrtgggattggataacacatgcctccaggtgtggaagggaggttaggttgatcccactcacaatgggaagcttcgaggggagatgagatgggatgtgatttgcattttaaaaggctcactttgcccgctccagtgtgcaggctggatggcagagaacaggagtggggggccaggtgccctgtgaggaagcaaggagggtgctgcggtctcacggccagaaaggatgcagtgttggcctgggtggtggcaggggacagagagagaagtcgatggaggatttgggatgttttttttttgtttgtttttgtttttttttttgcaggaggagctgatggatcagacatataggaggagatgaaaaggaagcagggcagaggtcagccctccaaagtccagattctgaagccagaaacccctggctgggtgacatagggccaagtaactct

SEQ ID NO: 940840 - DNA, 658 bp, Homo sapiens
catctctactaaaaaaaaacacaaaattagccaggcatggaggcacatgcctataatcccagctactaggtagggtgaggcaggagaatcgctcgaacctgggagacggaggttgcggtgagccgagattgcgccattgcactccagcctgggcaacaagagcgaaactccatctcaaaaaaatagaaaaaaaataataataaaattactaatattatagtgtgttctcttttagtcttttaaaatgtctccctacatttaaaaaaaatttagttctgcttaagtagtttttaatagtaggctctctatttaacttttcttagtgatgttaatattttatagagaatcttagcataattatctaattgatccctttcactctcaagtttctaagtcgtgtcgtaaatatgggattgatttttgaaagtaagggtacacattgaaattaacatgccgtaaactagtygagtgtgttggatttctttgtttagtaacaactgagtgaaactatctagactaattggcatggaatttaaaatacatcaatattttgtaatagtgtatcaatactgattgaattttctcgctcatttccaacttggctttctgtaatcaaagagttgcaaatttagttagagaataattttttgtatgttga

SEQ ID NO: 940841 - DNA, 603 bp, Homo sapiens
actcagggagtgatactatggaaaaagcatgtgtaagaacaaatataaattaaaaataagaggcctaattatctctgttgaaaatatggaagacattttcctccttttttttttttagagcatctatcttagcaaacttaacgttgtaaatactttcttatctctttaaaatgtatataagccttttctaaaactaaataggtgctttgtcagttttaggacccaagcttgtccttctcaagtacttgggagccatctcttttaaatgcaaacaycaagggtgataacaccactatctcccagtttctatagggaggtaggagcctaacatgcaaaactgccttgtgtaataaagagatgagaataaagtaaattcgctaatacagagggacatctcaatcaccaggcaaatttaggatgatttatgtgtgacaaatggtgctgtcaagtcctcttatttgagggctggttactgtttatcttaaaaacatgtatgtaatgaattatatctgcttgcctgtataaaaaggtgaattttttttttttggtctttgcaactgcttatcagattgcctgtcatgcacatcatgttctggtttaata

SEQ ID NO: 940842 - DNA, 570 bp, Homo sapiens
attattcagttcaaagaattttttaatttccatcttgatttcattgttgacccaatgatcgttcaggagcaggttatttaagttccatgtatttccatggttttgagagttccttttggagttgatttccaattttattccactgtggtctgagagagtacttgatataatttcaattttcttaaatgtactggggcttgtttggtagcctatcagatggtttatcttggagaatgttccatgtgttgatcaataaaatgtatattctgtaattgttgggtagaacgttctgtaaatatctgttaaatccatttgttcaaaggtatagtttaaatccattgtttctttgttgactttctgtcttgatgacctgtctagtgctgttagtggtctattaaagtctcccactattattgtgttgccrtctatctcatttcttaagtcgagtagtaattgttttataaatttgggagctccagtgttaggtgcatatatacgtagaattgcgatattttcctgttgtgttggactagtccttttatcattatataatgtccctctttgtctctt

SEQ ID NO: 940843 - DNA, 548 bp, Homo sapiens
ccatgccttttggaatccttgttcttggaaactagctgccatgttttcaggaagcccaagcatccctatgaagaggtccatgtggagaggatccaaggtatccagtggataaccctggatgagttccaagtcaactataagaagcacttgccagtcatttgagcaagctatcttggaagtacgttctccagccccagtcaagccttcccagaagacatttcttatctgcatgagtttatcagagatgaactgtccctaytgaacctgcctaaaacagattagtgaacaaaacaattgttattgttttaagtccctaagttgtgtagtagtttattatgcagcaataagcaacatgccaaaatagtaaacaaaaggaatattgaattcttaaaggagtatgaagattagagccaccaacaggaactgaaacaaaatgcaaggatggtgattcctaccaaattccccatttattttgctgatttatcctatgcagaacacagatgaattttgaagaatgacagtgaatttttaatatctcaatcagatgt

SEQ ID NO: 940844 - DNA, 563 bp, Homo sapiens
agaccaaaagagagtgcagttgcaagatttaatagagtgaaaacggagctccgatacaaagggaggggacccaaaaggggtagcctttgctggctcgaatgcctgggtttatatcccgatcattttccctcctgctgtgctctcaggcaatagatgatcggctatttctttacctcctgtttttgcctaattagcattttagtgagctctctttactatctgactggtsggatgtgagctaagttgcaagccccgtgtttaaaggtggaagtggtcaccttcccagttaggcttagggattcttagtcggcctaggaaatccagctagttctgtctctcaccaccataaagagcagcacactcatcatcttccaggcaagcagccatccctcagcacacaccactaccccagtccaatcatgggtactcttgaagacacatagttgtaatgggtaagaggttcggtccttatggtaggacaggagtagatattttagttcacaaaggatttggaattcctcaaatcactttcttggggcatctctttactttgcctacacagt

SEQ ID NO: 940845 - DNA, 764 bp, Homo sapiens
tatgcagcagcagcttctcctgattctaatgggactcatgtgctctgaccactggctttaaaagttggaattattgaatcacctctcaggtgaagttaagctgggtgctacttatcacatcccagagccagcacatcccatcaagggtcatacatagattgtccaggttatgcaataatgtcctctctggaggaaggggagcctgtctctaattcatgtgaagtcagcatgtgggcaagcagcaagccttcatgatggtaggtttttatctacatcacctcagttgctcctcatcaaaaacctctatgagtttcacaaacaaattacatgaataaaaaaggaagcaaggaaaggagaatctatgaatcaaaagggacttaagagacatatgacaaattataatatgtggaacttatttggatcctgattgaagcaaacaatttagaatatatggacagtgatactattaggatataattmttcaatttattttttgagatgtgataatggcattgccatagccaaccttcacgatggctcctggaattcatgcccttatgtagtcccctcccacactgaatcaggactggcctgtgtgatcaataaaatatggcagaagtgatggcatgtgatttcagaggctaggtcataaaaggcgtgcaacttccaccctagtctctcatgctgctccctcttgggaaagtcagccaccaagctcttgagtaggctacagaggggcccatatggaaaaaccaattcaccag

SEQ ID NO: 940846 - DNA, 822 bp, Homo sapiens
accatgtcctcaactgcatacatggcaaacatagaatttacaaggaaattctatatatattatcagtgaaataatatacccacatgtggacaatttaattatattttgtgaaacaatacatatacccattgtttaattttgccttactattgaaggtctagaatcttcctttttatacaagtagaattgagaggtgacagggtgctggcagtcctcacagccctcgctagctctcggcacctcctctgcctgggctcccactttggcggcacttgaggagcccttcagcccaccgctgcactgtgggagcccctttctcggctggccaaggccagagccggctccctcagcttgcaggggggtgtggagggaaaggcgcgagcgggaaccggggctgcccgcggcgcttgccggccagcgggagttctgggtgggcgtggccttggcgggcccggcactcggagcagccggcagggcctgccggcccccggcaatgaggggcttagcacctgggcmagcggctgcggagggtgtgctgggtcccccagcagtgccggcccaccggtgctgcgctcgatttctccctgggccttagctgccttcccgcggggcagggctagggacctgcagcccgccatgcctgagcctccccccccacctccgtgggctcctgtgcagccccagcctccctgacgagcaccgcccactgctccacagcgcccagtcccatcgaccacccaagggctgaggagtgcgggcacacggcacgggactggcaggcagctccacctgcagccccggtgcaggatccactgggtgaag

SEQ ID NO: 940847 - DNA, 722 bp, Homo sapiens
agagtgcttcttcaggcccaacctgacctatcctgccctgcagggcagggcttccctgcaggatctccaataactccagccagaggcttagggacagaattcaaacctccctgacccaaagcccctaggggaaggggtggttgcagtctctgcagacagccgacttagcctttccacctggttgttctgaggaatccagggagcctagatgagtgggttccccccagataaacacatcctctccatcaagggacaaagtgcttctggtcctgctccccatgccacccaactgggtggaacctccaacaggggttgtcggacaccctatacaggagcgatcctactggcatcagattggtgyccctcaaggtcagaggtcttagaagaaggagtaggcacccatctttgctgctctccagcccccttgagtgacatctccaggcatgagaagcaatcagataaatagggcctgaagtgaacccccagcaaactacagcagccctacagaagagagacctgactattgaaagaaaaacacacaagcagaaagtgacaatgacaccatcaacaacaaaaaacacccccacaaaaaccctatccgaggctcagcagcctcaaagaccgaaactagacaaactcacgaagggtagaaagaatcaacgagaaaatgctaaaaatctaaaaggccaaagtgcctcttctcctccaaatgactgcaacgt

SEQ ID NO: 940848 - DNA, 563 bp, Homo sapiens
ggtgaggtcagagggatagggatggtggaagagttaagaaggacatggtttgagtatagaccagacgggccatcaatgatggaatatttcaaagatgcctgtattcatttcctgttgttgctatagcaaattatcacagacttacttgctcaaaacaacacaaatttattatcttacagtcctacatgtcagaaatatgatatgggtttcactgggcactccctacagaggcttaggagaaactctgtttatttgctttacctagcttctgctagaagtcacctgtattccttgactcatggtcccttcctccatcttcaaagctgayagtgtagcatcttcacattgctctctgacggtaacctgcttccatcatcacgtctccttttctaactcaaacccttctccttccctgttttatatatatatggagagagagagagagagagagagagagagagacagacagacaggatcttgctctgtcacccaggctggagtgctgtggtgtgatcagacactgtaacctttaacttcggggctcaagcgatcctctcacctcc

SEQ ID NO: 940849 - DNA, 759 bp, Homo sapiens
aatctcctgggagctctatggtcctgctcatcacctgagaaacccaaatacttatccaggtgatcttagggtaagcttgtatccccactatactaccaaaactgatgccctcttgaaagtaccacctcctggctggaggccaacaaactcaagtcattacagcaactcataaaagaacaatcctgttccaagaaatgagaaaacaacagctaaytccactctctgtaacatcctggccaaccaggggtcctgagtctgtccatgtgacaacttcgctgctagcacaaccagtgtattagtccattttcaccctgctagaaggaaacacccgagaccaggtaatttataaaagtaagaggtttaattgactcacacttccacatggctggggaggcctcaggaaacttacaatcatgatggaaggtgaaggggaaggaagcactttcttcatatagcagcaagagagagaagtgcaagcaagggaaatgccagatgcttataaaaccatcagatttcatgaaaactcactcactatcatgagaacagcatggggtaaaccacccctatgattcaaacacttcccaccagtttcctcccttgatatctggggattatggggattacaattcaagatcagatttgggtggggaccatatcaaccagtattcaagaaaacgagcacactaaacaaaactacaaccaaggaccctcacagagtccatttcactcccctgctacttctaccagaactggtgctgg

SEQ ID NO: 940850 - DNA, 618 bp, Homo sapiens
atattcacaaactatgcattcaacaaaggactaatatgcagaatctgtaacgaccttaaataatcaaacaagcatgaaacaaccccactaaaaaaagagcaaaagacataaatacacacttctcaaaagaacatacaagcagccaataagcatacgaaaaaacgctcaatatcactaatcatcggagaaatgcaaatcaaaaccacaatgagataccatttcacaccagtcagaatggttattattaaaaagtcaaaaaataacatgctggcaagactatagaggaaagagaatgcttatacacggttggkgggaatattaattactccagccattgtggaaagcagtgtggatatttctcaaagaacttaaaacagagctaccatttaacctagcaattccattactgggtatatacccaaaagaaaagaaattctgccaaaaagacacatgccctcatacactcattgctgtgctattcacaatagcaaatacatggaaataactcaagtgcccatcagtggcagattggataaagaaaatgtggtatatatatataacacagaattctacacagccataaaaaaataaaattatgtccttggcaataatatggac

SEQ ID NO: 940851 - DNA, 618 bp, Homo sapiens
atattcacaaactatgcattcaacaaaggactaatatgcagaatctgtaacgaccttaaataatcaaacaagcatgaaacaaccccactaaaaaaagagcaaaagacataaatacacacttctcaaaagaacatacaagcagccaataagcatacgaaaaaacgctcaatatcactaatcatcggagaaatgcaaatcaaaaccacaatgagataccatttcacaccagtcagaatggttattattaaaaagtcaaaaaataacatgctggcaagactatagaggaaagagaatgcttatacacggttggtgggaatattaattactccagccattgtggaaagcagkgtggatatttctcaaagaacttaaaacagagctaccatttaacctagcaattccattactgggtatatacccaaaagaaaagaaattctgccaaaaagacacatgccctcatacactcattgctgtgctattcacaatagcaaatacatggaaataactcaagtgcccatcagtggcagattggataaagaaaatgtggtatatatatataacacagaattctacacagccataaaaaaataaaattatgtccttggcaataatatggac

SEQ ID NO: 940852 - DNA, 618 bp, Homo sapiens
atattcacaaactatgcattcaacaaaggactaatatgcagaatctgtaacgaccttaaataatcaaacaagcatgaaacaaccccactaaaaaaagagcaaaagacataaatacacacttctcaaaagaacatacaagcagccaataagcatacgaaaaaacgctcaatatcactaatcatcggagaaatgcaaatcaaaaccacaatgagataccatttcacaccagtcagaatggttattattaaaaagtcaaaaaataacatgctggcaagactatagaggaaagagaatgcttatacacggttggtgggaatattaattactccagccattgtggaaagcagtgkggatatttctcaaagaacttaaaacagagctaccatttaacctagcaattccattactgggtatatacccaaaagaaaagaaattctgccaaaaagacacatgccctcatacactcattgctgtgctattcacaatagcaaatacatggaaataactcaagtgcccatcagtggcagattggataaagaaaatgtggtatatatatataacacagaattctacacagccataaaaaaataaaattatgtccttggcaataatatggac

SEQ ID NO: 940853 - DNA, 586 bp, Homo sapiens
ctccacggccggctaatttttgtaattttttagtagagacaaggtttcaccacattggccaggctggtctccaactcctgacctcaactgatccacccgcctcagcctcccaaagtgctgggattacaagcgtgagccaccacacctggcctaaacattyttttctaacacacatagatcattaataattgactattctaagccagaggcaaatcttaaccagtttgaaaggcaaaaatcatgaagaatatgtcctctagacacatgcaattcagctagattccaatacaaaaagagaaaaacaaatctccgtatgtttggaaataaacataattctaaataaataataaaccaaagaagacaacacaaagaaagtaaaaaatgtttcaaactgaataaaaattacatatcaaaaataataggatatagttataagcagttagaaggaaatttatacccttaattgcatatattaaaaatattaaaaattgatagaatatataattctgtaactactaatagcagaaaaggggaataaagaaaattggtcaataaccatcaacttagaattgtgtgtctagcaata

SEQ ID NO: 940854 - DNA, 645 bp, Homo sapiens
acatgtgttgaatgaatgaatttataaatgctgtgctagcggtggatacaatcaggtagtcctagaaacaattgggtactaaattaagagttaccaactccaagtgcccatagagctcagagcacaaagagctccaaaagggtgaaacatgaaccagacttgaaggaaggatcaactctgtgggatgaaggtcggtagacattcatcctgagaaggaaaaactaccattgacaccgctagaagtaaagggcraagaaaacaggaaatgagcacaaagcaggatttcttaatccagggtccatggtacttctggggcttctatgaaaccccagagattataagcaaaatcctaggtatgtatgagaaaggttattttactggggaaaaagactagaactttcgtgaaatagtcaaaggaatccaataagcctaagtaggtcaagactgtctcggggagaacagttaacctacttcagatagcctgtgaatcacttcattcgtgacaaataattatgccaatggactcccaacacaaaaaaccttgggactgagtgagcagcagtggtttcagccctgcctttaagtggcatttttagcatttccttgctgctgcctatcaatccagacctatccacgttgtcaggg

SEQ ID NO: 940855 - DNA, 805 bp, Homo sapiens
gagcctataaaataaaaaacaaattatttacttcctatataaaatggtggtataagcctaaggtacacatccccattccaaaagggagaaattggccaaaataagggggcaacaggcctcaacagagatccagcagagcagacactaagccttaaagctccaaaataatcttccttgattccatgtcccacatcctgggcacaccagtgcaagggttgggctcccaaggccttgggcagcctcatccccatggctttacggggtgcagcccatgtggctgctctcacaggttaaagtcaaatgcctgcagcttttccaggttgaaagtgcatgctgctggtggctctaccattctgggatctagagggtgatgatcccattcccacagctccactaggcagtgctccagtgaggactctgtgagggctccaatctcacatttccccttagcactgccctagtagagtctctctgcaggggctccacctttgtggctggtttctgcttggrcactcaggctttccaatacatcctctgaaatctaagtggaagttgccaagcttctttcactcttgcattctgcatgcctgcaggcttaacaacacaaggaagccatcaacggttatagtttgtgtcctaggaaagagcagcccaagcagtatctggggccctttgagccaaggctagaaccagagctgctgggattctgagagcagcatcctgaaatggtacggaatggtggcacacggggcttggcccctaaaatcattctttcctcttaggtctctgggcctgtgatgatagg

SEQ ID NO: 940856 - DNA, 803 bp, Homo sapiens
gataaacttatcctttaagattagttggccttcaatagagtcaggtgacagagaggtatgctttctcaatgcctcccttagtctctccagaaaggcggtaggattttcttcctttccctgtgttatagtggacatcagtgaataattcataggcttcttcctagttttccttagtccttctagcacgcaagttagcaaatgtctgtggcaccaatctccatgttctgattctgtgtcccaatgagggtctacactgggaactgcctgctggcctgtggggaattgttctctttcctctgttgtcatcctatcattgacctaactgaaataccagagattgccaaactcttgggctgcagttatggcagcacttctctcatttggrgttagtgtctgatttagcagtaacattatatctctccatatcagatcaaaggattgtcctaacccttgtaaagcatcagtatagccatcagggttatatgagaatttacctaggtctattaagtctgagagagaaaaaggtacatgcactctggctggaccaaattctcctcctcccactgcttggagtgggcataatcggggaatattggcactctttggtttgttgtttacccctttgtctatctccttttgtaccgtttgggttgaaagggggtccttattagttggggaaggagtcggggggacgctggggtagggaggtagactctgagggcttcctgtagggcataaatcacactttttacataattgcgagttgtctcttaatgaaaagaaagtttgtacatatggcactt

SEQ ID NO: 940857 - DNA, 772 bp, Homo sapiens
ggattggaacccatcaaatacctctggctagagtacttaatttaaatattcagcactcaagacagtgtgatattggcataaagaaagaacattattgagagcccaaaactggaaatgcacaaatattattatttgatttttgagaaatatcagaattcagtgggagaaaggacaaacataattcaatcagaaaagaacaggaataggacaatcttttaaataaatgttggtagaacaagttgattccacctggaaaaggtaaataccaccacctcacaccatacacaaaaataactcaaaactaaatatagacaaaaaagcaaaaatcatattataaacttgtaaaagaaaggataagataaaaatttcagacttgtggggtggggaaacatttcttagaatacaaaagcactaagtgctaaaaaataaaagattacatttcaccaagataaaattttgttcttcaaaaggtttctctaagaccatgaaaatgtaagccacagactgagagaaaaatatttgcagtgcacatatctgacaaagaaagtgtattaataatatgtaaagaacscttaaaactgaaaaataagaagatgtaacccaatttaaaaagaaacaattctgaacatacacattgcaaaaaaggacatatgaatgctcaataagcaagaaaagaaaagatgttcagtaccattattcttcaaggaaattcaagttaatatacacctactagaattactgaaattaaataattttcctatgttgctaatgg

SEQ ID NO: 940858 - DNA, 668 bp, Homo sapiens
gctagaatataaagcaggcagaaaaatgtgaaaagactacactggcctagccctccagcctacatctttctcccatgctggatgcttcctgccctcaaacatcgaactccaagttcttcagttttgggactcaggctgggtctccttgctcctcagcttgcagacagcctattatgggaccctgtgatcgtgtgagttaatacttaataractcccttttgtatatatatcctatatatagataaaattagttctgtctctctagagaaccctaatacaccaatgttttttaaaaagtaaaccacatctgtaatcccagcactttgggaggcagaggcaggaggactgcttgagcccaagagtttgaaaccagcctggcaatatagtgcaaccctgtcgctacagaaaattagaaaaaaaacaaaaaacacttagccaggcatggtgtgcttgcctgcagtcctagctactcaggaggctgaggcaggaggattgcttgagcccaggagttcaaggctgcagtgagccatgatcataccactacactccagcctggatgacagaacaaagactgtctcaaaaaaaaaaaaatgaaagaaaagatttgttcatacactttaccaggaggatgcgtggatggcaagtaaacacaggggaaggtgctctat

SEQ ID NO: 940859 - DNA, 668 bp, Homo sapiens
gctagaatataaagcaggcagaaaaatgtgaaaagactacactggcctagccctccagcctacatctttctcccatgctggatgcttcctgccctcaaacatcgaactccaagttcttcagttttgggactcaggctgggtctccttgctcctcagcttgcagacagcctattatgggaccctgtgatcgtgtgagttaatacttaataaactcccttttgtatatatatcctatatatagayaaaattagttctgtctctctagagaaccctaatacaccaatgttttttaaaaagtaaaccacatctgtaatcccagcactttgggaggcagaggcaggaggactgcttgagcccaagagtttgaaaccagcctggcaatatagtgcaaccctgtcgctacagaaaattagaaaaaaaacaaaaaacacttagccaggcatggtgtgcttgcctgcagtcctagctactcaggaggctgaggcaggaggattgcttgagcccaggagttcaaggctgcagtgagccatgatcataccactacactccagcctggatgacagaacaaagactgtctcaaaaaaaaaaaaatgaaagaaaagatttgttcatacactttaccaggaggatgcgtggatggcaagtaaacacaggggaaggtgctctat

SEQ ID NO: 940860 - DNA, 640 bp, Homo sapiens
tgaaaagactacactggcctagccctccagcctacatctttctcccatgctggatgcttcctgccctcaaacatcgaactccaagttcttcagttttgggactcaggctgggtctccttgctcctcagcttgcagacagcctattatgggaccctgtgatcgtgtgagttaatacttaataaactcccttttgtatatatatcctatatatagataaaattagttctgtctctctagagaaccctaatacaccaatgttttttaaaaagtaaaccacatctgtaatcccagcactttgggaggcagaggcaggaggactgcttgagcccaagagtttgaaaccagcctggcaatatagtgcaaccctgtcgctacagaaaattagaaaaaaaacaaaaaacacttagccaggcatggygtgcttgcctgcagtcctagctactcaggaggctgaggcaggaggattgcttgagcccaggagttcaaggctgcagtgagccatgatcataccactacactccagcctggatgacagaacaaagactgtctcaaaaaaaaaaaaatgaaagaaaagatttgttcatacactttaccaggaggatgcgtggatggcaagtaaacacaggggaaggtgctctat

SEQ ID NO: 940861 - DNA, 772 bp, Homo sapiens
gtgggtgcccctctgggacaaagcttccagaggaaagaacaggcagcaatctttgctgttctgaagcctccactagtgatacccaggcaaacagggcctggagtggaccttcagcaaactccggcagacctgcagcagaggggcctattagaaggaaaactaacaaacagaaaggaatagtatcaacatcaacaaaaaggacatccacacaaaaaccccatccgaaggtcaccaacatcaaagaccaaagttagataaatccacaaagatgaggaaaaaccagcaccaaaaggctgaaaattccaaaaaccagaacacctcttctccaaaggatcacaactcctcaccagcaagggaacaaatctggatagagaatgagtttgacaaattgacagaagcaggcttcagaaggttggtaataacaaactcctctgaggtaaaggagcatgttctaacccaatgcaaggaagctaagaaccttgaaaaaaggttagaggaattgctaactagaataactagtttagagaagaacataaattacttgatggagctgaaaaacacagcacaagaacttyataaagcatacacaagtatcaatagccaaatcgataaagtggaagacaggatatcagagattgaagatcaacttaatgaaataaaatgtgaagacaagattagagaaaaaagaatgacaaggaatgaacaaagcctctaagaaatataggactatgtgaaaagaccaaaccaaagtttgattggtatacatgaaatg

SEQ ID NO: 940862 - DNA, 669 bp, Homo sapiens
ccaggctggagtgcagtggcgtgatctcagttcactgcaacctctgcctcccgggttcaagcaattctcctgcctcagcctcccaagtagtgggactacaggcatgtgccaccacgcctggctaatttttgtatttttagtagagayggggtttcgccatgttgaccaggctggtctcaaactcctgacctcaagtgatccacctgcctcagcctcccgaagtgctgggattacaggtgtgagccaccatggccagcctgacccccagtttttaaataaagcttctcttccttaaccaattgcaaatcagaaaatctttgaatctacctattaacatgtaagccgccatgtcaagatatcctacccttttaggccaaaaccaatgtgtaaacttcatctactgatttacaattttgcctgtaatttctgctttcctgaagctgatccctgcctttaaaaattcttacctgcaaaccatcagtgaggtcaggattatttgctagtcaccaagtaaggaagagaggaaggcatttttgccaggcaccaagtaaggaaaatcgggcaatgctgcccggcaaataaatgccttcctgtcttctgctgcaaacctcagtgtggatgttctatccttactctacctggcatgcggaccccaggttggttcaataa

SEQ ID NO: 940863 - DNA, 821 bp, Homo sapiens
tagtagtaagttttgactatttgcttttgtgtgtgtgtgtatctaccataggcttttgtttttgttgttgccttcagtcttacgagaaacatcttttaataggttatttttgactgacaacttaactttgattgcaaaatcaaacaaaacaaaagaaatttacacttttatcttacttccacccccatattttgaatttttgtgtcacaatttacatctttttatattgcatcttcattaacaggttattgtggcaaacattattttactggctttgtcttttaacctttgtactaaaaagacaagctatttacacactctcattacactattatagtatttttaatttgactgtgtacttatttttactagtgagttttacacttttttttttcaatctatttactaagwttttttgccaaaggttaaggagtgcctgggaggcaggtctattccttccttcaaagataatttgcagggcttcaatatttaaggggaaaagggcagatattgggaaagtgggataaatttttaaaaggtgtggggagataagagacaaacattgcgttcttctgagtctttgatcagcctttcactgaaataccatgtgtttgtgttactcatcattgttctttcatttcagcttgaagaattccctttagcatttcttgtgtgataggtttagtggtgatgaacagaaaagtatttgtctattcttcatatctctaggaaagctttgctaattataggttctttttttctttctttttctttccttcaacactttgaatacctcacccagtctttcccgccctataagg

SEQ ID NO: 940864 - DNA, 659 bp, Homo sapiens
tctgtgaagaaagtcattggtagcttgatggggatggcattgaatctataaattacgttgggcagcatggccattttcacgatattcattcttcctacccatgagcatggaatgttcttccatttgtttgtatcctcttttatttcgttgagcagcagtttgtagttctccttgaagaggtccttcacatcccttgtaagttggattcctaggtattttattctctttgaagcaattgtgaatgggagttcactcatgatttggctctctgtttgtctgttattggtgtataagaatgcttgtgatttttgtacattgattttgtatcctgagactttgcagaagttgcttatcagcttaaggaaattttgggctgagacaatggggttttctagatatacaatcatgtcgtctgcaaacagggacaatttgacttcctcttttcctaattgaatacactttacttccttctcctgcctaattgccctggccagaacttccaacactatgttgartaggagtggtgagagagggcatcactgtcttgtacctacaaagagacttagactcccacactataataatgggagactttaacaccgcactgtcgacattagaaagatcaatgagacagaaagttaacaaggatacccaggaat

SEQ ID NO: 940865 - DNA, 498 bp, Homo sapiens
acagaaatacaaactaccatcagagaatactataaacacctctacaaaaataaactggaaagtctagaagaaatggataaattcctggacacacacaccctcccaagactaaactaggaagaagttgaatctctgaatagaccaataacaggctctgaaattgaggcaataattaatagcctaccaaagaaaaaaattccaggaccagaaggattcacagccraattctattagaggtacaaagaggagctgttaccattccttctgaaagtattctaatcaatagaaaaagagggaatcctccctaactcattttatgaggccaacatcatcctgataccaaaggctggcagagacacaacagaaaaagagaattttagatgaatattcccaatgaacatcaatgcaaatatcctcaataaaatactggcaaaccaaatacaacagcacatcaaaaagcttatgcactacgatcaagtcagcttcatccctagcatg

SEQ ID NO: 940866 - DNA, 498 bp, Homo sapiens
acagaaatacaaactaccatcagagaatactataaacacctctacaaaaataaactggaaagtctagaagaaatggataaattcctggacacacacaccctcccaagactaaactaggaagaagttgaatctctgaatagaccaataacaggctctgaaattgaggcaataattaatagcctaccaaagaaaaaaattccaggaccagaaggattcacagccaaattctattagaggtacaaagaggagctgttaccattccttctgaaagtattctaatcaatagaaaaagagggaatcctccctaactcattttatgaggccaacaycatcctgataccaaaggctggcagagacacaacagaaaaagagaattttagatgaatattcccaatgaacatcaatgcaaatatcctcaataaaatactggcaaaccaaatacaacagcacatcaaaaagcttatgcactacgatcaagtcagcttcatccctagcatg

SEQ ID NO: 940867 - DNA, 593 bp, Homo sapiens
tgccaagaacacacagtgggggaaggacactctctttattaagtaatgttaacaacaactggatatccacatgcagaagaagggaattagactgcatgttacatcacatacaaaaagcaagtcaaaataaagttttaaatataagaaatataagactttacactgtgacactactataggaagcattgtggaaagactccatgacattggccttggcaatgatgttttgtatataaacccaaaaacatgggaaacaaaagcaaaratagaaaaatgtgattgtatccaactaaaaagctcctgcacagtaaaagaaacgaatgacagtgtgaagagacaacctacagaatgagagaaaatatttgcaaactgcacatttaatcaagggttaatacccaaaatatataaggaatccaagcaactcaatagtaagaaaacaaataatctgatttataaaatgaggaaaggatctgaatagacatttctaaaaagaggaaatacaggtggccaataggtatatgaaaatattctcaacatcactaattatcagggaaatgaaaattaataccacaatgagatatcatctcccatcc

SEQ ID NO: 940868 - DNA, 593 bp, Homo sapiens
tgccaagaacacacagtgggggaaggacactctctttattaagtaatgttaacaacaactggatatccacatgcagaagaagggaattagactgcatgttacatcacatacaaaaagcaagtcaaaataaagttttaaatataagaaatataagactttacactgtgacactactataggaagcattgtggaaagactccatgacattggccttggcaatgatgttttgtatataaacccaaaaacatgggaaacaaaagcaaaaatagaaaaatgtgattgtatccaactaaaaagctcctgcacagtaaaagaaacgaatgacagtgtgaagagacaacctacagaatgagagaaaatatttgcaaactgcacatttaatcaagggttaatacccaaaatatataaggaatccaagcaactcaatagtaagraaacaaataatctgatttataaaatgaggaaaggatctgaatagacatttctaaaaagaggaaatacaggtggccaataggtatatgaaaatattctcaacatcactaattatcagggaaatgaaaattaataccacaatgagatatcatctcccatcc

SEQ ID NO: 940869 - DNA, 424 bp, Homo sapiens
tcgcaacccaagatgccagtggcataggcaccctagggaatctcctggtctgcaggttgtggagaccatgggaaacgtgtagtatttgggtcagagtgcacttttcctcatggcacagtccctcacagcttcccttggctaggggagggagttctctgaccccttgttcttcccaggtgaggcgacaccccatcctgcttcatcttgccctctgtgggctgcactcactgtctaaccagtcccagtgagatgagccaggtacctcagttgraaatgcagaaatcactcactttctgcgttgaccttgctgggagctgcagacgagagcttttcctattcagccatcttgccagccaccaggtatttctttatagcagtgtgacaatggactaatactgtaaattggtacagaggaagtggggca

SEQ ID NO: 940870 - DNA, 601 bp, Homo sapiens
cttcatatattagtccgttttcacactgctgataaaaatatacccaagactgggaagaaaaagaggtttaattggatttacagctccacatggctggggaggtttcagaatcatggcaggaggcgaaaggcacttctcacatggtggcagcaagagaaaaatgaggaagmagcaaaagcagaaccccctgataaacccatcagatctcgtgagacttattcccatcaaatctcgtgagacttattcactatcatgagaatagcatgggaaagtctggcacccatgattcaattacctccccctgggtccttcccacaacacgtgggaattctgcgagatacaattcaagttgagatttgggtggtgacacagtcaaaccatatcattctgccccggcccctccaaatctcatgtcctgacattccaaaatcaatcatgccttcccaacagtcccccgtagtcttaactcatttcagccttaacccaaatgtccacagtccaaagtctcatctgaggcaaggcaagtcccttccacctatgagcctgtaaaatcaaaagcaagctagttacttcctagatacaatgggggtacaggcattgg

SEQ ID NO: 940871 - DNA, 605 bp, Homo sapiens
tatagatcaatgggaacagaatagacaactcaggaataaagccatacactgacagccaattgatcattgacagttgacaaaaacacactggggaaaggccacccctttaataaatggtgctgggaaaattgggttctcattatgccaaaggatgaaattagacctctatctctcactatattaaaaaaatcaactcgagatgaattaatgacttaaaagtaaacctgaaactataaaaatactagaagaaaacatagggaaaactcttctggatattgtccaggcaaataattcatgacctcaaaagcaaaaataacaaaaacaaaatggtacttaattaaactaagaatcatatctgattttttttggggggaactgataattagaaactmaaatgtgagtatcaggagtattcattttcattggggtggtgtggttcccagacatttcaatgaataaagctaggatatatgtaaatataagtatatttaaatattgagtatatgttgttatttctaattcatatttaatattatagtgcttttctgatttttttgactttgtattgataacctatgttttatattgaaaaccctggttactaa

SEQ ID NO: 940872 - DNA, 560 bp, Homo sapiens
ataaaagccattttaactggggtgaggtatttcagtgtagttttgatttgcatcttctgatgctcagtgaccttcagcatttttttaaatatatctattggacatttgtatatcttcttttaagaaatatctatttttgcccatttttaaattggatttttttttttttgctagtgaactgttwgagtttcttatatattctggttatcaatcccttgtcagatggtagtttacaaatatttgtccccattctgtgggtttgctctacactttgttgattgtttcctttgctgtgtagaagctttttagcttgatgaaattccatttgtctatttttgctttagttgcctgtgtttttggggtcttaatcccaaaaagcctttgcccagaccaatgtcctggagcatttccccaatattgtcttccagttatttcatagttggggccttagatttaagtctttaatacatttggatctgatttttgtgtatggtgagagataagggtgtagtttcattcttctgcatatagttatgcaattttcccaacaccatgtatta

SEQ ID NO: 940873 - DNA, 608 bp, Homo sapiens
cagtgtagttttgatttgcatcttctgatgctcagtgaccttcagcatttttttaaatatatctattggacatttgtatatcttcttttaagaaatatctatttttgcccatttttaaattggatttttttttttttgctagtgaactgttagagtttcttatatattctggttatcaatcccttgtcagatggtagtttacaaatatttgtccccattctgtgggtttgctctacactttgttgattgtttcctttgctgtgtagaagctttttagcttgatgaaattccatttgtctatttttgctttagttgcctgtgtttttggggtcttaatcccaaaaagcctttgcccagwccaatgtcctggagcatttccccaatattgtcttccagttatttcatagttggggccttagatttaagtctttaatacatttggatctgatttttgtgtatggtgagagataagggtgtagtttcattcttctgcatatagttatgcaattttcccaacaccatgtattaaaaagactggcctttccccattgtatgttcttggcacctttgcaaagatgagttgtctgtaaatgtgtggacttatattt

SEQ ID NO: 940874 - DNA, 560 bp, Homo sapiens
ataaaagccattttaactggggtgaggtatttcagtgtagttttgatttgcatcttctgatgctcagtgaccttcagcatttttttaaatatatctattggacatttgtatatcttcttttaagaaatatctatttttgcccatttttaaattggatttttttttttttgctagtgaactgttagagtttcttatatattctggttatcaatcccttgtcagatggtagtttacaaatatttgtccccattctgtgggtttgctctacactttgttgattgtttcctttgctgtgtagaagctttttagcttgatgaaattccatttgtctatttttgctttagttgcctgtgtttttggggtcttaatcccaaaaagcctttgcccagaccaatgtcctggagcatttccccaatattgtcttcyagttatttcatagttggggccttagatttaagtctttaatacatttggatctgatttttgtgtatggtgagagataagggtgtagtttcattcttctgcatatagttatgcaattttcccaacaccatgtatta

SEQ ID NO: 940875 - DNA, 575 bp, Homo sapiens
actatcacaagctgctaccacatttacgcagttgccttcatctgggctcacttattctgccttctcttctgctactagagatgaactgaggccaagttctctataagatcccattttatctgggcactaaaacaaaagtgactttgtttgtaccatgcaattttccttcactttggagcattcytgtcagcattttaaatatactgaaatgtctcccatgttatttaaaaaccaaacaaaaacaaaccttcctctttgacccctctagctactatccccatttttctacttctcttaaacagtgatattcaaaaagattaatctaaatttgcagtctggaattgctcttttcaccttttctctggaatcatcttctatcaggcctttgcctctccactacatacaaactgctctttcaggtcaccagtgacttccctcttattaaatccaatgactaattctcagaccttatctcacttgatccatctatagaaactgagctgttgatcactttcctctctttgggctccacggcaccacacttccctgctttttcttaacttaccttcattcct

SEQ ID NO: 940876 - DNA, 621 bp, Homo sapiens
  misc_feature 490: n = A,T,C or G
acattagaaaaaaacttcaaaagtctttcctgggccctaagcaaaatctggaaactctattgaatttggcaacttcagtgttttataatagggatcaggagaagcaggctgaacgagacagatgagacaagaaaaaggctgcctccttagtcacagccctcaggcaatagaacttcggtggctctgaaagaaagaaaggctgggcaggcaacccacctaacagggcttgttatcagtgcaacttacaggggcacttgaaaaaggactgcccaaacaaacataagccgccccctcatccatgttccttgtgccagggggatcagtggaaggcacactgctcccaaaggcgaatgtcctctgggccacgggccactaaccagatggtccaacaacaggactgaggtgcctggggcaggcaccagcccatgccatcaccctmacagagccccaggtaagcttaaccattgagggacaggaaactaactttctnctggacactggtgcagccttctcagttttactcttctgtcccagacaacaatcctccaggtctgtcaaatcaaaaggggtcctaggacagccagtcactaggtatttctcccaccccctaagttaatgact

SEQ ID NO: 940877 - DNA, 571 bp, Homo sapiens
tgtgtttggtaacgagtgtgggggtgtgagtatgagtgggttctgcgctgggatggcatcctgtccagggctggttcctgctttgcatcctgagctgctggaatgggctcagctaccagagaccctaaattggaacaagtggggtggaaaatgaatgaatgaatacaaattaataaaaatttgtaaagtctatgataatcatacaaatgcatgacaaaaaaaatgtagtatgaaagcgctcagtgagcccaccctaattgtaaatgttttgaactgcatggtggcaggaggtgctccttataatttttgctttgcaaacattttattccttggtttaacycaccaccaccacaactgccatcacttgctgattcaccaaacttgggtaaataatgatcttacctgtgcttattaatctttaagtgtatgtgtatagctcttgtttatttcagtgtttactattagaagtgttttggtctttatttagatgtatgatgtttttgtgaccagaaatatgcagtaggaacttactttttgcttatatcaattagcctattgtaaaattagtagc

SEQ ID NO: 940878 - DNA, 620 bp, Homo sapiens
acgagtgtgggggtgtgagtatgagtgggttctgcgctgggatggcatcctgtccagggctggttcctgctttgcatcctgagctgctggaatgggctcagctaccagagaccctaaattggaacaagtggggtggaaaatgaatgaatgaatacaaattaataaaaatttgtaaagtctatgataatcatacaaatgcatgacaaaaaaaatgtagtatgaaagcgctcagtgagcccaccctaattgtaaatgttttgaactgcatggtggcaggaggtgctccttataatttttgctttgcaaacattttattccttggtttaaccsaccaccaccacaactgccatcacttgctgattcaccaaacttgggtaaataatgatcttacctgtgcttattaatctttaagtgtatgtgtatagctcttgtttatttcagtgtttactattagaagtgttttggtctttatttagatgtatgatgtttttgtgaccagaaatatgcagtaggaacttactttttgcttatatcaattagcctattgtaaaattagtagcattatacattgttttgtttaaagttacaatttccaagaccctactggtgatgttcagtaa

SEQ ID NO: 940879 - DNA, 620 bp, Homo sapiens
acgagtgtgggggtgtgagtatgagtgggttctgcgctgggatggcatcctgtccagggctggttcctgctttgcatcctgagctgctggaatgggctcagctaccagagaccctaaattggaacaagtggggtggaaaatgaatgaatgaatacaaattaataaaaatttgtaaagtctatgataatcatacaaatgcatgacaaaaaaaatgtagtatgaaagcgctcagtgagcccaccctaattgtaaatgttttgaactgcatggtggcaggaggtgctccttataatttttgctttgcaaacattttattccttggtttaacccaccaccaycacaactgccatcacttgctgattcaccaaacttgggtaaataatgatcttacctgtgcttattaatctttaagtgtatgtgtatagctcttgtttatttcagtgtttactattagaagtgttttggtctttatttagatgtatgatgtttttgtgaccagaaatatgcagtaggaacttactttttgcttatatcaattagcctattgtaaaattagtagcattatacattgttttgtttaaagttacaatttccaagaccctactggtgatgttcagtaa

SEQ ID NO: 940880 - DNA, 757 bp, Homo sapiens
gcctcagtgctgaggcacaggaatggagagggggactactcatctccctaccccacccactgttgtggatacagttgtggatacaggctgctcttcctgaaggggacggcatgtgtaatcttgctagaataaaggacagccattctaggggtagaatggaggacagccattctagggctattgggaattactgcatccctgctggctatgtgcctaccaggctggrgcttgcaggaaaggtaaggtgtctccccttctgtcatggagtggcagtgttcctgttgcatagaacagggctgagggaggaggttctgcaccacagacattttagtggagagccatggggcaaccatttttttttcttttttttttttttttaatggccattggctaaattggagcttggagataggcagtggtgtctgtacaatctgagtgtcctgagagctgggccaggaatatgacagggaagaagactgtgtttctgcctgcccaagccatggagctgaggtagctccctctcctcactggggagacctcagcacatttcaccgggagcttcccttgccacccctcttagggcttgtttgtgcctgccattggggtatccaagggtgggcttggcagtccaactccacacagcattgtctctcacttaggtgctgagggagctcaggccactgtgcattccatagatcagcccattgcctggaacaatggagaacctctcctggtaaacaaagatcaagcatatacc

SEQ ID NO: 940881 - DNA, 619 bp, Homo sapiens
cttctttacaatgtggcaggtaggagaatgagagaatagccaagcaaagggggaaaccccttataaaattatcagatcttgtgagaactcattcactatcacaacaacagtatgaagaaaactgcccccatgattcaattatcttcaccctgatcccgcccttgacatgtggggttattacaattcaagatgaggtttaggtggggacacagccaaatcatattattccacccttggcccctttcaaatctmatgtcctcacatttcaaaacacaataatgtctttccaacagtcccccaaagtcttatttcagcattaactcaaaagtccaccgtccaaagtctcatctgaaacaaggccagccccttctgcctatgaacctataaaatcaaaagcaagttagttacttccaagatacaataggggtacagacattgggtaaatacatccattccaaatgggagaaattggccaaaacaaatgggttacagtccttgacagattggataatgccacccaggttagtgaaggcaatcttctttattccatctatttatccaaatattaatctcttttaaaaataccctcacagacgtactcagaaacaatgttttacca

SEQ ID NO: 940882 - DNA, 607 bp, Homo sapiens
ccaaagtgatatctttttgtgtgctaatgattgattaatggctgacagctcctcagtgacttgaggacagagctggttacctgaaagaccaaggcctaaataaagggttgggattttcagccccactcactagcctccagggtggggagaggggctgatagataagttgatagccaatggccaatggtttaatcaatcatgyctagctaaggaagcctctataaatagccaaaaggactgtgttccgagagcttctgggtgctgaacacatggaggttcctagaaggtggcacacccaagagggcatggaagctccatgcctcttcccacatacctcgtcctatgcatcttttcatctgtatcctttgtaatctcctttataataaaccggtaaacgtgtttccctgaggtctgtgaaccactctagcaaattaatcaaacccaaggagagggttgtgggaactccaattcatagccggttggtcagaaacataggaaaaacaacctggggattgaaatgggcattggattgggggtccatcttggggactgagccctcagcctgtgggatctaacactatcttcgggcggatagtgtcagaattaa

SEQ ID NO: 940883 - DNA, 642 bp, Homo sapiens
agggattgaattcttgcttttattctcagcttggtcatttttggtgtgctactgatttgtgtacattgattttgtaatctgagactactcaattcatttatcaaacctaagtgtctttggaggagtcttaggattttctaggtattcaatcatattatcggcaaacaacgataacttgacttcctcttttccaatttggatggcctttatttctttctcttgactcattgctctggctagtatttatagaactatgtagaataagagtggtgaacgtggtcatccttgtcttgttcctgttctcaggsggaatgctttcaacttttcctcattcagtatgatattggctgtgggtttttcatctatagcttttattattttgaagtagttttcttctatgcctagtttattcagagtttttatcataaaggggtgctggattttgttgaatgatttttctgaatctattgagatggtcatgtagttttgtttttaattgtgtttatgtgatgtttttaattctgttttctgtgacgtattctctctcgatgaatctagctaatagtctatcagttttattttttcaaacaatgagttttgcgtttcattgattttcatatatttttgtgtttgaattttatt

SEQ ID NO: 940884 - DNA, 642 bp, Homo sapiens
agggattgaattcttgcttttattctcagcttggtcatttttggtgtgctactgatttgtgtacattgattttgtaatctgagactactcaattcatttatcaaacctaagtgtctttggaggagtcttaggattttctaggtattcaatcatattatcggcaaacaacgataacttgacttcctcttttccaatttggatggcctttatttctttctcttgactcattgctctggctagtatttatagaactatgtagaataagagtggtgaacgtggtcatccttgtcttgttcctgttctcagggggaatgctttcaacttttcctcattcagtatgatattggctgtgggtttttcatctatagcttttattattttgaagtagttttcttctatgcctagtttattcagagtttttatcataaaggggtgctggatttygttgaatgatttttctgaatctattgagatggtcatgtagttttgtttttaattgtgtttatgtgatgtttttaattctgttttctgtgacgtattctctctcgatgaatctagctaatagtctatcagttttattttttcaaacaatgagttttgcgtttcattgattttcatatatttttgtgtttgaattttatt

SEQ ID NO: 940885 - DNA, 585 bp, Homo sapiens
aaatactcttgagtcataggtaaaattgaaaggcagcctaggacataagtactgcaaattctaggcaagtcttagtcctgggctgggcttagagccagtggacttgagggtcacatgacctagggagacaccagactgggcagcaaagggagtacttgcaccacytttctcccaaccccaggcagtgtaatgaaagtgactccttcctattgcttgaagagaggagaatgatgagcaaagaggactttatcttacatcttggatatcagcaaaacaacagtaggataaggcaccaggtagagttgtgaggcccccattccaggccctagctcgtggatgacatttcaagatgctctctggcccagaaaataacccatttctttgaagggaaggacccagttttggcaggattaaagaactgactaaagaacccatgggccttgaataaacaacagtgatacttaggtagtacactatgatccttgggctctgagatgtgctgctatcagttgtgacccagcacattttaagctgtggtggctatagtgaaagactccttctatttgaggaaagcagagggaaaag

SEQ ID NO: 940886 - DNA, 585 bp, Homo sapiens
aaatactcttgagtcataggtaaaattgaaaggcagcctaggacataagtactgcaaattctaggcaagtcttagtcctgggctgggcttagagccagtggacttgagggtcacatgacctagggagacaccagactgggcagcaaagggagtacttgcaccacttttctcccaaccccaggcagtgtaatgaaagtgactccttcctattgcttgaagagaggagaatgatgagcaaagaggactttatcttacatcttggatatcagcaaaacaacagtaggataaggcaccaggtagagttgtgaggcccccattccaggccctagctcgtggatgacatttcaagatrctctctggcccagaaaataacccatttctttgaagggaaggacccagttttggcaggattaaagaactgactaaagaacccatgggccttgaataaacaacagtgatacttaggtagtacactatgatccttgggctctgagatgtgctgctatcagttgtgacccagcacattttaagctgtggtggctatagtgaaagactccttctatttgaggaaagcagagggaaaag

SEQ ID NO: 940887 - DNA, 592 bp, Homo sapiens
gtattccatgcccatgagttagaagaatcaatattattacaatatccaactacccaaagcaatctacaaattcaatgcaatccctattaaaatactaatggcatgcttcacagaaatacaaaaattaatcctaaaatttatatggagcaacagaagacccagaatagccaaagctattctgagcaaaaagaacagaactggaagaatcacattatctgacttcaaattatactacaaagctgtaataaccaaaatagcacggtactcacataaaaacagacacatagaccaatagaatagaatggagagccyggaaataaatccatacttctagagtgaactcatttttgacaaaggtatgaaaaacatacattggggaaagaacagtctcttcaacaaatggtgccaggaaaactggattatccatatgaagaaggatgaaattagacccctatcttgcacccaacacaaaaatcaaatcaaaatggattaaaaacttaaatctaatacctaactatgaaaccactaaaagaaacattggggaaactctccaatacattggactgggcaaagatttcttgagtaataccac

SEQ ID NO: 940888 - DNA, 572 bp, Homo sapiens
caattgatcctaaaagataagtttattacccaatcagccacagatatcaggagaaagctccaaaagtgagccctgggccctgaataaaatctggagacattattaaacctggaaacctcagtgttctataatagggaccaagaggaacaggcccaaaaggaaaagcgagatcagagaaaggccacagccttagtcatggccctcagacaaatgaaccttggtggttcagagaagacagaaaatggagcaggccactcatccagtagggcttgttatcagggtggtttacaaggacactttaaaaaagaatgtccaatgagaaacaagccgccccctcrtccatgtccactacgccaaggcaatcgctggaaggcacactgtcccagagggcaaaggttctctgggccagaagcccccaaccagatgatctaacaataggactgagggtgcccagggcaaatgccagctcacgtcatcaccctcactgagccccgggtatgtataaccattgagtgccaggaaattgacttcctcctggacactggcttgactttctcagtgttaatctcctg

SEQ ID NO: 940889 - DNA, 572 bp, Homo sapiens
caattgatcctaaaagataagtttattacccaatcagccacagatatcaggagaaagctccaaaagtgagccctgggccctgaataaaatctggagacattattaaacctggaaacctcagtgttctataatagggaccaagaggaacaggcccaaaaggaaaagcgagatcagagaaaggccacagccttagtcatggccctcagacaaatgaaccttggtggttcagagaagacagaaaatggagcaggccactcatccagtagggcttgttatcagggtggtttacaaggacactttaaaaaagaatgtccaatgagaaacaagccgccccctcgtccatgtccactaygccaaggcaatcgctggaaggcacactgtcccagagggcaaaggttctctgggccagaagcccccaaccagatgatctaacaataggactgagggtgcccagggcaaatgccagctcacgtcatcaccctcactgagccccgggtatgtataaccattgagtgccaggaaattgacttcctcctggacactggcttgactttctcagtgttaatctcctg

SEQ ID NO: 940890 - DNA, 625 bp, Homo sapiens
caagtggaagaaagaattctgagcttgaagactgtcttgctgaaataagacaggtagacaagattagagaaaaaagaatgaaaaggaatgaacaaaacctccaagaactattggtttatataaaaagaccaaatctacgaatgattggggtacctgaaagagctggggagaacaaaaccgagttggaaaacataactcaaggtatcatccaggagaacttgcccaacctagcaagacagaccaacattcaaactcaaaaaatccagggaaccccagtaagatactccatgagaagatcaaccccaagactcataatcatcagattctccatggttgaaatgaaagaaaaaatgttaagggcggccagagagaaaggccaggtcacgtacaaagggaagcccatcagactaacagcagatctctcagtggaaaccctacaaggtggaagagattagggatcaatattcaacatttttttygtttgtttgttttgagacagagtctcactctgtcacccaggctggagagcaatggaacaatctcggctcactacaacctctgcctcccaggtacaagtgattctcctgcctcagcctcccgagtagctgagattacaggtgcatgc

SEQ ID NO: 940891 - DNA, 600 bp, Homo sapiens
atggtgcattgctaatgtattattgctaatggtgacatgttaagtattttaaagattccagtaaacgcaatgcagggatttttaaataagactctatggtagcctattaaaaagaaaggtatctccatgaagaaaagttaatgacatttggaaactgatttgtggagtgaaaatgcagaatttctgtagaaatgggtgactcataaagggtartaagaacccatgataaattgaagaagaatccttattgcgggaaatatcaagcttgaaagctttgcaagtaaaaggaagagaaaacagaaaagaaagacaagcagaaagcaacccaagtcttgctaaagtgtatagacataggcaactctgctcagcgaagccaaatgaagccagggtgctcagggccaacagagcactttatgtaaagggccaggagatggagagtgaactttgaaacactcacttaccagaaaatccaagaaggtcctagtcggtaaacataagctctttttcatcagtaaatgcattttgtatattcttattactcatgagactagcgtactgttaacctacagaaataacttatgttttattattattatacta

SEQ ID NO: 940892 - DNA, 729 bp, Homo sapiens
gacaatactgagactagaacacaggctaaaggtactttttaaagagagtgtttatcacttattaaaacagttgcttttgcaataatagtgataggataattcatcattaattcaacacttattgactttgttatacacaaaatatggtttaagcattggcagtgaggtaaatacgaagacaacatcttttgtggaaaggatcttaaatggagagattttaaaataaagaaaatgtggtatattcgtagatatagatatagtgacaaggatgacagacatgacttgtaagaggcgttgataggaagaaaggctgatggcagcagatgcaggactagtcccatctttgggtgctagggttgccatttcgttaayggttcctatgtaaaattgtgcatttctcaggggaaaaaaaacacaagaaaaatggacagtatgcatccctttgtaatgttttaattaggcattttggacttagcatactgccttatgtaaaacaatacaagcatgtaatacaattttaatagcttcaattttattagggacaaaaataaaaagatggaacccaaggactgccaccattaggaaagtcagtgcagaatgatttgtgtgtgtgtgtgtgtgtgtgtgtgtgtgtgtgtgtgtgtgtgtgtttttgagatggagtctcactctgtctcccaggctggagattgtagtggcgtgatcttggctcactgcaacctctgcctc

SEQ ID NO: 940893 - DNA, 729 bp, Homo sapiens
gacaatactgagactagaacacaggctaaaggtactttttaaagagagtgtttatcacttattaaaacagttgcttttgcaataatagtgataggataattcatcattaattcaacacttattgactttgttatacacaaaatatggtttaagcattggcagtgaggtaaatacgaagacaacatcttttgtggaaaggatcttaaatggagagattttaaaataaagaaaatgtggtatattcgtagatatagatatagtgacaaggatgacagacatgacttgtaagaggcgttgataggaagaaaggctgatggcagcagatgcaggactagtcccatctttgggtgctagggttgccatttcgttaacggttcctatgtaaaattgtgcatttctcaggggaaaaaaaacacaagaaaaatggacagtatgcatccctttgtaatgttttaattaggcattttggacttagcatactrccttatgtaaaacaatacaagcatgtaatacaattttaatagcttcaattttattagggacaaaaataaaaagatggaacccaaggactgccaccattaggaaagtcagtgcagaatgatttgtgtgtgtgtgtgtgtgtgtgtgtgtgtgtgtgtgtgtgtgtgtgtttttgagatggagtctcactctgtctcccaggctggagattgtagtggcgtgatcttggctcactgcaacctctgcctc

SEQ ID NO: 940894 - DNA, 585 bp, Homo sapiens
ttttcttgactctggaaaacaaaacataaaaagaatcaataaccaaaaaaaaaaaaaaaaaaagaacccaaaatctctttttgttttaaacaaagaagtcataaaaactatttcagttctttattagtttagttctatttaatgaattcttattccacttgatgttgagttagcaatctttttttttcttttttttgagatggagtcttgctctgtcacccagggtggagtgcagtggcacgagctcagctcactgcagcttctgcctcctgggttcaagagattctcctgcctcagcctccctagtagctgggattacaggygtccaccaccacacctggctaatttttgtatttttagtagagacaggatttcaccatgctggccacgttgctcttgaactcttgacctcaggtgatccaccctcctcagcctcccaaagcactgggattacaggtgtgagccaccacacctggcctgagctagcaatcgtcatgatcatatcaaccttttaattagaggcttggaagtttttacctggttcaatagtataatcactaaagttgtcagaaacctgtattcaag

SEQ ID NO: 940895 - DNA, 556 bp, Homo sapiens
atgcctgtaatcccagcactttgggaggccgaggcgggcagatcacctgatcaggagttcaaggccagcctgccaaacatggtgaaaccccgtctctactaaaaatacaaaaattagccgggcgtagtggcatgcgcctgtaatcccagctacctaggaggctgaggcaggagaatcgctggaacccgggaggcagaggttgcagtgagccaagatcatgccactgcactccagcctgagcaacagagcaagactccatctgaaaaaaaaaaataaaaaraaaataaaattttagatgtgtggccaggtgcagtggctcacacctgtattcccagcactttgggaggccaaagcaggtggatcacctgagatcaggagttcaagaccagcctggccaacatggtgaaaccccctctctactaaaaatacaaaaatcagccaggtgtggtggcatgcatctgtagtcccagctacttgggaggctgaggcaggagaatcactcgaacccaggaggcagaggttgcttgaacccaggaggcagaggttgcggtaagcc

SEQ ID NO: 940896 - DNA, 556 bp, Homo sapiens
atgcctgtaatcccagcactttgggaggccgaggcgggcagatcacctgatcaggagttcaaggccagcctgccaaacatggtgaaaccccgtctctactaaaaatacaaaaattagccgggcgtagtggcatgcgcctgtaatcccagctacctaggaggctgaggcaggagaatcgctggaacccgggaggcagaggttgcagtgagccaagatcatgccactgcactccagcctgagcaacagagcaagactccatctgaaaaaaaaaaataaaaaaaaaataaaattttagatgtgtggccaggtgcagtggctcacacctgtattcccagcactttgggaggccaaagcaggtggatcacctgagrtcaggagttcaagaccagcctggccaacatggtgaaaccccctctctactaaaaatacaaaaatcagccaggtgtggtggcatgcatctgtagtcccagctacttgggaggctgaggcaggagaatcactcgaacccaggaggcagaggttgcttgaacccaggaggcagaggttgcggtaagcc

SEQ ID NO: 940897 - DNA, 721 bp, Homo sapiens
tcgtgtctgtgtgagttttctccaggtactccagtttcctcccacatcccaaagatgtgcaaattaggtgaactggtatgtctaaatgatcccagtcttagtgagcctggatgtgagtgtaccctgtgatggaatagcagcagcctgtccaggtttggtttctgctcttctccctgagctgctgggataagatccagctaccaaggccctgaaatggaataactgggtaaatacttagcttgttcttactaattttttttttttttttttttttttagacagagtcttgctctgttacccaggctggagtgtggtggcacaatctcagctcactcaacctccacctcctgggttcaagtgtttctcctgcctcagcctcctgagtagctgggattacaggtgcctgccaccatgcccagctaatttttatatttttagtagagacgggtgtgatggttaatactgagtgtcaacttgattggattgaacaatacaaactattgatcctgggtgtgtctgtgaaggtgttgccaaaggacattaacatttgaatcagtgaggctgggcrcggtgtctcatgcctgtaatcccagcactttgggaggccgaggctggtggatcacaaggtcaggagatccagaccatcctggctaacacagtgaaaccccgtctctactaaaaatacaaagattagccgggcgtggcagcgtgtgcctgtagt

SEQ ID NO: 940898 - DNA, 721 bp, Homo sapiens
tcgtgtctgtgtgagttttctccaggtactccagtttcctcccacatcccaaagatgtgcaaattaggtgaactggtatgtctaaatgatcccagtcttagtgagcctggatgtgagtgtaccctgtgatggaatagcagcagcctgtccaggtttggtttctgctcttctccctgagctgctgggataagatccagctaccaaggccctgaaatggaataactgggtaaatacttagcttgttcttactaattttttttttttttttttttttttagacagagtcttgctctgttacccaggctggagtgtggtggcacaatctcagctcactcaacctccacctcctgggttcaagtgtttctcctgcctcagcctcctgagtagctgggattacaggtgcctgccaccatgcccagctaatttttatatttttagtagagacgggtgtgatggttaatactgagtgtcaacttgattggattgaacaatacaaactattgatcctgggtgtgtctgtgaaggtgttgccaaaggacattaacatttgaatcagtgaggctgggcgcggtgwctcatgcctgtaatcccagcactttgggaggccgaggctggtggatcacaaggtcaggagatccagaccatcctggctaacacagtgaaaccccgtctctactaaaaatacaaagattagccgggcgtggcagcgtgtgcctgtagt

SEQ ID NO: 940899 - DNA, 487 bp, Homo sapiens
tatttcattacttaagaggttgaaatgtgaacaaattgaacacagtgagccaggttcctttgatttctgagttctttctctattttcccaattctaaatttctcaattcccaagaaacactcacatgatgggcttggcattactttatttaataagaggataacataagcatgaaagtgaagaggactctataaacgtttagaatatatgttgaaaaggaacaaaaaacacattactaatcaatagaggggagggagaatatttttcaatccagagaattcatgggcagttcacattcaaaatgcaargcaattggttctgattagttgagtcttcaacagtgtgacttaaatggtagagatttaaagaagataatggcaatgaacatttaataagagaaatagcatcaacagaactatcattcatgatatgtgataatcttccattagatatccaaaactagaagagaagggaaactgattaacat

SEQ ID NO: 940900 - DNA, 589 bp, Homo sapiens
ttttctccacaatcttgccagcatctgttatttttgactttttaataatagccattctgactggtgtgaggttgtaactcattgtggttttgatttgcatttctctaatgatcagtgatattgagctttttttcataggtttgttggctgtatgtatgtcttcttttgaaaaatgtttgttcatgtcctttgcccactttttagtgggtttctttgtttttctcttgtaaatttgtttaagttctttgtagactctggatattagacctttgtcagatgaagagattgcaataattttccccattctgtrggttgtctgtttcctctgttgatagttttttgcgtgtgtgtggtgcagaagctcttaagtttaattagatcccatttgtcaatatttgcttttgttgcaattgcttttggtgtctgtgtcatgaattctttgccagttcctatgtccaagatgatattgcctaggttgtcttccacagtttttatagttttgggttttccatttaagtctttaatccatcttgagttgactttcatatatggtgtaaggaaggggtccagcttcaatcttctgtatatg

SEQ ID NO: 940901 - DNA, 650 bp, Homo sapiens
agctgggattacaggcgcgcaccaccatgcccagctaatttttgtattttaagtagagatggggtttcaccatgttggccaggctggtctcaacctcctgacctcgtgatccgcccacctcggcctcccaaagtgctgagattataggtgtgagccaccacacccggcctcaacaaagagtttatcaccaacctgatgtgctctcttgaggaatatgtttgtggaactcttttgcatgttttaattaactaaggctaaaataaaacctttggctaaaaccatgtccaggtctttctgggggaattctcaatgggggcgctagcagagtaatctgagtacatccaacacaccwgacacctaatggttttcaaatatgtttctacttacctgttcagaaggtgaggaaatgcaactaaatagcaaagcacctctgcagtgacacagaagtgacattgagacaattgtgaatatcttgtatcctcaaaatgcatagctaattattcctgaaatcaaagttacaaactgtccaatatgaatgattttgaacaggagaggaatccattaaaagctaaacgcaagttttgataatttgaaccttttccctccagttttactataacacagtacttttcagtacctgaccccagcat

SEQ ID NO: 940902 - DNA, 523 bp, Homo sapiens
ctttactcaacatgccccaagtcagataactaaaatacctcttagtctaggtagacactttcactggataggtacaggcctttcctacagggtttgagaagacaccgcagtcatttcttcccttctgtcagacataattcctcagtttagccttcccacctctatacagtctgacaacagaccagcctttattagtcaaatcagccaagcagtttttcatgctcttggtattcagtgaaacctttatatcccttacggtcctccatcttcargaaaagtagaacagactaaaggtcttttaaaaacacacctcaccaagctcagccaccaacttaaaaaggactggacaatacttttaccactttcccttctcagaagtcagacctgtcctcagaatgctacagggtacagcccatttgagctcctgtatagacgctcctttttattaggccccagtctcattccagacaccagaccaacttagactgtgccccccaaaaaaacttgtcatccctactatctt

SEQ ID NO: 940903 - DNA, 523 bp, Homo sapiens
ctttactcaacatgccccaagtcagataactaaaatacctcttagtctaggtagacactttcactggataggtacaggcctttcctacagggtttgagaagacaccgcagtcatttcttcccttctgtcagacataattcctcagtttagccttcccacctctatacagtctgacaacagaccagcctttattagtcaaatcagccaagcagtttttcatgctcttggtattcagtgaaacctttatatcccttacggtcctccatcttcaggaaaagtagaacagactaaaggtcttttaaaaacacacctcaccaagctcagccaccaacttaaaaaggactggacaayacttttaccactttcccttctcagaagtcagacctgtcctcagaatgctacagggtacagcccatttgagctcctgtatagacgctcctttttattaggccccagtctcattccagacaccagaccaacttagactgtgccccccaaaaaaacttgtcatccctactatctt

SEQ ID NO: 940904 - DNA, 545 bp, Homo sapiens
ttcatatctgtcataataaaaataaaaactcaatatgtaatatctaaaactgaagaatcaagaaccgcaagtataactgtgttatatagaaaaatggtggcaaataccagaagcattgacagaatgaaaagtggtggttcttgaaagcaggactgacagtagggaaaaagaggtcaaaggtctgctggttttcattgtaaaccttgtaacattattactctttccagaaatagaacatctatggcttactttgatgaaactttaattgacaaaatcgttaactccttcacctgctccaaggctaaacagtcacagttactgttaccttgcatgaaatgattttattaaataaaatcttactataggttcagktacctggtttcaacttgtgctaaagctagttctaacaggaataaaatattgaaaactgtcactcatactctaatattatccttggttaaccgtgtctgtgatgccaactacacacccaatcaaacatctaaagttacgaactggctgcagagttggtgccctggttacaaaac

SEQ ID NO: 940905 - DNA, 621 bp, Homo sapiens
gggatacgggctatggaggaatactgagtattgtgtctggctagaaatcaggacatggaaggacgaacaggtttttcacggatggagggaagagtgttcagacagagggaaaatatgagcaaagccacaaaggtaagatagtgcaaactgagctcatggaatgcccagggtgccagttttactgcgggctgggatacacacagagggccgtagaaaagagaggtctgggccgggtgcagtggctcacgcctgtaatcccagcactttgggaggccgaggcgggcagatcacgaggtcaggagatcgagaccatcctggctaacacggtgaaaccccgtctctactaaaaatacaaaaaattagccgggcgtggtggcaggcgcctgtagtcccagctactcgggaggctgaggcaggagaatggcrtgaacccgggaggcggagcttgcggtgagccgagactgcgccactgcactccagcctgggcgacagagcgagactccgtctcaaaaaaaaaaaaagaaaagagaggtctggctgctaggcctgtgtctaattgtggaggatcttcaatgatatattgaagaatgtgcactgtattgggaacccagttttgttttt

SEQ ID NO: 940906 - DNA, 763 bp, Homo sapiens
ctgcctgtaatccctgctacttggaaggctgaggcatgagaatcacttgaacctgggaggtggaggttgcagtgagtcaagatcgcgccactgcattccagcctggatggcagagcaagactctgtctcaaaaatatagatagatagatagatgatagatgatagatagatagatagatagatagatagatagataatagcatctgcttcttaatgttactatgatgattaaatgagattagaatagtgcttggcatayagtaaaaactcattaaatgctgtctagtgttattgtcgttgctgttgttataagttaaaatccacaagctttaacttagagtagaatttggaaattggaaaaagtaatttcaaggcccaagtttcaccagaaaggaacttccctgagaaacccttatcaatacacatccaagtaagtgaaggaatgcagtattatatcttatttggcagaacgttttccttctgggtctatttcactcatttatagccccaatgagagaatgctgattgggttgcagggaaagttgggtaaagttttcatagcctagaatattcttgataataactagaatttatccaagaaattaaaatataagatcatccacaggttatatatcagtaatcaaaagtgagtatattattctcactcggtttgctaatggttgaaattgctcagcggggtagtggaatagtagagaccagatgctaagattctctggtcctggggaagcaggttttccatagg

SEQ ID NO: 940907 - DNA, 582 bp, Homo sapiens
cccatgtaagttctcagcaatggttgacctcagcagaggaagattttaataataaagtggacagaatgacccattccatggacaccacacagcctctttccccagccacctttgtcatcgcccacgtctttggcccatggacaaagtggccatggtggcagggatggaggttacacatgggctcagcaacatggacttccactcaccaaggctgaccttgttacggccactgctgagtgcccaacttgctagcagcagagaccatcactgagacctcgatatggcaccattcstcagggtgatcagccagctacccagtggcaggttgattatattggacctcttccatcttggaaagggcagagatttgtgctcactggaatagacgcttactctggatgggagtttgcctatccttcatgcaaggcttctgccaagactaccttccatcaactcatagaatgtattatccactgtcatggtattccacatagcgttgcctctgaccaaggcactcactttatggctgaagaagtgcagcagtggctcatgttcatggaattcactggtcttaccatgttc

SEQ ID NO: 940908 - DNA, 582 bp, Homo sapiens
cccatgtaagttctcagcaatggttgacctcagcagaggaagattttaataataaagtggacagaatgacccattccatggacaccacacagcctctttccccagccacctttgtcatcgcccacgtctttggcccatggacaaagtggccatggtggcagggatggaggttacacatgggctcagcaacatggacttccactcaccaaggctgaccttgttacggccactgctgagtgcccaacttgctagcagcagagaccatcactgagacctcgatatggcaccattcctcagggtgatcagccagctacccagtggcaggttgattatattggacctcttccatcttggaaagggcagagatttgtgctcactggaatagacrcttactctggatgggagtttgcctatccttcatgcaaggcttctgccaagactaccttccatcaactcatagaatgtattatccactgtcatggtattccacatagcgttgcctctgaccaaggcactcactttatggctgaagaagtgcagcagtggctcatgttcatggaattcactggtcttaccatgttc

SEQ ID NO: 940909 - DNA, 651 bp, Homo sapiens
tgctttggctttggttctggatatgcaccatactgtagccactgtatgatttcttttactgttatcaatgtcagtagtttctgtgcgttccttagtggcttaggttgcagttgtttgcagatgctttggctagcctttgctgaagatgaggacacaaggttgactggtgcttaggccttttggtggtgtgtgcaagtgctagctgtagtggcagcaaaccctcagkaggccagtctttagacctttgagtgtgtaacaaggatgctggctgtagaaacagcaggctggacaggctggccctcaggctcctgggtggggtgtgtgggttccagtaggctggacacaccactcttcagcctctggacagtgtgtgcaggtgcctacatgtgtacttacatggatctctcatttaccttttttccatatgagaagggaagtacttcctggctcctagcccatccaactggctgccttacttccttctctatgctgccattttgaatttccatacctcagaaggttccttttgcttccctgctggataccagcattctctcctagacagtgccgtcaacatttggctatttacttgctatctcagtccttctttgtggagtaggtgagtgctgggcatttctagttagccatctt

SEQ ID NO: 940910 - DNA, 612 bp, Homo sapiens
aggggagggagtgtgcgaataggtgtgggtcacagacatcaagtactttacaaggtaatagaatatcacaaggcaagtggaggcagggggagatcacaggaccacaggaccgaggcgaaattaaaattgctaatgaagtttcaggcaccattgtcattgataacatcttatcaggagacagggttttgagatcaaccggtctgaccaaaatttattaggcaggaatttcctcttcctaataagccggggagcgctatgggagactggagtctatttcacctctgcagtctcgaccataagagatgaccacgcccaggggtgccagttcagagacccacccccaggtgtgcattctctttctcagggatgttccatgctgagraaaagaattcagtgatatttctcccatttgcttttgaaagaagagaaatatgactctatcccacccagctcactggcggtcagagtttaaggttatctctcttattccctgaacaattgctgttatcctgttcttttttcaaggtgcccacatttcatattgctcaaacaaacatgctgtacaatttgtgcagttaatgcaattattacagggtcctgaggcgacataca

SEQ ID NO: 940911 - DNA, 558 bp, Homo sapiens
ttttttcttttttttggttccatataatttttaaaagagtttttttctagttctgtgaagaatgtcattggtagtttgataaaaatagtattgaatctgtaaaatactttgggttggccatttttaacaatattgattctgggatgttattccatttgtttgtgtaatctctgatttctctgagcagtgttttgtagctctycttatagagatttttcacctccctgttacctgtattcctaggtattttatttttttgtggcaattgtaaatggaattccattcttgatttggctcttggcttgactgttattggtgtataggagtattagtgatttttgtatgttgattttgtatcctgagactttgctgaagtttttttatcagttgaaggagattttgggcagagactatggggttttctagatatgggatcatgtcatctgcaaacagggacggtttggcttcctcttttcctatttcgatgccctttccttcttccttttgcccaattgttctggccaggacttccaatactatgttgaatagaagtggtga

SEQ ID NO: 940912 - DNA, 561 bp, Homo sapiens
ataccctagaaatcagaatcatttaataattccctacatacaagatgctttcccaaatgcagtgcatttgcaaatgctatcccctctgtctgaaacactcacccattgcctcggtccccaagaaattcctttgatcccttaagtctcagttcaaacaccacctttggattccttccagacgcccctggaaaataaatatgctccttctcctttattcccactgttcactgtatggatgtcagccattcattccacaattatttactcagggcctactgttagctatctcaggttccatgtgctaggaataccatgcaaagycatgctattcttgccacatactaggaatagcaagcaaaaaccaacacagaagacaaagatttgcctatcagatcaaagtcagctctgctaagcctattcttcccaaagggaagcaagcaggacaacatggctaataatagtgggtggcaggtcaatggaaaacaagagcccgatccagggtaacaggaaggcaaagctctatgacagatgtgccacagtgaatgacgtatggtggccctc

SEQ ID NO: 940913 - DNA, 575 bp, Homo sapiens
tccagcctgggcaacaagaatgaaactccatttcaaaaaataaaagaaaagaaaagaacaaagaaaatatacattaaaaataaataaataaaagtaataaaactacatgacagaaagtttgggaaatagaaaaaagaaaaagaatcagtcacaacccttccctcctcccataatcactactgctttttgttatttctatgtaaccattttcatatatgtgttttatgaggctgtagttctgttgggcatgtgatttggggtattgctttttcacttaatcataagcatcatccatgttgctgtatggtcatgataatcattatttttaatggttgtaaaaatatttcagtagctgtcacaccacctacttaaccgttttcttattaacagacaatttgctatttctaagccttgttgttataattaargttgccataaacatcttcatgcatacaatcttttccccattttgggttaatttctttagacagatttctagaagtgaaatatcaaaatacaaacaatttaaacctttcctttttatggttttggatgcatactatcaaatctgcttt

SEQ ID NO: 940914 - DNA, 594 bp, Homo sapiens
ctggctatgcatgcttggaggacagttttggataccctgggaacttacaccatagcttccactctggcagaccatgcttgactggtggagagctccagtggggcggcccttgcaaccgcgcaccagcccacatgccccctgtccatactgcagcttcttcctgggaccaaggaaactttccacattgctttgctggagcatgtctgcaggcaagttttgcattctttgccctgacagcaagcggtaatgaagtctgccccacctctctctgccgactgccattgctgacaaagccttgacaggcacagagccggccagccttgccccagccagtgctctgcccttgtgctaacactgtgcagagaacagcagatcctccaccgcccccaagcaaccactcctgcttgtggggcacagaaaaagcacccagrcctgcactcaccagtgtcctgcctacaagccaacaccacctccagcatgaccatgcgcacagtcaccaggaggagctccctcaacccccacctagctgagtggcctccaccactgtggtgaatgcctgcagggaggcaggtaccctggcacccactagcagtc

SEQ ID NO: 940915 - DNA, 576 bp, Homo sapiens
gcgacgcaccctgctaatcggatttttatgtggacaagggagacaagatatgtaattttcaaacagtgaaggtgatagaacaaacatctttgtgatctctacagaatgctccaaaaagacgaaagaattatctggctttctgagttttgtgtgaaaatcattattttgtcaaatcttgccttatattgtctttcaaatccttcagaaggtttcccagggctgagatttgcctctgaattttctgaagctttgatgtcttgattgtcaaaagagctgcttttatagttttgctctcattagttttccttcccttgtctgacttgtctgttgcttctcaggggctctgtgaattacaccttttctgttccttattgctcttcaaagcaagtctcagccccatctcctggtgacacrggtagcagttggctctgtcttcactccacctggcgggcatgtgtcctcatcgtgatctgtggatcctatctggagcgagccaaagtttagtttttaggggcagtttatgttttttatcttttctagtggagtttaagctcaaggtcatgaatggttaggaca

SEQ ID NO: 940916 - DNA, 574 bp, Homo sapiens
aggcttgtagcctgggacaagctttcagccctgctcactggctgcctggaaataaacttggtgctgttgcagggagcacagtgggagtgagactggactttcaggctgcgggctgagtgggagctgggtgaggcatgtggctgccagctttcccccacttccctggcaacctgtgtgaggcagcagaggaagcctaatttccctgggaacataactccattggcctgggaaccacagcaccatcacccacagcatctgcagcaagctccgcctaaaragacatacctaaccctgccctacctgatgatctttctctatgtgccctggtagccaaagacaaacaaagtaatctcttgggagctctctggcctgtccaccatctaaccttagggcaagcttatattcccctatactactacaactgacgcactcttgaaagcaccacctcctggctggaggccatccaacacaaaaccagagcacttaagaaaaatacaaccaaggaccctcacagagtccacttctctcctctgctacctccactgaagcacgtgctggtatccaaggacgagag

SEQ ID NO: 940917 - DNA, 605 bp, Homo sapiens
ttgtggattgaactgctatctgtgttatgtggctgctcattttcagtatcatcctatgagcataaaattcagatttctgatcttagcattcaaggccatccacagtctagcccagtactgtcctcttctctacttttcccacaatccacacactccatccaatcaggattactctccatcattaagaattctcaactcygcatcatacttcacaacttaacttccctcttccactctaattgtccacttatctatcacttaagacattcacgaagggcagccaagatggccgaatagcaacagctccggtctacagctcccagcgtgagcgacgcagaagacgggtgatttctgcatttccatctgaggtaccgggttcatctcactagggagtgccagacagtgggcacaggacactgggtgcagtgcaccgtgcgcgagccgaagcagggcgaggcattgcctcactcaggaagtgcaaagggtcagggagttccctttcctagtcaaagaaaggggtaacagatggcacctggaaaatcgggtcactcccaccctaatactgcacttttccaacgggcttaaaaaacggcgcaccaggaggt

SEQ ID NO: 940918 - DNA, 605 bp, Homo sapiens
ttgtggattgaactgctatctgtgttatgtggctgctcattttcagtatcatcctatgagcataaaattcagatttctgatcttagcattcaaggccatccacagtctagcccagtactgtcctcttctctacttttcccacaatccacacactccatccaatcaggattactctccatcattaagaattctcaactccgcatcatacttcacaacttaacttccctcttccactctaattgtccacttatctatcacttaagacattcacgaagggcagccaagatggccgaatagcaacagctccggtctacagctcccagcgtgagygacgcagaagacgggtgatttctgcatttccatctgaggtaccgggttcatctcactagggagtgccagacagtgggcacaggacactgggtgcagtgcaccgtgcgcgagccgaagcagggcgaggcattgcctcactcaggaagtgcaaagggtcagggagttccctttcctagtcaaagaaaggggtaacagatggcacctggaaaatcgggtcactcccaccctaatactgcacttttccaacgggcttaaaaaacggcgcaccaggaggt

SEQ ID NO: 940919 - DNA, 605 bp, Homo sapiens
ttgtggattgaactgctatctgtgttatgtggctgctcattttcagtatcatcctatgagcataaaattcagatttctgatcttagcattcaaggccatccacagtctagcccagtactgtcctcttctctacttttcccacaatccacacactccatccaatcaggattactctccatcattaagaattctcaactccgcatcatacttcacaacttaacttccctcttccactctaattgtccacttatctatcacttaagacattcacgaagggcagccaagatggccgaatagcaacagctccggtctacagctcccagcgtgagcgacgcagaagacgggtgatttctgcatttccatctgaggtaccgggttcatctcactagggagtgccagacagtgggcacaggacactgggtgcagtgcaccgtgcrcgagccgaagcagggcgaggcattgcctcactcaggaagtgcaaagggtcagggagttccctttcctagtcaaagaaaggggtaacagatggcacctggaaaatcgggtcactcccaccctaatactgcacttttccaacgggcttaaaaaacggcgcaccaggaggt

SEQ ID NO: 940920 - DNA, 661 bp, Homo sapiens
cacttatctatcacttaagacattcacgaagggcagccaagatggccgaatagcaacagctccggtctacagctcccagcgtgagcgacgcagaagacgggtgatttctgcatttccatctgaggtaccgggttcatctcactagggagtgccagacagtgggcacaggacactgggtgcagtgcaccgtgcgcgagccgaagcagggcgaggcattgcctcactcaggaagtgcaaagggtcagggagttccctttcctagtcaaagaaaggggtaacagatggcacctggaaaatcgggtcactcccaccctaatactgcrcttttccaacgggcttaaaaaacggcgcaccaggaggttatatcccacacatggctcggagggtcctacgcccacggagtctcactgattgctagcacagcagtctgagatcaaactggaaggcagcagcgaggctgggggaggggcacccgccattgcccaggcttgcttaggtaaacaaagcagcctggaaacttgaactgggtggagcccaccacagctcaaggagtcctgcctgcctctgtaggctccacctctgggggcagggcacagacaaacaaaaagactgcagtaacctctgcagacttaaatgtccctttgaagagagcagtggttct

SEQ ID NO: 940921 - DNA, 661 bp, Homo sapiens
cacttatctatcacttaagacattcacgaagggcagccaagatggccgaatagcaacagctccggtctacagctcccagcgtgagcgacgcagaagacgggtgatttctgcatttccatctgaggtaccgggttcatctcactagggagtgccagacagtgggcacaggacactgggtgcagtgcaccgtgcgcgagccgaagcagggcgaggcattgcctcactcaggaagtgcaaagggtcagggagttccctttcctagtcaaagaaaggggtaacagatggcacctggaaaatcgggtcactcccaccctaatactgcacttttccaacgggcttaaaaaacggcgcaccaggaggttatatcccacacatggctcggagggtcctacgcccacggagtctcactgattgctagcacagcagtctgagatcaaactggaaggcagcagcgaggctgggggaggggcacccgccattgcccaggcttgcttaggtaaacaaagcagcckggaaacttgaactgggtggagcccaccacagctcaaggagtcctgcctgcctctgtaggctccacctctgggggcagggcacagacaaacaaaaagactgcagtaacctctgcagacttaaatgtccctttgaagagagcagtggttct

SEQ ID NO: 940922 - DNA, 561 bp, Homo sapiens
aacgtggtagtgggcattattccaagcacacttatgaggtatacacagttattacccccatttcacagatgaggaaactgaggcattacagagttgaagtaacctgtgccatgttacaaggacaagaggcaaagctggtgtctgaactctgaactctaaagtagttggctttagagtctgcaagttgagccatacacagtcacctgcctctctgcataggaaacacagcatgtttagaaacaccgtccttatccttctccccaaaaccaggcgtgtgggtgagagatcttagagcacaagaaaacgaagcaacttccccaagtagcacctgacttaatgtgggatcttgccaccgagtcatgagaaaatccagtmtacatttaagtgaagtgaagagcaggttggaaagagtgagaggagggggcatggaggcagtatctggttactgcagaccaaggggacctggatctagaaattacagaggaggggtgagtacagtgataggcctaaacacggagcacagaatcgtccctcagggaacaaaaaaaaatgcaaggctgc

SEQ ID NO: 940923 - DNA, 646 bp, Homo sapiens
aagtagtgttttatagctccccttgtagagattttaactccctggttagatgtagtcctagatattttattttattttatttttgcagctattataaattggagtatgttcttgatttggctctcaactttaatattgttagcatacagaaatgctactgatttttgtacattgactttttttttttttttgagatggagtttcgctcttgttgcccaggctggagtgcaatggtgcaatctctgctcactgcaacctctgcttcctggattcaagcgattctcctgcctcaacctcctgagtagctgggattacaggcatgcrccaccatgcccagctaattttgtgtttttagtagagacagagtttctccatgttggtcaggctggtctcgaactcccgacctcagtcgatccgcctgcctcagcctcccaaagtgctgggattacaggcatgagccactgtgcccggccacattgactttttatactgagactttactgaagttgtttatcagttccagaagccttctggtgaagtctttagggtttttgaggaatagaatcacatcaccagtaaagagagagaatgtgacttcttcttttcctatttgtatgccttttatttctttatcttgcctgattgc

SEQ ID NO: 940924 - DNA, 589 bp, Homo sapiens
cctagtctggggcttttactggttggtaggtttttttaaattactgattcaatttcataactcaattagtatgttcagggtttcaatttcttcccaattcaatcttggaatattgactttgtatactgaacctttactgaagttgttgatcagttccaggagccttttggtgaagtctgtagggttttcaagaaatagaatcataatcagtaaagagagaatttaacttcttcttttcctacttgtaggccttttatttctttctcttgcccaattgctctggacttccactatgatgttgaataggagcggtgagtgggcatccttgtcttgttacagttttcaaggcaattgaaaagtgtatttctaggaatttatccatttcctctagattttctagtttgtgtgcatagggatgttcataatagtctttaargatcttctgtatttctgtgagctcaattgtaatgtcttctttgtcatttctgattgtgcttatttggattttcttttttgttgttgttgttgttaatctagctaatggtttatggatcttctttatcctttcaaaaaaccaacttttggtttc

SEQ ID NO: 940925 - DNA, 573 bp, Homo sapiens
acaggcccgtggacagatggaggaggaggaggaaaacgtgtggttcgttagggaggcttcttggaggagtcctctaacaatgaaagccagctttcatgtgaaaagaaatgagatcttttgcctaaaacagtggttctcaaaattggctgcaaattggaatcacctgttgtgttttaaaaagctctggaggccaggcacagtggctcatgcctataattccagcactttgggaggctgaggctggcagatcacttgagtcagaagttcaagaccagcctggccaacatggcaaaacaccatatcaamtaaaatagaaaaaaaaaatagctggacatggtggtgcatgcctgtagtcccagctacttgggaggctgaggcatgagaatcgcttgagcccagggagctgaggttgcagtgagccaagatcgcaccactgcactccagcctggacaacagagtgagactctgtctcaaaaataaataagcaagtaaataaataaatataaaaagcactgatccctgcttccaaacactggagattcagatttaattgagataaggccaggatgtaga

SEQ ID NO: 940926 - DNA, 583 bp, Homo sapiens
ttgcataagtaacaaggagcccaatgtgaatcaccaagataatggggaaaatgtctccagggcatgtcagagacctttgtggcagcccctcccatcacaggcccagagttttagaaggaaaaaatggttttgttggtcaagcctagggtycccgtgctgtgtgcagtctagggacttggtgccctgcatcccagatactccagttgtggctgaaaggggccaatgtagagcctgaaccatagcttcagagggtggaagcccaaagccttggcagcttccacatggtgttgggcctgtgggtgcacagaagtcaataattgaggtttgggaacctccacctagttttcagaagatgtatggaaatgcctggatgcccaggccaaagtctgctgcaggggcagggcgctcatggagaatctctgctagagcagtgaggaaggaaaatgtggagtggaagcctccacacagagtccctactggagcactgcctagtggagctgtgagaagaaggccaccatccttcagaacccagaatggtagatccatcaacaacttgcactgtgtacctagaaaagctgcagac

SEQ ID NO: 940927 - DNA, 735 bp, Homo sapiens
taccggttgttcctttccatgcttagtgcttccttcaggagctcttttagggcaggcctggtggtgacaaaatctctgagcatttgcttgtctgtaaagtattttatttctccttcacttatgaagcttagtttggctggatatgaaattctgagttgaaaattcttttctttaaaaatgttgaatatcggcccccactctcttctggcttgtagagtttctgccgagagatccgctgttagtctgatgggcttccccttgtgggtaacccgacctttctctctggctgcccttaacattttttccttcatttcaactttggtgaatctgacaattatgtgtcttggaattgctcttctcaaggagtatctttgtggcgttctctgtatttcctgaatttgaatgttggcctgccttgctagattggggaagttctcctggataatatcctgcagagtgttttccaacttggttccattctcccygtcactttcaggtgcactaatccgatgtagatttggtcttttcacatagtcccatatttcttggaggctttgttcatttctttttattcttttttctccaagcttctcttctcacttcatttcattcatttgatcttccatcactgataccctttcttccagttgatcgaatcggctactgaggcttgtgcatttgtcatgtagttctcgtggcttggttttcagctccatcaggtcctttaaggactta

SEQ ID NO: 940928 - DNA, 599 bp, Homo sapiens
ctggccaccatggtgcaaccccatctctactaaaaatacaaaaattagcaggatatggtggcacacacctgtaatcccagctactcaggagcctgaggcacaaaaatcgcttgaactgggaggtggagtttgcagggagccaagattgcaccactgtattccgcctgggcagcagagtgagactctgtctcaaaaaaaacaaacaacaaaaagatgtgttaaacaaatttatattcatataaacacagttacgctccacctggagctcgggttcaaatcctggccctactgctgtgagtaactgttatggacacctgctggcacctctccttcaggtgcagccaccaattgtcrttgagaacgcccccagcctcagcctatgtggtttacaagggactatccaggccctgggatgcccaggtctgtcccagcaggcccagcaccgacctgcccgccactgtgactgttacagcagtgaccacaagctccagtcagagctcctcctaggccttttctcggactcttggaaaaagaggctttcacttaaggctgctgacaggctgagagggctcctaccaggcctgggccaccacagggga

SEQ ID NO: 940929 - DNA, 718 bp, Homo sapiens
agcaggtcttgggctgggttttagaccatggagcaaagaggcttgctggctaaaccattgaaggacatcctgcttctatggggggaactggaacagagccagggctgccccagccgtccctctctatgggtgtcatatccacagcacattctacagttattcttgaggactacaggtgagtaaagggggagaagcgagattgtccaaagccacctaaaccctggcacccccgttctactttctgcctctatgacttcgatgactgtagggacttcatataactggaatcacacagtatttgccctttgctgactgccwtatttcacttagcataatgtcctcaagtttcgtccacgttgtagcatgggtcagaacttccttcctttttaagtctgaataacattccattgtgtgtacagagcacattttatttctcaattcatccgctgatagacactcaagatgcttccaccctttggctattgtgaatcatgctgctacgaacatgggtgtacaaataaggcacgaataacttcttattgtaagatcaaataagtgaatgaggaaatgaatacatgaatgaatgaacaaataaatgatatgtaaagggcatccacacttgcgcttctcccacagccccactcactccctgactatgatgctggtttctgctgctgctgccgctgcctcctcctcctcctcctcctctttctccggc

SEQ ID NO: 940930 - DNA, 718 bp, Homo sapiens
agcaggtcttgggctgggttttagaccatggagcaaagaggcttgctggctaaaccattgaaggacatcctgcttctatggggggaactggaacagagccagggctgccccagccgtccctctctatgggtgtcatatccacagcacattctacagttattcttgaggactacaggtgagtaaagggggagaagcgagattgtccaaagccacctaaaccctggcacccccgttctactttctgcctctatgacttcgatgactgtagggacttcatataactggaatcacacagtatttgccctttgctgactgccttatttcacttagcataatgtcctcaagtttcgtccacgttgtagcatgggtcagaacttccttcctttttaagtctgaataacattccattgtgtgtacagagcacattttrtttctcaattcatccgctgatagacactcaagatgcttccaccctttggctattgtgaatcatgctgctacgaacatgggtgtacaaataaggcacgaataacttcttattgtaagatcaaataagtgaatgaggaaatgaatacatgaatgaatgaacaaataaatgatatgtaaagggcatccacacttgcgcttctcccacagccccactcactccctgactatgatgctggtttctgctgctgctgccgctgcctcctcctcctcctcctcctctttctccggc

SEQ ID NO: 940931 - DNA, 570 bp, Homo sapiens
acatcacctgcagctgcagacctcaatctatggtacatatcaagcaattcaactttctcttgcaacgtcatggcttttctctgcttcttgggagcacttccaagtatcactagtggcactttgtatgggtcccatggtgtcactcaagatttctggtattgcactaaacgcaatgaaaaatatgtgagaaccatgagatcactttctactgtgatactcgatttactagacaagtgaactgctcatgttgagataattaggatcacatggtgttttaagtggatacctgcaacacttcagctcaccacgatagtaacaggaggtggctgtgaaattattataatagtacagaatgtgctacagttaattttatggggttacaatttaatactgtatcttcatgtttgcatagctttctccgaactgcaaatgatgcyatgtacagtctgtgtttgtgtatgtaagctttgatacattttaactttttaaacaatagatttgtgtctatcttatgggagtaatttataaaagtagactagtatctacacatattttatgtagtcataacat

SEQ ID NO: 940932 - DNA, 620 bp, Homo sapiens
agatcctacttaacccagtggtgacccaaacctgcaacgttgaagggtttgaattctcaatgatcctgcttttattgaaaggccatagttttccattaacattcaaacattacctttattaaagcataacttatataaataatatgcactcatttagtatagagctctataagatttgaaaaatgaacataactcaagtaaccaccactgtaaaatcaaatatagaacacttccatcactccagagtctctcatgccctttkgcagtgatgcctcacctgagtaacagacaactgctggtttgcttgttaaagtttttcatgtaaatagaatgacacaggatgtactatctggggcctggcttctcatatcagcaaaatgtttttgagatgcatctgtgttgttatgcacatagtagttcattcctttttatttctgagtagtataccattgtaaagatgtaccacctgctggtggacatttgtgtggtttctactttggggcatgtgccagttatcaatttattgcctcatagctgtggatttgctctaagagtaccttttccatattagtggcctggatttcccttttacagtgagcaaaatgttaagcattgtcagc

SEQ ID NO: 940933 - DNA, 615 bp, Homo sapiens
taaagtgactgtgcattggagaacaagaaatgcccagaccttttagggaaagctggaaactgactctgaattggtgctaattcctagggcttcaaaatgttattatggtcagcaagtcaaagtagaggcttatggtggttagatgatagatggagtcctacgtctcactaacagtggaccaaattagtccacagacccaccctgcagttgtttcccagctcctaaatgtagagagatctatacgtcaggacagatctcagcaagatcaaagggagtaggtacacactacagagcagacatacatggaacagacacacatggcaactggcacattcccacattggttctctgacccatgcagtgaagatcactatggtaggaaaggctaagtggtagcacctggaacttccctaccaggatrgtaaaccagaagcagtgctgcattcctaggagagctgcagaagtaaatgccactatcaaaaccttgaaacaagcagaggtggtgatagctataatatctcccatttaacttaccagtttagcctgtgcagaagccagatgaaccttgaagagtggtcacggattgtcataaatgtaaccgatgggaattccaat

SEQ ID NO: 940934 - DNA, 624 bp, Homo sapiens
acgattatatgtcttggggttgctctgctcgaggagtatctttgtggcgttctctgtatttccttaatttgaatgttgacctgtcttgctaggttggggatgttctcctggataatatcctgaggagtgttttccaacttggttccattctccccgtcactttcaggtacaccaatcmaacgtagacttggtgttttcacataatcccatatttcttggaggctttgttagttccttttcactcttttttctctaatcttgtcttctcctttatttcattaagttgatcttcaatctttgatatcctttcttgtgctttatcgacttggctattgataattgtgtatgcttcatgaagttctcatgctgtatttttcagctccatcaggtcatttatgtgcttctctatacttgttattctagttagcaattcctctaatctttttacagtgttcttaacttccttgcattgggttagaacatgctcctttagcttggaggagtttgttattacccaccttctgaggcctacttctatccatccgtcaaactcattctccatccagttttattcccttgctggcaaggagttgtgatcctttggaggagaagaggcattctgtt

SEQ ID NO: 940935 - DNA, 624 bp, Homo sapiens
acgattatatgtcttggggttgctctgctcgaggagtatctttgtggcgttctctgtatttccttaatttgaatgttgacctgtcttgctaggttggggatgttctcctggataatatcctgaggagtgttttccaacttggttccattctccccgtcactttcaggtacaccaatcaaacgtagacttggtgttttcacataatcccatatttcttggaggctttgttagttccttttcactcttttttctctaatcttgtcttctcctttatttcattaagttgatcttcaatctttgatatcctttcttgtgctttatcracttggctattgataattgtgtatgcttcatgaagttctcatgctgtatttttcagctccatcaggtcatttatgtgcttctctatacttgttattctagttagcaattcctctaatctttttacagtgttcttaacttccttgcattgggttagaacatgctcctttagcttggaggagtttgttattacccaccttctgaggcctacttctatccatccgtcaaactcattctccatccagttttattcccttgctggcaaggagttgtgatcctttggaggagaagaggcattctgtt

SEQ ID NO: 940936 - DNA, 736 bp, Homo sapiens
gcgctggtttctcctcatcttcctggatttatctacttttggtctttgatcctgctgatgttcggatggggtctctgagtggacatactattcctttctgtttgttagttttccttctaagagttagtgccctctgctgcaggtctgctggagtttgctggaggtccactccagatgctgtttgccttggtgtcacgagtggaggctgcagaacagcaaagaatgctgcctgttctttcctctggaagcttcgtcccagaggggcacccactggatgccagccagagctctcctgtatgaggtgtctgttggcccctactgggagatatctcccaatcaggataaacgagggtcagggacccacttgaggaggcagtctgactcttaccagagctcgagcactgtgctgggaaatccactactctcttcagagctgtccrgcagagatatttaagtctgctgaagctgctcccatatccaccccttcccacaggtgctctgtcccagggagatggggttttatctattagtccctgactgccttttttttagagttgccctgcccagagaggaggaatctagagaggcagtctggccagagtggccttgctgagctgaggtggtgggctctacccaattcgaactcccaggcagctttgtttagactgtgagggtaaaatgcctactcaagcttcagcaatggcagacggccctcctccctccaagctcgagtgtc

SEQ ID NO: 940937 - DNA, 735 bp, Homo sapiens
cgctggtttctcctcatcttcctggatttatctacttttggtctttgatcctgctgatgttcggatggggtctctgagtggacatactattcctttctgtttgttagttttccttctaagagttagtgccctctgctgcaggtctgctggagtttgctggaggtccactccagatgctgtttgccttggtgtcacgagtggaggctgcagaacagcaaagaatgctgcctgttctttcctctggaagcttcgtcccagaggggcacccactggatgccagccagagctctcctgtatgaggtgtctgttggcccctactgggagatatctcccaatcaggataaacgagggtcagggacccacttgaggaggcagtctgactcttaccagagctcgagcactgtgctgggaaatccactactctcttcagagctgtccggcagagatatttaagtctgctgaagctgctcccatatccaccccttcccacaggtgctctgtcccagggagatggggttytatctattagtccctgactgccttttttttagagttgccctgcccagagaggaggaatctagagaggcagtctggccagagtggccttgctgagctgaggtggtgggctctacccaattcgaactcccaggcagctttgtttagactgtgagggtaaaatgcctactcaagcttcagcaatggcagacggccctcctccctccaagctcgagtgtc

SEQ ID NO: 940938 - DNA, 833 bp, Homo sapiens
gtcagggacccacttgaggaggcagtctgactcttaccagagctcgagcactgtgctgggaaatccactactctcttcagagctgtccggcagagatatttaagtctgctgaagctgctcccatatccaccccttcccacaggtgctctgtcccagggagatggggttttatctattagtccctgactgccttttttttagagttgccctgcccagagaggaggaatctagagaggcagtctggccagagtggccttgctgagctgaggtggtgggctctacccaattcgaactcccaggcagctttgtttagactgtgagggtaaaatgcctactcaagcttcagcaatggcagacggccctcctccctccaagctcgagtgtcccaggtcgacctcagactgctgtgcttgcaatgaggatttcaagccagtgaatcttagcttgctgggctccgtgggggtgggacccgccaagctagaccacttggctccctggcttcagccccccttccaggggagtgaatggttctgccttgctggcattccaggcaccactggggtatggaaaataaaactcctgcagctagttcagtgtctgcccaaatggctgcccagttttgtgcttgacacccagggccccagtggcrtaggcaccggagggaatctcctggtctgcgggtttcaaagaccatgggaaaagtgcagtatctgggccggagtgcaccgttcctcaggtacagtccctcatggcttcccttgggtagaggaggtagttccctgaccccttgtgcttcctgggtgaggtgacaccccaccctgtttcagctggcc

SEQ ID NO: 940939 - DNA, 833 bp, Homo sapiens
gtcagggacccacttgaggaggcagtctgactcttaccagagctcgagcactgtgctgggaaatccactactctcttcagagctgtccggcagagatatttaagtctgctgaagctgctcccatatccaccccttcccacaggtgctctgtcccagggagatggggttttatctattagtccctgactgccttttttttagagttgccctgcccagagaggaggaatctagagaggcagtctggccagagtggccttgctgagctgaggtggtgggctctacccaattcgaactcccaggcagctttgtttagactgtgagggtaaaatgcctactcaagcttcagcaatggcagacggccctcctccctccaagctcgagtgtcccaggtcgacctcagactgctgtgcttgcaatgaggatttcaagccagtgaatcttagcttgctgggctccgtgggggtgggacccgccaagctagaccacttggctccctggcttcagccccccttccaggggagtgaatggttctgccttgctggcattccaggcaccactggggtatggaaaataaaactcctgcagctagttcagtgtctgcccaaatggctgcccagttttgtgcttgacacccagggccccagtggcgtaggcacyggagggaatctcctggtctgcgggtttcaaagaccatgggaaaagtgcagtatctgggccggagtgcaccgttcctcaggtacagtccctcatggcttcccttgggtagaggaggtagttccctgaccccttgtgcttcctgggtgaggtgacaccccaccctgtttcagctggcc

SEQ ID NO: 940940 - DNA, 591 bp, Homo sapiens
ggtgtctcagtatgttgcttgcttctcacagttcactgtatctgggcccagttcagcactagggctcacctaagagttgcagtccttatggcctagacagcttttcaaatttacttagacactgcgagttctttggccctaggtggcaaggttttcaggaactcaagttcagactgctgggatgagtgattttcctctggctagagctggtttaaatgctccctccatgagtgagcatcagttgagttttgttcagtttttctttctgctctaacaggacagcactgagttcaatacctcacaattgctgtgttctccttcccccagtgcccagagatgctctcagcactatgctgctgctgctgggagtagggcagggatggtgttggasattcaggacttttttctttctcttcggtgcttctttcagtaatatgtagttactgtgagtgctctcctcatttttggttcttatgaaggtgttttttcctatatagatagtagctaaattggtgtgcttgctggggaataatcggtggagccttctattctgccattttgcttctttgctatcactggaattaattttgg

SEQ ID NO: 940941 - DNA, 594 bp, Homo sapiens
taaccccccagtgtaatggttttaggacgtagggcctctggggggtaattaggtcatgaatgtagagccctcatgaatgggattagtgctcttataaaagggatttcccaaacctctctcattctctttccaccacctgcagatacaatgaaaagacagyagtagtctttgacctaaaagagggccctcatcagaacccaaacatgtgggcaccctgaccttggacttccaacctccagaatagtaagaaataaatttctgttctttataaggcacccagtctataatactttgttacagcagcctgaacagactgaggcagaaactggtgccaagaattaggggtgctgctgtaacaaatacctaaaaaggttatcttcatttatttttcacataaccaagcaaaatatgtgaaacagtaaactctgactgttgaagccatttaattgttttctattacactaacattcaaggcatcctgatacaaacgcttaccaaaaagtgcatttgaaaagaaaacgaggaagtctaactagaatagcagtacgcaaaacaaatttaaaaaattaaaaaacagaagtgtgtcttcggttc

SEQ ID NO: 940942 - DNA, 579 bp, Homo sapiens
tcattccatgaattcttcagtttcaggattcctgtttgtttgtttgttatgatacctctttagtaaatttctcattcatattctgaattggttttgtgatttatttgtattatctgaattctctcatatcttactgagtttcttgaatatcattttgaattctttctctaggatttcataaatttctttttctttggaatttcctgctagaccataattttgtttctttggagatgtcgtatttgcttgctttcttcatggttcctatatccttatgttgatatctgcacatctggtataattgatgctacttctaattttttgaatttgcttttgcagtggaggatacttttatgaagatrtgtctgtggtgtttgttgggtagggcactttggcctgattctgggtgcatgcagtagtgtactctctatataatttcttaagctttaaacagcatcagttgtatccatgatttcctcagcagcttagggtgtagttgtttgtggaggctgtagtaaagttttgttggagatagagatgccaggtgggccagtcctttgggctctgtggtggcaatgg

SEQ ID NO: 940943 - DNA, 810 bp, Homo sapiens
acacctactatatgcctgtaactattaagtgctaattgttactaagatgactgtaatatagatcttgacttcaaggggaccaacaatacataatttaaaacaaagacatccacaaactcatatataacctaattagcttttcaatttcgtattgctaatttacctgaaccatttattcaatactcacttattatgtrtattggaatttaatcacactctttctctttcttttcaagttttaaatcaactgagagcaaaacataaagtcagacagatggagagaaaatggcagttttattactgatgaagctgggctagctggtagaaattaatatttggccacaagcagactttctgatgctttcactgatttaaaattggctgtttagaattattggctgccccatacccacttttcactagagtgaaggctgacttacaagcttactacatgaaggaacaaaaaggacagaaatgcttttgggcttaccaggcatgttgccccaaaagaggaagcgtagaaggaaataagacatatggtcatttttttccccaaatcttaaccaaaaaaaaaaaaaaaaaaagtgggcaggcagggttttttatgtttaaatctacatgtgtatgcctgtatgtgtgccaggggtattggcggttggtagtgaacaatgtgaacacaaagtagcctcaaggagcacccagtatcacgatccttcattccacagctctatctactgcacagacactgaaattttgtgactgatgcccatattcttctactttatttggcttttttgaataattatacca

SEQ ID NO: 940944 - DNA, 594 bp, Homo sapiens
caagataaagacagataaactaaaagttttccaccaatagacatttactaaataaaattctaaaagatgtataccaaacaggaaattcgaaatataagaaggaatgacaggcaaagaaaattgtaaatataggtgtaatcaaaaaggaatgaggcggggacaagaggggcaggaaaatattcactgaggaaccaatggtggttctyagaacaggaagatggtagagtcttctcatttggtaacaagtcaggagggaagtggtttataggtggcagttggtaaactggcctaggcatatcccaaggaagataaccaatcaactgagaagaaagttacctttcaagccacgatgtggttttttttgtttgtttgttttaggtagctctctgcattgtttttcaagaattattctgtcatacttcatagactttagccattttgctttaggagaggtgggccaaagcacctgggtgtgggttgtgagaggagaagttggctgaattatctgcagaattggcttagtactcctcttcattttacaagtaaaaaaaatcatgtcttttgtcagaccctgttctttaggatgccacagcc

SEQ ID NO: 940945 - DNA, 617 bp, Homo sapiens
atggaagaggtccaatataattaacctgccaccaggtagctggctgctcaccccaaggaatggtgccatatcaagggctcagtgttggcctctactgctgtcaaattgggcactcagcagtggccatagccaggtcagccttggtgagtggaaatccatgttgctgagcccatgcataacctccatccccgtcaccatggtcactttgttcgtgggcccgtcgggtgatgacggggtggctggggaaaaaggctgaatartgtccacagaatgagtcatcttgtccatttgattattaaaatcttcctctgctgaggtcatccattggtgagcactcacatgggatacaaatatcttcagtttttgaccactcaggtccatctacatacattttccccaaatttctttgtcgccaattttccaatcatgcttcttccaagtccctgaccatccagccaaactattggctacagcccgtgaatcagtatataatcgcacatctggtcatttctccttccatgcaaagtgcacaaccaggtgcactgcttgtagttctgcccactgggaagattttccttcaccactatccttaagggatgtcctagaaaggagctgta

SEQ ID NO: 940946 - DNA, 710 bp, Homo sapiens
agatggtagtcttggcagaagcattgcatgcaggataggaaaacccatatctggagtaagtgtctattccactgaggatgaacctctgctctttccatgatggaagaggtccaatataattaacctgccaccaggtagctggctgctcaccccaaggaatggtgccatatcaagggctcagtgttggcctctactgctgtcaaattgggcactcagcagtggccatagccaggtcagccttggtgagtggaaatccatgttgctgagcccatgcataacctccatccccgtcaccatggtcactttgttcgtgggcccgtcgggtgatgacggggtggctggggaaaaaggctgaataatgtccacagaatgagtcatcttgtccatttgattattaaaatcttcctctgctgaggtcayccattggtgagcactcacatgggatacaaatatcttcagtttttgaccactcaggtccatctacatacattttccccaaatttctttgtcgccaattttccaatcatgcttcttccaagtccctgaccatccagccaaactattggctacagcccgtgaatcagtatataatcgcacatctggtcatttctccttccatgcaaagtgcacaaccaggtgcactgcttgtagttctgcccactgggaagattttccttcaccactatccttaagggatgtcctagaaagga

SEQ ID NO: 940947 - DNA, 624 bp, Homo sapiens
ctggtggtgcctgcatattgtgcagaaccatctgtggaccaggccatagtcttctcttccactgtcaactgatcataaggaactcaccatggggccatcgatgtaggccgaggaagacaaggcagggtggcaggagtggagaccaggggcatttgagccacttcctcatgtaacttacttgcgccttcaggacctgctcgagcctgatcacgtacataccacttccattttgatkattgaatgctactgcgcatgacccactttatggctagatgggtcagaaagcacccaattcatgttaagcagttcaggttgcatggtgacttgatgacccataatcaaatgttcagtttccaccaaagcccagtaacaggccaagagctgtctctcaaaaggagagtagtcatctgcagaagatggcagggccttgctccaaaatcctagaggcctccgctgtgattcacctagagggacatgtcaaaggctgcaaacagcatccctatctgccactgacacctcaagcaccatcggatctcctgggtcacatggcccaagtggcagagcaacttgcacagcagcctggacctgttgcagagccttctcctgttctggaccccgctcaag

SEQ ID NO: 940948 - DNA, 583 bp, Homo sapiens
catgatatagtctggatgtttgatcctccaaatctcatgttgaaatgtgatccctaatgttggaggtggggcccagtgggaggtgttttggtcatgggggtggatccctcatgaatggcttggtgccaccctgtggtaatgagtgagttctcactctatgagttcatgcaagagccggttgtttaaaagtatgacacctccctccagccctgctttgcttcctgtctctctcaccatgtgacatgcttgctcccccttcaagaatgctatgattgaaagcttcctgaggtcctcactagatacagatgctggtgccaggcttcttgtacagcctgcagaaccatgagccaaataaacctctttttgttgtaaattacccagactcaggtgttcyttcatactaatgcaaaacagactaatacatcacagtatccagatatttggtcaaacactagtctagatgtttctgtgaaggtattttttagatgaaattacatttaaatcagcagactttgagtaaagcagattacatgggtaagccatgatgtgggtgggtttcatctaatcagttgaaggccttaag

SEQ ID NO: 940949 - DNA, 747 bp, Homo sapiens
ggttagacaaccacaacttagcagtgctaccatgaatgcataaggatggcctgacatctgggagaaataatgagtttctaacttcccaagtttctatacgttcattttaaatgtggagaaaatgcaaaggtgcagtgtgatggtgtgaaaattcatgagttaaattcctaacccctaaggcgaagcctcgattataaaggtggaaccctgatgaatgggattagtgcctttataagagaccccacagaactagcttgctccttcccccatgtgaggacacagccagaaggcaccggcttctggtttctataaaccagaaggcaggtcttcaccagacattgaatctgctgatcgcgtgctcttggactttccagcctccagaactgtgagaaacaaatttttgttatttaaagtttcccattttatggtattttgttatagtagcctgaatagtctaagacattgggttattgttacaacaacaggtagattctttgatttctaggagagtctttccagaaaaataagaccactaatacagaggctttatattctatagaggaatttacagactggtaacggaaaagataggcatattgttttagtytattcatgctgccataacaaaacatcttagactgggtaatttataaaaagcataaacttattgctgacaactatgcaaactgggaaatcagggttatggagactagggaagtctaagctgggggattagcaggttcggtg

SEQ ID NO: 940950 - DNA, 526 bp, Homo sapiens
tgcagagcggagctgccttctccagggcctcctcgctgtgagaactaaagactccacaaatgacctgcctacagagaggagctatccactgtgggtctcctccaagctgttgtaacactcaataacgctcatgttagtgttgttcacccttcacttgtctgtgtacctcattcttcccagatgcaggaaaagatcttgagcaaaggcacagcaaccacagaggtttccagccagaaaaygaaacccccaaagatcctgtaacacaattaacgtttctcaaagggcagactgacatgccttcagtttgatagttctagatagggaaaacattcctcagtcagatacaatatctattttcatatgacatttaggtaagagtcacaactacatttcataaaacttatttaaacatctcaaatttcatagtcctatcaatctgtacatgtttatgttcccatcccaggaacttttcttctctacccacagaccattttaccttttctagtaaaaagggatttgggttccc

SEQ ID NO: 940951 - DNA, 727 bp, Homo sapiens
ggggcaaatacagaagacttgtgtgggcccctttaatgctgggggaacagcaggggttccctttggtccacccaatttttttttttttgaaacggagtctcactctgttgcccaggctggagtgcagtggcgcaatctcagcttactgcaagctctgcctcgcgattcacgccattctcctgcctcagcctcccaagtagctgggactacaggcrcctgccaccatgcctggctaattttttgtatttttagtagagatggggtttcaccgtgttagccagaatggtctcgctctcctgacctcgtgatccgcccgcctcggcctcccaaagtgctgggattacaggcgtgagtcaccgcgcccggcctggtccacccaatttttgatggtgttgtaaagacctttgtttaaccccatcagttttcattttattttacttcatttcttaaaaaccatctaaagattcccaccacccttctggggcgagtcctttaactcccttttgcctttgccattttgcttttttggtaattgccctaatgtttaattaagcatcagtaagactcatgggggacagaaaatttgatgagacttctcaaacagtaatatcacgcaaggtgcccatgtaaaatgggcccttttaccctcaatatttaccatgacctggataatagacatattcagggggagaatatcccagtcatcataaatccagtcccacatggt

SEQ ID NO: 940952 - DNA, 727 bp, Homo sapiens
ggggcaaatacagaagacttgtgtgggcccctttaatgctgggggaacagcaggggttccctttggtccacccaatttttttttttttgaaacggagtctcactctgttgcccaggctggagtgcagtggcgcaatctcagcttactgcaagctctgcctcgcgattcacgccattctcctgcctcagcctcccaagtagctgggactacaggcgcctgccaccatgcctggctaattttttgtatttttagtagagatggggtttcaccgtgttagccagaatggtctcgctctcctgacctcgtgatccgcccgcctcggcctcccaaagtgctgggattacaggcgtgagtcaccgcrcccggcctggtccacccaatttttgatggtgttgtaaagacctttgtttaaccccatcagttttcattttattttacttcatttcttaaaaaccatctaaagattcccaccacccttctggggcgagtcctttaactcccttttgcctttgccattttgcttttttggtaattgccctaatgtttaattaagcatcagtaagactcatgggggacagaaaatttgatgagacttctcaaacagtaatatcacgcaaggtgcccatgtaaaatgggcccttttaccctcaatatttaccatgacctggataatagacatattcagggggagaatatcccagtcatcataaatccagtcccacatggt

SEQ ID NO: 940953 - DNA, 727 bp, Homo sapiens
ggggcaaatacagaagacttgtgtgggcccctttaatgctgggggaacagcaggggttccctttggtccacccaatttttttttttttgaaacggagtctcactctgttgcccaggctggagtgcagtggcgcaatctcagcttactgcaagctctgcctcgcgattcacgccattctcctgcctcagcctcccaagtagctgggactacaggcgcctgccaccatgcctggctaattttttgtatttttagtagagatggggtttcaccgtgttagccagaatggtctcgctctcctgacctcgtgatccgcccgcctcggcctcccaaagtgctgggattacaggcgtgagtcaccgcgcccrgcctggtccacccaatttttgatggtgttgtaaagacctttgtttaaccccatcagttttcattttattttacttcatttcttaaaaaccatctaaagattcccaccacccttctggggcgagtcctttaactcccttttgcctttgccattttgcttttttggtaattgccctaatgtttaattaagcatcagtaagactcatgggggacagaaaatttgatgagacttctcaaacagtaatatcacgcaaggtgcccatgtaaaatgggcccttttaccctcaatatttaccatgacctggataatagacatattcagggggagaatatcccagtcatcataaatccagtcccacatggt

SEQ ID NO: 940954 - DNA, 563 bp, Homo sapiens
gtcaagtggtagctatcattgtcatcattatcatcatcgtcatgatcagaccctggttaagggctcaggagtgagacaggtggcatcctattctccaaaagccaggtcaggtgccagccaagagggccaggctctaggcccagtggctggacacagacagagaaaggaggaacagctcagcggccagccacagatagaagcccagcctagcaggtggatcccaagaagccgaaggcaatgtcactgcaaacagatggtaggtaatccagtcacgggattggcatcgggaggtaaggggggttctggcaagagacagagcctaatgccaagcaacacttggacatccttgggaaagagaagctgtcctccaytggccaaggatctcagctctgaggggagaggggagggtgtgatggttaatactgagtgtcagcttgattggattgaaggatgcaaagtattgatcctgggtgtgtctgtgagggtgctgccaaaggagattaacatttgagtcagtgggctgggaaagggagacccatccttaatctgggtgggcaccatct

SEQ ID NO: 940955 - DNA, 475 bp, Homo sapiens
gagaattgaaaatggcttatcagaaaagacagtaattaagcagaccttagaagataaaacatatttataggaggacaaggtaaagatgagattaaaggaaagattttccaagttgaaggacttctaggaccaatgatatagaaatatgaaaattttaagaaacaggtagttttgctagctaaaatatataaaggataaaaagagagctctaaggctgaaaattctagaagtattcccaaagtaktgagcaccatgctttaagaaaagaacagtttttctataattattatataattctataattactaaagttttgccaaaggtttggagggatatttttgagacaatttttttttttttttttgaggcaggatcttgttctgtcacctaggctggaatgcagtggtgcaaatacagctcactgcagctttgacctcctgggatcaagtgatcctcccacctcagcctcccaggt

SEQ ID NO: 940956 - DNA, 657 bp, Homo sapiens
agctaattttttatgaattttttgtagagatgagggtctcgccatgtgttcccaggctcatcttgaattcctgggctcaagcaatcctcccaccacagactcccaaagtgctgggattataggcatgagccaccacgcccagccaagacgatcttaaatgtggcttggggagaaaattccaatggctgtgtgaaggatgaaatgaaagaggaaatcatggaagcaagaggactaatggcgggttactacagcagtccaggaagcagacagtaaaactacaagccaagtcagagatagtgacaatgcaacaaagagaatgaaagaggtaygtcaaagatagaatcagaagtacctggagatcagtagcagtgaacatattagcacccaaatcttgatttctagatctattcctactaaaaggaaataaagctcttttgagaaatgatgaaatgcatgaaagtatgaatggagaacatcttgttacaccagaaacaaagacatgctcaaaagtggtggagacacatcaaaagggcacagaagcctgcttgaaagggctcccattggccgaattggcgtcagtatgaccctgtgaaagaatgaatggtggtaataaactacaacacaatggacaaaagaaacccattagtccacagtgtt

SEQ ID NO: 940957 - DNA, 508 bp, Homo sapiens
taagaatgccagctaataagtaagttagaagatcaccattttgcaaccacaaatgtaacaattgattcataggagaaacatcaataaatgcaaaaacctagttacaggctattggggaacagattattcatacagactcaaagtatcatcccacatattacttattacaaaaagaaaayagacttcatgatacagaaatctgacagacaccagtgatcaaacatagcatcatcaataatagaacaattggacattatgaaacttttgaaataatgcactgatgtggaaataatatcccttacatagcatttgtgccaaaaagtcttaacataaatctattatataaattgtagaatattctacaaataactggcctgaatttaatttataaaaaagaaaaaggattaagtaactgttctaaagtaaaggagatccaagagatgtaacaaccaaatgccctgagtaataactgattggatcctgaataagaaatatttttataaaacaa

SEQ ID NO: 940958 - DNA, 508 bp, Homo sapiens
taagaatgccagctaataagtaagttagaagatcaccattttgcaaccacaaatgtaacaattgattcataggagaaacatcaataaatgcaaaaacctagttacaggctattggggaacagattattcatacagactcaaagtatcatcccacatattacttattacaaaaagaaaacagacttcatgatacagaaatctgacagacaccagtgatcaaacatagcatcatcaataatagaacaattggacattatgaaacttttgaaataatgcactgatgtggaaataatatcccttayatagcatttgtgccaaaaagtcttaacataaatctattatataaattgtagaatattctacaaataactggcctgaatttaatttataaaaaagaaaaaggattaagtaactgttctaaagtaaaggagatccaagagatgtaacaaccaaatgccctgagtaataactgattggatcctgaataagaaatatttttataaaacaa

SEQ ID NO: 940959 - DNA, 508 bp, Homo sapiens
taagaatgccagctaataagtaagttagaagatcaccattttgcaaccacaaatgtaacaattgattcataggagaaacatcaataaatgcaaaaacctagttacaggctattggggaacagattattcatacagactcaaagtatcatcccacatattacttattacaaaaagaaaacagacttcatgatacagaaatctgacagacaccagtgatcaaacatagcatcatcaataatagaacaattggacattatgaaacttttgaaataatgcactgatgtggaaataatatcccttacrtagcatttgtgccaaaaagtcttaacataaatctattatataaattgtagaatattctacaaataactggcctgaatttaatttataaaaaagaaaaaggattaagtaactgttctaaagtaaaggagatccaagagatgtaacaaccaaatgccctgagtaataactgattggatcctgaataagaaatatttttataaaacaa

SEQ ID NO: 940960 - DNA, 617 bp, Homo sapiens
gctaggataaaagcaggcagaagaatgtggaaagactagagtctccacattctaaaggccgagtctcctggcctacatctttctcccatgctagatgcttcctgccctcaaacattggcctccaagttcttcagctttgggactcttggaccttcaaccatcgrctgaaggctgcactgttggctttcctacttttgaggttttgggacttggactggcttccttgctcctcagttttcagacggcctattgtcagacctcaccttgtgatcgtgtgagtcaatactccttaataaactcccctttatatatacatctatcctattctgtccctctagagaaccctgactaatacatacctcactttatctgatttttttttttgtttgttttaaagacagggtcttgctctgtcacccaggctggaatgcactggcgcgatcacagcacactacagccttgacctcctgggctcaagtggttctccctccttagcctcccaagtagctgtggctactacaggcatgtgccaccacactcagctaattcttgtattttttgtagagacagggtttcatcacattgcccaacctggtctcaaactcctggactcaagt

SEQ ID NO: 940961 - DNA, 545 bp, Homo sapiens
acggggtttcactgtgttagccaggatggtctcgatctcctgacctcatgatctgcccgcctcagcctcccaaagtgctgggattacaggcgtgagccaccgcgcccggctgactctcagatttttaaaaagcccccacactgcatgtgccttcgccccatgacaaggcaaatctgcagccacagctgcatgtccccttcacagtgtggtcctctcttgaagatgccccacatttgccaccatgtttgtcccttgaagccctccaggatctacaggtgaccaagagcctgctgtctggttatggaaggtctcagctttggttgtgtcagtgaatgaagaccaggacagtcacagttgtatgaggaggctgggggcatcccttayagtccctttgagggaggtgcagtccttgtagctggatgaccatagagaaccagcttctctgctgaaccaggtaagtgctgtagatgaggccaccaggctgttggccaccttgaagggcactgcagggagggagtgcttctgtcagtgtgtggaggcagaga

SEQ ID NO: 940962 - DNA, 747 bp, Homo sapiens
gtgcccctgggaaggggagaacagcgctgggaggacaacagccagaggactcaggctgcctgagtctaatcctagagctgcctcaagctggatccctggatagtcactgcctatgttgggcctcagtttccccctctgtgcaatgaatgggtcaggttagacaacctccaaggctcattctggctttggaattgaatgaacccttgggcagtgactgaggtgctagagagtatttggtgcacggagacagcacacggtctgcttctcagcaagggctgcctcttgctttcaccaggtgtgacagtgccactgaatggggctgcactggctggaataagccaccatggaggtggagggtgatggcaagatggtgtgctgcccaaacctccaagcctggcatctgttggagcctgggggaggggtgagcagcaatcaggcaggtggagaaggcactcgggaagaccggggagccctgggtgctggctccaggaacccatatcggcagcgcctctgacttgggacaacaaagagtgggggcaggccgggcacggtggctcaagcctgtaatcccagcactttgggaggcygaggcgggcagatcacgaggtcaggagatcaagatcatcctggctaacacggtgaaaccccatctctactaaaaatacaaaaaattagcctggcgtggtggcgggtgcctgtagtcccacctactcgggaggctgaggcaggagaatggcatgaacccgg

SEQ ID NO: 940963 - DNA, 515 bp, Homo sapiens
tataatcccagctactcagaaggctgaggcagagagaattgcttgaacccaagaggcagaggttgcagtgagctgagattgcaccactgcactccaggctgggcaacagaacaagactccgttttttttgttttttttgttttttttkttttttaagaaaaggaaaagtctggagtttgagaccatcctggccaacatggtgaaaccccgtctctactaaaaataaaaaaaatgagctgggcatggtggcaggtgcctgtaagtctcagctacttgggaggctgaggcaggagaattgcttgaaccctggaggcggaggttgcagtgagcccagatcacgccactgcactccagcctggcaacagagcgagactccacctcaaaaaaatttttgttttttcccctcaggcctcaggcccgccttggcctcccaaagtgctgggattacaggcatgagtcactgtgcccagccagaatttttcttctttatagcagtgactctgtagcgttggtgg

SEQ ID NO: 940964 - DNA, 625 bp, Homo sapiens
ggcgatttgtatattttctttggaaaggtttctacgcagatcatttgtctattttaaaatttagttatttgtcttttaaaaatgaatagactttattttttgaacagttttagatatacagaaaaattgagtgggcttttcatttttttattactggttgtaagagttttttaaaatagaatttaaatacaagtcacacatcagatatatgatttgtaaatacttttttgcattttgtaggttgtcttttcactttcttgatattctcccttggagcattacagyggtaaattttgagaaagtttatctatttttgtcctttgttatttgtgcctttgtatagccccaggtcacaaagactgaatcctatattttcttctaggagtcttatagttttacctcttacatttagctctatgatccatttggagttaatttttgtatatggtataagagaaggaagattcttttgcctgtggctatccagttgtcccagaactattttttgaaaagactgttcttccccattgaattgtctaggcacctttgtcaaaaattgactgaccttgaatgtaatagtgtatctctggactctcgattctattctctttaattcgtatgtcta

SEQ ID NO: 940965 - DNA, 625 bp, Homo sapiens
ggcgatttgtatattttctttggaaaggtttctacgcagatcatttgtctattttaaaatttagttatttgtcttttaaaaatgaatagactttattttttgaacagttttagatatacagaaaaattgagtgggcttttcatttttttattactggttgtaagagttttttaaaatagaatttaaatacaagtcacacatcagatatatgatttgtaaatacttttttgcattttgtaggttgtcttttcactttcttgatattctcccttggagcattacagtggtaaattttgagaaagtttatctatttttgtcctttgttrtttgtgcctttgtatagccccaggtcacaaagactgaatcctatattttcttctaggagtcttatagttttacctcttacatttagctctatgatccatttggagttaatttttgtatatggtataagagaaggaagattcttttgcctgtggctatccagttgtcccagaactattttttgaaaagactgttcttccccattgaattgtctaggcacctttgtcaaaaattgactgaccttgaatgtaatagtgtatctctggactctcgattctattctctttaattcgtatgtcta

SEQ ID NO: 940966 - DNA, 621 bp, Homo sapiens
tagtctgtgctgaactgaggagaggagctgtggtggttgccctcacactatttatttatttatttagagacagagtctcactcttatcacccaggctggagtgcaatggcatgatcttggctcactgcaacttccgcctcctgggttcaagcgattctcctgcttcagcgtcctgagtagctgggattacaggcacctgccaccacgcctggctaatttttgtatttttagtacagatggggtttcaccatgctggccacgctggtctcgaactcctgacctcaggtcatctgcctgcctcggcctcccaaagtgctgggattacaggcgtgagccactgcgcccggccaccgtcatactatttcaaaccattggctttgttctctgcagccctaggaatctatggtctgcctagtccaagacaagtgagatggatgatagccccktgggtagcccctggaatagatgggatgtttgatgtgctgtccaactccttcccaactcaagaagaagctggaaactgaacatttcctcctgatcatgtggcactgtgccaggggtggggattgtggtgagaaggtgtttctaaattttctgtaggttgcaacgtagctggttttg

SEQ ID NO: 940967 - DNA, 749 bp, Homo sapiens
agccagcaggcaggaacatttaagtctgctgaagctgctcccacagccacctgttcctccaggtgctctgtcccagggagatgggagttttatctataagcccctgactggggcttctgcctttctttcagagatgccctgcctagagaggaggaatctagggaggcagtctggctacagtggctttgaagagctatggtggactctgcccattcaaacttcctgttggctttgtttacactgtgaggggaaaaccgcctactcaagcctcagtaatggtggacacccctccccccaccaaactccagcatcccaggttgacttcagactgccatgctagcagsgagaatttcaagccagtggattttagcttgctgggttccgtgggattgggatccactgagctaggccacttggctccctggcttcagccccctttccaggggagtgaacagttctctgtcactggctttccaggtgccactggagtatgaaaaaaactcctgcagctaactcggtgtctggccaaatggctacccagttttgtgcttgaaacccagggccctggtggcgtaggcacccgagggaatctcctggtctatgagttgagaaggtgtgggaaaagcatagtatctggacctaaatgcaccgctcctcacggcaccatccctcagggcttcccttggctaggggagggaattccctgatgtcttgtagttcccaggtgaggtgacactccaccttgcttc

SEQ ID NO: 940968 - DNA, 727 bp, Homo sapiens
caaggctgcagtgagctgtgatcgtgcctctgcactccagcctgggtgacagagagagaccttgtctcaagcaaacaacagcaaccccgtctctactaaaaatacaaaaattagcctggtgtggtggcaggtgcctgtagtcccagctcctcgggaggctgaagcaggagaatcgcttgagcccaggaggtggaggttgtagtaagccgagatcacgccactgcactccaacctgggcaacagagcgagactctgtctcaaaaaaaaagaaaaaaaccaaaacccaaaaaacaaaaaccaaacaaacaaacaaaaaacaaaacaaaacaaaaacaaacaaaaagagataatctgaacacaaatrgcttttcgagaactctcattgtttctgtcctagacaggattcattcagaaaatggcgtgggcctgagctagccgggtgacagagggctgtgggagtcccacatgaggagctggcatgatggttgaggttaatgctgacatcaggggtacccagcaactgaactggggtggggacggcaggagaagtgaccggagaagacacgagggcctgataaagtgtctcaaccctgtgctgatgggtggggactttctcctttgggcaggggaagcctgtcacttcccttgcttagtttttaagcaggggaactgacaggcttagatctctattttagaaagattaaactggttgcgatgtggtggctga

SEQ ID NO: 940969 - DNA, 717 bp, Homo sapiens
attgttacaagggctgcgggagttatgagtactgttctgtagacaagtccgatcaatacaggtcattataatctgatcaggctgtacagtgaacttctgtccggaggctttgtaaagcccttagggctaggaagaaattgcttttatgtgtgaagtattatatcagtgctattttctttaagattgccatgtttgttaatattcctagcctgccaggaaatgcagggtttttttcttcttttaaaattgtcctgatgatatattagtttataatctatattaagatttcccatgggattttttttccttttgaaatttgaaagttcaagtgggactaagtgacatttaaggagtgcgcccatgtgctgtacgtataaaaaccaacactggatttgaagacataggttggaaaaaaraaaggttagctatctcattaataatttatagattgactacatgttgaaatgttaatattgtgggtatattgggtcaaataaaatatattattaaaatctttttaaaaagagtgccttactccagtatgtgtaggtataatatgttaaattgaaaatgagagatagagtaagcagatttttttctgatattaattaaaatataatatcgatcataatgaaaccaacacttatttcacttagtcctaggtaattcatttttgttttgttggtcttgggttaggtagaccaaactttcttctat

SEQ ID NO: 940970 - DNA, 621 bp, Homo sapiens
actctctatgcaactactcaacatggcccttgtagcaggaaagcagccgtgagaatactgacccaaggagcatgactgtgttccaataaaactttatttaaggccgggcgcggtggctcaagcctgtaattccagcactttgggaggccsagacaggcggatcacgaggtcaggagatcaagaccatcctggctaacacggtgaaaccccgtctctactaaaaatacaaaaaattagccgggcgtggtggcgggcgcctgtagtccccgctactcgcgaggctgagggaggagaatggcgcgaacccggggggcggagcttgcagtgagctgagatcacgccactgcgctccagcctgggcgacagagcaagactccatctcaaaaacaaaaaacaaacaaacaaacaaacaaaaaaacaactttattaaaaaaataaaataaaaacaaaacctgacagccagttttctgacccttattctagagtctagaccaaaaccactctagagaatctgagtcagtcccttggttcagtcgaacaggtccaatgccagcttatagagggaagtccgtatccatgggtgtttatgtcctgtgatatcaatagtcctgatctttagct

SEQ ID NO: 940971 - DNA, 670 bp, Homo sapiens
tcctctcctctggcaggcagtccatcagctcactcccagtatcttactggcttaacctggccttttgcacttccgctttttttttttttttttttttgacagtggagtctcgctctgttgcccagactggagtgcagtggtgccatctcggctcactgcaacctccacctcctgggttcaagcaattctcctgcctcagcctcctgaatagctgggattacaggcgcccgccaccacgcccggctaatttggactttcactcttgttggtcactcttgttgatcttttgtaacagayctctcttctcttgcctcaagacttatctcctacaggaagtattccctgactcacccctgaacacatcctactggacaagttcacaggagtgagctgcaagcaggcttagcggtctagttcatcttccttattttactggtggaagacctgaggcccagagagggaaagtcctaaatatcattgggactatttaatgttacattttctcatcctcttagcctcatcattcaggtgcaggaaccgggtatcccacagtaaagccctggcatttccaggtttaacagctcctgttctggttttctaaggctgtccttggctggccacgacatgtagcaagtcattactttgctgacaatcagctacgaatgatgtc

SEQ ID NO: 940972 - DNA, 581 bp, Homo sapiens
ttaactaggagcttatcaattttattgatcttttcaaaaatcggtttttggctgcattgattttctctattgttgtctgttttctattgaattaatttccactcttgtctttatttccttccttctattttggacttactatactgttctttttctagcttcttttttttgagacggagtctcattctgtcacccaggctggagtgcagtggtgtgatctcrgctcactgcaacctccacctcccaggttcaagctattctcctgcttcagcctcccgagtagctgggatgacaggcatgcaccaccatgcctggctaattttgtatttttagtagagacggggtttctccatgttggtcaggctggtcttgaactcctgacctcagagctcaggtgatccgcccaccttggcctcccaaagtgctgggatcataggcatgagccaccgcgcccagcctttttctagcttcttaatgtggaagcttagctcattgatttcagcactttcttattttctaatacaagcacttaaactctaaattgtattcttagcgtcacataagctgcatctcacaaattt

SEQ ID NO: 940973 - DNA, 599 bp, Homo sapiens
aaagttcttgctttctttgcaacaggactcagaatttaccacttaaccctggaaggcacatctgttccttaaatcaattatgttaacttcactgactacaaatgaagggccttctgtatttttctatttacaaatgcttgaattttttaatataaccatctttataagaagcatgtatgctaactatattttgatatatacttaaatctcaaaaaggagaaagttgccataactgtctctttactatggcatactaagccaataaacattgttaaaattgtacagttcacatatttgtttttggtaatagagttcactgtacaaagcaagaagccaacttcatattaaatcttkgtccatttcttggatgttttttataacaactaatttctgatctaggtcaacagttctatcacgtacctggctttatcctgcagcttatgtcttatcaaaaaaatggctttcatgagatgattatcataaattacacaaaaatatagtcaaccaactgttttaatagcactagactgaatgaaagccatacacttttcaggaggtcattttatactacatgttttgataagacaaaaggaactgag

SEQ ID NO: 940974 - DNA, 476 bp, Homo sapiens
aggaactctgtgtggaggctccaaccctaaatttcccttccacactgccctagcagaggttctccayaggggccttgcccctccagcaaacttctgcctggggatccagacgtttccctacatcttctgaaatctaggtggaagttcccaaacctcaattattgacttccgtccacttgcagaatcagtgccacgtagaagctaccaaggcttgggccttgcaccatctgaagcaacagaccacattgtaccttggcctcttttagccatggctggagcaggtgggaaactgggcaccaagtccttaggcctaacatagcacaggaccctgggcttcgcccacgaaaccacattttcctcctaggcttctggcctgtaacgggaggggctgctgtgaagacctctgacatgccctggagacattttccccattgtcttggggattaacatttcgccccttgtcacttatgcaaatt

SEQ ID NO: 940975 - DNA, 598 bp, Homo sapiens
tatgtgccctggcaaaaacagccgggcaatgagtctggcagatcaacgtacggtcatttatactagtagacagcattgcaaacttgtttatgaagtgtcactgatctctctataagactttttttttatttctttcttaaaaacaatctttctaaatgttgtgagacscttgaacctggctaacctattcctagtacaagctcataacttctgttctttttcaaattgcaaggcatttagtaatcagaataatcaaactcaagaaaaaggaagaaagaaaggaagaaagaaagaaagaagaaagaaaagaaagaaaaagaaagaaaagaaagaaagaaggaaagaaagaaagaaagtaaagaaaagaaaagaaaaagaaaatcagagaaccatggcatcagcccaacctgctattactttgtgcaaaaatcagtccatagcagtggacagatcaattggttaaaataaaatcttgtgttatgctcccaagtttctccaattgtctttggagtcagagtacaaataacaagttgacagaagtataaaagccaaaagctgagccaaatttttgttgttgctgttgttgttttgttttata

SEQ ID NO: 940976 - DNA, 717 bp, Homo sapiens
ggggtgtcacctcacccaggaagcacaaggggtcagggaactacctcctctacccaagggaagccatgagggactgtacctgaggaacggtgcactccagcccagatactgcacttttcccatggtctttgaaaccygcagaccaggagattccctccggtgcctacgccactggggccctgggtgtcaagcacaaaactgggcagccatttgggcagacactgaactagctgcaggagttttattttccataccccagtggtgcctggaatgccagcaaggcagaaccattcactcccctggaaggggggctgaagccagggagccaagtggtctagcttggcgggtcccacccccacggagcccagcaagctaagattcactggcttgaaatcctcattgcaagcacagcagtctgaggtcgacctgggacactcgagcttggagggaggagggccgtctgccattgctgaagcttgagtaggcattttaccctcacagtctaaacaaagctgcctgggagttcgaattgggtagagcccaccacctcagctcagcaaggccactctggccagactgcctctctagattcctcctctctgggcagggcaactctaaaaaaaaggcagtcagggactaatagataaaaccccatctccctgggacagagcacctgtgggaaggggtggatatgggagcagcttcagcagacttaaa

SEQ ID NO: 940977 - DNA, 725 bp, Homo sapiens
gaaacagggtggggtgtcacctcacccaggaagcacaaggggtcagggaactacctcctctacccaagggaagccatgagggactgtacctgaggaacggtgcactccagcccagatactgcacttttcccatggtctttgaaacctgcagaccaggagattccctccggtgcctacgccactggggccctgggtgtcaagcacaaaactgggcagccatttgggcagacactgaactagctgcaggagttttattttccataccccagtggtgcctggaatgccagcaaggcagaaccattcactcccctggaaggggggctgaagccagggagccaagtggtctagcttggcgggtcccacycccacggagcccagcaagctaagattcactggcttgaaatcctcattgcaagcacagcagtctgaggtcgacctgggacactcgagcttggagggaggagggccgtctgccattgctgaagcttgagtaggcattttaccctcacagtctaaacaaagctgcctgggagttcgaattgggtagagcccaccacctcagctcagcaaggccactctggccagactgcctctctagattcctcctctctgggcagggcaactctaaaaaaaaggcagtcagggactaatagataaaaccccatctccctgggacagagcacctgtgggaaggggtggatatgggagcagcttcagcagactta

SEQ ID NO: 940978 - DNA, 725 bp, Homo sapiens
gaaacagggtggggtgtcacctcacccaggaagcacaaggggtcagggaactacctcctctacccaagggaagccatgagggactgtacctgaggaacggtgcactccagcccagatactgcacttttcccatggtctttgaaacctgcagaccaggagattccctccggtgcctacgccactggggccctgggtgtcaagcacaaaactgggcagccatttgggcagacactgaactagctgcaggagttttattttccataccccagtggtgcctggaatgccagcaaggcagaaccattcactcccctggaaggggggctgaagccagggagccaagtggtctagcttggcgggtcccacccccacggagcccagcaagctaagattcactggcttgaaatcctcattgcaagcacagcagtctgaggtcgacctgrgacactcgagcttggagggaggagggccgtctgccattgctgaagcttgagtaggcattttaccctcacagtctaaacaaagctgcctgggagttcgaattgggtagagcccaccacctcagctcagcaaggccactctggccagactgcctctctagattcctcctctctgggcagggcaactctaaaaaaaaggcagtcagggactaatagataaaaccccatctccctgggacagagcacctgtgggaaggggtggatatgggagcagcttcagcagactta

SEQ ID NO: 940979 - DNA, 738 bp, Homo sapiens
gggacactcgagcttggagggaggagggccgtctgccattgctgaagcttgagtaggcattttaccctcacagtctaaacaaagctgcctgggagttcgaattgggtagagcccaccacctcagctcagcaaggccactctggccagactgcctctctagattcctcctctctgggcagggcaactctaaaaaaaaggcagtcagggactaatagataraaccccatctccctgggacagagcacctgtgggaaggggtggatatgggagcagcttcagcagacttaaatatctctgccggacagctctgaagagagtagtggatttcccagcacagtgctcgagctctggtaagagtcagactgcctcctcaagtgggtccctgaccctcgtttatcctgattgggagatatctcccagtaggggccaacagacacctcatacaggagagctctggctggcatccagtgggtgcccctctgggacgaagcttccagaggaaagaacaggcagcaatctttgctgttctgcagcctccactcgtgacaccaaggcaaacagcatctggagtggacctccagcaaactccagcagacctgcagcagagggcactaactcttagaaggaaaactaacaaacagaaaggaatagtatgtccactcagagaccccatccgaacatcagcaggatcaaagaccaaaagtagataaatccaggaagatgaggagaaaccagcgc

SEQ ID NO: 940980 - DNA, 738 bp, Homo sapiens
gggacactcgagcttggagggaggagggccgtctgccattgctgaagcttgagtaggcattttaccctcacagtctaaacaaagctgcctgggagttcgaattgggtagagcccaccacctcagctcagcaaggccactctggccagactgcctctctagattcctcctctctgggcagggcaactctaaaaaaaaggcagtcagggactaatagataaaaccccatctccctgggacagagcacctgtgggaaggggtggatatgggagcagcttcagcagacttaaatatctctgcyggacagctctgaagagagtagtggatttcccagcacagtgctcgagctctggtaagagtcagactgcctcctcaagtgggtccctgaccctcgtttatcctgattgggagatatctcccagtaggggccaacagacacctcatacaggagagctctggctggcatccagtgggtgcccctctgggacgaagcttccagaggaaagaacaggcagcaatctttgctgttctgcagcctccactcgtgacaccaaggcaaacagcatctggagtggacctccagcaaactccagcagacctgcagcagagggcactaactcttagaaggaaaactaacaaacagaaaggaatagtatgtccactcagagaccccatccgaacatcagcaggatcaaagaccaaaagtagataaatccaggaagatgaggagaaaccagcgc

SEQ ID NO: 940981 - DNA, 622 bp, Homo sapiens
aaacagaatgcctcttctcctccaaaggatcacaactccttgccagcaagggaataaaactggatggagaatgagtttgacggatggatagaagtaggcctcagaaggtgggtaataacaaactcctccaagctaaaggagcatgttctaacccaatgcaaggaagttaagaacactgtaaaaagattagaggaattgctaactagaataacaagtatagagaagcacataaatgacctgatggagctgaaaaatacagcatgagaacttcatgaagcatacacaattatcaatagccaagtygataaagcacaagaaaggatatcaaagattgaagatcaacttaatgaaataaaggagaagacaagattagagaaaaaagagtgaaaaggaactaacaaagcctccaagaaatatgggattatgtgaaaacaccaagtctacgtttgattggtgtacctgaaagtgacggggagaatggaaccaagttggaaaacactcctcaggatattatccaggagaacatccccaacctagcaagacaggtcaacattcaaattaaggaaatacagagaacgccacaaagatactcctcgagcagagcaaccccaagacatataat

SEQ ID NO: 940982 - DNA, 622 bp, Homo sapiens
aaacagaatgcctcttctcctccaaaggatcacaactccttgccagcaagggaataaaactggatggagaatgagtttgacggatggatagaagtaggcctcagaaggtgggtaataacaaactcctccaagctaaaggagcatgttctaacccaatgcaaggaagttaagaacactgtaaaaagattagaggaattgctaactagaataacaagtatagagaagcacataaatgacctgatggagctgaaaaatacagcatgagaacttcatgaagcatacacaattatcaatagccaagtcgataaagcacaagaaaggatatcaaagattgaagatcaacttaatgaaataaaggagaagacaagattagagaaaaaagagtgaaaaggaactaacaaagcctccaagaaatatgggattatgtgaaaacaccaagtctacgttkgattggtgtacctgaaagtgacggggagaatggaaccaagttggaaaacactcctcaggatattatccaggagaacatccccaacctagcaagacaggtcaacattcaaattaaggaaatacagagaacgccacaaagatactcctcgagcagagcaaccccaagacatataat

SEQ ID NO: 940983 - DNA, 628 bp, Homo sapiens
ggtctgttggagtttgctggaggtcctctccagaccctgtttgcctgggtattaccagcagaggctgcaaaacagcaaatattgctgcctgatccttcttctttaaaattcttcccagaggggcacctgcctacatgaggtgtctgtcagcccctactgggaggtgcctcccagtcaggctacacgggggtcagggacccacttgaggaggcagcctgtctgttattggagcttgaatgtcatgctgggagaaccactgctctcttcagagctgtcaggcagggatgtttaagtctgaagaagctttctgctgccttttgttcagatatgccctgcacacagaggtggaatctagagaggcagtaggccttgttgagctgcggtgggctccacccagtttkagcttccctgtggctttgtttacacagtgagcataaaaccacctgctcaagcctcagcaatggcagacactcttccccccaccaagctccagcatcccaggtcaatctcagactactgcactagcagcaaacaagggtccgtggatgtgggacccaccaagccaggcatgggggaatctcctggtctgccagttgtgaagactgtgggaaaagcacaatatttgagc

SEQ ID NO: 940984 - DNA, 816 bp, Homo sapiens
caggaactccagctccatcactgtcttttccatcacgcatctcctgctagtgccagccttcttcctccccgactgcaatcccgcttttccccatggcagacagcatggctgccaacagctccagagctttgcttgttgcagcatcggcttctttgaaagagactgatctggtccctaacgtaaaagtccaaggaaggggaaaagatgttcaacatcatcagccatcagaaaaatccaaatcaaaaccacaatgagataacacccaccaggatagctataaaaagacggacaataacaagtgttgtctcagataaggagaaattggacccctcattcattgctggtgggaatgtaaaatggcaccgccactctggaaaacattttggcagttcctcaaactattcaacatagttaccgtatgactcctagagaaatgaaaacgtgtccacacaaaaacttgtacacaaatgttcatagcagcattattcagaataactcaaatgtgggaacaacccaaatgtcatcaactgatgmgtgaattaacaaaatgtggtctacccagacagtggaatgttattcagccataaaaaggaatggagtactgatacattctacaacatgggtgaaccttgaaaacacagtcagtgaaagaagtcagacatgagaagccacatatatggttccattcacatgaattgtccaaaacggggacatctatagagacggaaagtagattcgtggttgcctaagtctgagaggtggggtgtggaatgatcactgactgctaatgggtacacatttcttttaggggttatg

SEQ ID NO: 940985 - DNA, 581 bp, Homo sapiens
gcttattttgtccttatcactatcttctttccagcctggcaccaatgcctgcatcagagaaccctgaaatgcagggcagaaggggcttcactggctcctgaagtcaaaacaaagcaagatgtccacccaggcaagrgtggacaccccactcacccattcccagaggccacctggacactctccaaagaagcagaaacagtcaggctttgtttttagctctccttgtgggcccctgaggcctgccccactttctagaaacagggagcttggggcccatgccatctggagggactgggcagcctttgccttctcttgccactcatggggaaaagccaagggaatgcagccctctccatgtgcacagcttccaggaaatccacgtggtagggcctctggtgggactggagtctatcagaaccacagtggtcagtctgtgcacagggctgtgtcccttgcaggagctccaagagccttgctatggaaaccccaaactccggggactgttctgattctctcatccactccacagaccccagctagcatttttctgagctcaacttgagctcaggtctaggaaaaaa

SEQ ID NO: 940986 - DNA, 638 bp, Homo sapiens
gaggaagtcgctctaagccacagagcctcattggtcagatgggaataatcctaacatctacctcattaggctgttagaagatttcaatgaaagaggcccataaagcacttagcagagtgcctggcaaactaaacataataagtggttgctattacagtagtccccacttatctgcagtttcagttacttgtggtcaaccatggtctgaaaatattaaatgacaaaaatccagaaatagacaattcataagttttaagtcgtgggctgctctgagtggtgtgatgaaacctcatgctgtcctgctcatgctgtctggctccaacctgcccgggatgagaaccttcctccagcacatccgctgtccacgctacctgccagttagtcatttagcagccatctsgttatcagataactgctgcatttcccagtgctcgtgtttaggtaactcttattttacttaataaaggccccaaaacacccaaaacacaagagtacagtgcctagtttataaattaaaatttatcataggtatgtatgcataggaaaatcatagtatatgtagggctcagtactacccgtggtctcaggtggcctctgggggtcttggaatgtatcccccatgggcatgggggggacta

SEQ ID NO: 940987 - DNA, 607 bp, Homo sapiens
ttccccatatgaatccacatgaaggcagacggttgtgcttagacaagcctctacagtgttcactaaatgcattagtaataaaatactcttttacatttctactctcattcacattttcttacatatgtttataattagtactggttggctggttggagatttttaaaatctttttggtttagattacctagccaccatctgttgtcacagaattttcagtgtcattaagatgagtcaaggccgggcgcggtggctcacgcctgtaattccagcactttgggaggccgaggcgggcggatcacgaggtcaggagatcgagaccatcctggctaacatggtgaaacctcgtctctactaaaaatacaaaaaattagccgggcgtggtggcggtcgcctgtaatcscagctactcgggagactgaggcaggagaatggcgtgaacctgggaggtggagcttgcagtgagcggagatcatgccactgcactccaggctgggtgacagagcgagattccgcctcaaaaaaaaaaaaaaaaagatgagtcaatacaattcacactttctcttggtaactttatgcctgtgtgtcagttctcatgagctgctgt

SEQ ID NO: 940988 - DNA, 741 bp, Homo sapiens
ctacatcctttgctgcttaggatattttaaaaaattaaatccacagagcatttcaatatctgatttagttcttttgtttactcatttcccatttagaaaacaaaacgcatagctggctgccagcactcatctcttggggcaaatggggaatggattaaacttctcccagtcacgcctgcaggtatccacctgcttatgactatcaacgtggacttgcttttctgttttgccatcctttcctacttggcatttcttgaaactgacaaaaagccaggggtagcaaaaggcaagagaataaaaggtgtgagcggaggagttaaaaagagacatggcccattcactcaaatgataacagcttcctcataactaagatctcgtatttgatrtccagccagctttatggtctcctgaacagttcacagtgtgccaagctttgggcagagcaccctttctctggatgaaataaatgtggcttccagtggcctggtgacatctgttgttcctatttaaaactcaagggtataccacctttttctgtctgagcttttagcttttaaaaatacttaaaaaccaatcagcaactaaattgcatctgaagagctatttcaattatagaatggaggcagttcctcagcaaccgaagtatttaagagctgcgaaaattaatgtgcatttgaatgctgattttcagagtataatacactttgtaattcatttaaatgtattctgtgggttttattc

SEQ ID NO: 940989 - DNA, 784 bp, Homo sapiens
tgctgcccttcttccaaatccaaagcgtcctttgagtcctcctcgtgtatcccccccccttaacccacaagtataagatacctctactccctccttggcgaccgatcatgcaccccttaccatctcattaaaacctaatcacccttaccccgctcaatgccaatatcccatcccactacatgctttgaaaggattaaagcctgttatcactcacctgctacagcatggccttttaaagcctataaactctccttacaattcccccattttacctgtcctaaaatcagacaagccttacaagttagttcaggatctatgccttatcaaccaaattgttttacctatccaccccatggtgccaaactcatatagtctcctatcctcaatacctccctccacaatccattattctgttctggatctcaaacatgctttctttactattcctttgcacccttcatcccagcctctcttcgctttcacttggactgaccctgacacccatcaggctcagcaaattacctgggctgtacttccgcaaggcttcacagacagaccccattacttcagtcaagcccaaatttcatcctcatctgttacctatctcagcataattctcgtaaaaacacacrtgctctgctctccctgctgatcgtgtccgattaatctctgaaacctcagtcccttacaaaacaactcctttccttcctaggcatggttcgtgcggtcagaattcttacacaagagccaggaccgcaccctgtagcctttctgtccaaacaac

SEQ ID NO: 940990 - DNA, 578 bp, Homo sapiens
tgttaattgccaaaataatggggaaaatgtctccagggcatgttagagatcttctcagcagctcctcccatcacaggtccagaggcataggaaggaaaaatggtttcatgggctgggctcagggccccactgctctgtgcagcctcaggacatggtgccctgtgtcccaggtgctctagctcagccatgacytaaaggggccaaggtacacctcagaccattgcttcagaggattcaagcccaaagtcttggtggcttccatgtagtcttgggcctgtgggtgtgcagaagctaagagttgaggtttgggaaccttcacctagatttcagaggatgtacagaaatgcctggatgtccagacagaagtctgtgcagggatggagcccttatggagaacctctcctagggcagtgtggaggaaaaatatggagttggagcccccatgcagagtccccactgaggcactgcatagtggagctgtgagaagagggccaccattctccagaccccagaatggtagatcaactgacagcttgcactgtgtgcttggacaagctgcaggcactcaatagcagccc

SEQ ID NO: 940991 - DNA, 578 bp, Homo sapiens
tgttaattgccaaaataatggggaaaatgtctccagggcatgttagagatcttctcagcagctcctcccatcacaggtccagaggcataggaaggaaaaatggtttcatgggctgggctcagggccccactgctctgtgcagcctcaggacatggtgccctgtgtcccaggtgctctagctcagccatgaccwaaaggggccaaggtacacctcagaccattgcttcagaggattcaagcccaaagtcttggtggcttccatgtagtcttgggcctgtgggtgtgcagaagctaagagttgaggtttgggaaccttcacctagatttcagaggatgtacagaaatgcctggatgtccagacagaagtctgtgcagggatggagcccttatggagaacctctcctagggcagtgtggaggaaaaatatggagttggagcccccatgcagagtccccactgaggcactgcatagtggagctgtgagaagagggccaccattctccagaccccagaatggtagatcaactgacagcttgcactgtgtgcttggacaagctgcaggcactcaatagcagccc

SEQ ID NO: 940992 - DNA, 578 bp, Homo sapiens
tgttaattgccaaaataatggggaaaatgtctccagggcatgttagagatcttctcagcagctcctcccatcacaggtccagaggcataggaaggaaaaatggtttcatgggctgggctcagggccccactgctctgtgcagcctcaggacatggtgccctgtgtcccaggtgctctagctcagccatgacctaaaggggccaaggtacacctcagaccattgcttcagaggattcaagcccaaagtcttggtggcttccatgtagtcttgggcctgtgggtgtgcagaagctaagagttgaggtttgggaaccttcacctagatttcagaggatgtacagaaatgcctggatgtccagacagaagtctgtgcagggatggagcccttatggagaacctmtcctagggcagtgtggaggaaaaatatggagttggagcccccatgcagagtccccactgaggcactgcatagtggagctgtgagaagagggccaccattctccagaccccagaatggtagatcaactgacagcttgcactgtgtgcttggacaagctgcaggcactcaatagcagccc

SEQ ID NO: 940993 - DNA, 594 bp, Homo sapiens
tttttagtagagatggggtttcaccgtgttagccaggatggtctagatctcctgaccttgtgatccgcccgcctcggaaatactttgcattgttggattgattgggtttgagcccctgttgtacttaagtgattatgaacaagtcttttataatctgaatttccctttcctagtttgtaatattgaggataataattyctaacttgcatgattgttgtgaagattaaataagacaatgatattggtaggagctctttataatctttctctcttatgtacaattcaaatatatgtcggtttaaataccaaaataccactttaaaaaatctgggctgaaatggacacttctaatgtaggagtagtgctttagaaaataatgctttgtttcgtattcttttcctagtattttatgtctagtaactcataaggaaaaaatgatcagataagtatattttttagatgctgattacagcattatttaaatagtagaaataacaactgttcagtgataagacaatgaataaattctgttcataaacattacaaatgttttttaaatatttttcatatgtgtgaaaagtaggattaaaaata

SEQ ID NO: 940994 - DNA, 594 bp, Homo sapiens
tttttagtagagatggggtttcaccgtgttagccaggatggtctagatctcctgaccttgtgatccgcccgcctcggaaatactttgcattgttggattgattgggtttgagcccctgttgtacttaagtgattatgaacaagtcttttataatctgaatttccctttcctagtttgtaatattgaggataataatttctaacttgcatgattgttgtgaagattaaataagacaatgatattggtaggagctctttataatctttctctcttatgtacaattcaratatatgtcggtttaaataccaaaataccactttaaaaaatctgggctgaaatggacacttctaatgtaggagtagtgctttagaaaataatgctttgtttcgtattcttttcctagtattttatgtctagtaactcataaggaaaaaatgatcagataagtatattttttagatgctgattacagcattatttaaatagtagaaataacaactgttcagtgataagacaatgaataaattctgttcataaacattacaaatgttttttaaatatttttcatatgtgtgaaaagtaggattaaaaata

SEQ ID NO: 940995 - DNA, 709 bp, Homo sapiens
aggagtggcataagcatctctggccactaccactgggactgcactaggtcagacctgaagccagcacagcactgggtcctgcccaaggcccaatgtaatcactacctaatcactacatcactactgcctatattcactcaaggccctagggttctataattagcaggtggtaaagccacccagtcttgcgtttttcccttcagggtgatgagttcccccaggccccaggcaggtccagagattctgtccagtagccagggcctggagttggaaaccttagcaatctatctggtgttctagtctactgtgactgagctggcacccaaaccacaagacaaagtcttttccattattttcttccctttccccaggcagagaagtcttctccacatccatgatcaccacaggcccatggggagtactgccaggataccactgatgtttacttaacccaagggctcctcagtcagcttgcggtgaatgctgccaggcctgggactcamccttcagggcagtgagctcccctctggcacagggtaggtccagaaatgccttctaagagtcaagtcctggaattagggaccccaaaagcctgcttattgctctctccctttgaggctgagctggtacctaagctacaagacaaagtcccctttactcttccctctgcttttttcaagcagaaggcatcccttctgatagctaccac

SEQ ID NO: 940996 - DNA, 742 bp, Homo sapiens
ctggagtggctggaatgcagggagcagtgtccttaggttgcacagggcagtgaggcctgaagaccgaggcccagcccatgaaaccatttttccctcctaggtttctgggcctgtgatgggaggggctgccgtgaaggtctctgaaatgccctggaggcattttccccattgtcttggctatgaacatttggctcctctttacttatgcaaatttctgcagccagcttgggcttaaattcctccsctgaaaatgagtttttcttttctaccacatagccaggctgcaattttccacactttcatgctctgcttccttttaaatataagttcaagtttcaattcatttcagtgcttatgcaaatgagcataagcttttagaagcagccaggccacagcttgaatgctttgttacttagaaatttcttccgcctggccagacacggtggctcatgcctataatctcagcattttgggaggctaaggtgggtaggtcgctttgagctcaggagtttgagaccagcctgggcaacacagcaaaatcctttctctataaagaatataaaaattagctctgtgtgatggtgtgaacctgtaggcccagctatttgggaggctgaggctggagaattgcttgagcctgggaagcagaggttgcagtgactgagatcacgcaactgcatgctagcctgggtgacagagtgagaccctgtcttataaaaaaaaatttcttttgccagataac

SEQ ID NO: 940997 - DNA, 742 bp, Homo sapiens
ctggagtggctggaatgcagggagcagtgtccttaggttgcacagggcagtgaggcctgaagaccgaggcccagcccatgaaaccatttttccctcctaggtttctgggcctgtgatgggaggggctgccgtgaaggtctctgaaatgccctggaggcattttccccattgtcttggctatgaacatttggctcctctttacttatgcaaatttctgcagccagcttgggcttaaattcctccgctgaaaatgagtttttcttttctaccacatagccaggctgsaattttccacactttcatgctctgcttccttttaaatataagttcaagtttcaattcatttcagtgcttatgcaaatgagcataagcttttagaagcagccaggccacagcttgaatgctttgttacttagaaatttcttccgcctggccagacacggtggctcatgcctataatctcagcattttgggaggctaaggtgggtaggtcgctttgagctcaggagtttgagaccagcctgggcaacacagcaaaatcctttctctataaagaatataaaaattagctctgtgtgatggtgtgaacctgtaggcccagctatttgggaggctgaggctggagaattgcttgagcctgggaagcagaggttgcagtgactgagatcacgcaactgcatgctagcctgggtgacagagtgagaccctgtcttataaaaaaaaatttcttttgccagataac

SEQ ID NO: 940998 - DNA, 742 bp, Homo sapiens
ctggagtggctggaatgcagggagcagtgtccttaggttgcacagggcagtgaggcctgaagaccgaggcccagcccatgaaaccatttttccctcctaggtttctgggcctgtgatgggaggggctgccgtgaaggtctctgaaatgccctggaggcattttccccattgtcttggctatgaacatttggctcctctttacttatgcaaatttctgcagccagcttgggcttaaattcctccgctgaaaatgagtttttcttttctaccacatagccaggctgcaattttccacactttcatgctctgcttccttttaaatataagttcaagtttcaattcatttcagtgcttatgcaaatgagcataagcttttagaagcagccaggccacagcttgmatgctttgttacttagaaatttcttccgcctggccagacacggtggctcatgcctataatctcagcattttgggaggctaaggtgggtaggtcgctttgagctcaggagtttgagaccagcctgggcaacacagcaaaatcctttctctataaagaatataaaaattagctctgtgtgatggtgtgaacctgtaggcccagctatttgggaggctgaggctggagaattgcttgagcctgggaagcagaggttgcagtgactgagatcacgcaactgcatgctagcctgggtgacagagtgagaccctgtcttataaaaaaaaatttcttttgccagataac

SEQ ID NO: 940999 - DNA, 570 bp, Homo sapiens
gagattatatcccatgcctggttcggagggtcccacgcccacggagcctcactcattgctagcacagcagtctgagatcaaactgcaaggtggcagtgaggctgggggaggggcacccgccattgctcaggcttgagtaggtaaacaaagcggccgggaagcttgtactgggtggagcccaccgcaggtcaaggaggcctgcctgcctctatagactccacctctgggggcagggcatagccaaacaaaaggcagcagaaacmtctgcagacttaaatgtccctgtctgacaggtttgaagagagtagtggttctcccagcatggagcttcagatctgagaacggacagactgcctcctcaagtgggtccctgacccccgagtagcctatctgggagccacccccccagtaggggcagactgacacctcacacagccaggtacccctctgacacaaaacctccagaggaatgatcagacagcaacatttgctgttcagcaatattcactgttctgcagcctctgctgctgatacccaggccaacagggtctggagtggacctccagcaaa

SEQ ID NO: 941000 - DNA, 580 bp, Homo sapiens
ctgaaatttcaagtgtgatgtataaaaagtgttaaggttctcatgccataaatgactcaacagttcaggaaatgaagcaaaataatttttttaaggtatcagtaaaagatgtaaagtaaacactgtgtctaggttttccaaaacccttggagaccccagctacatattccgcatgctatagagcattaatgtccttaaaatggtcatcacgtcacccctgctcatattcattttcttccttcatccttaccatasattaatggggaattgttgttgctgccactgtgacctgggtagagatgaggtaaatgtgaaactggaagccagacagagcttgtacttactgctcgcttggaagagaagagtttctcgacatcgcctttggtgacaagtcatagtcgctgtctgatctgtagagaaatgactctctgcgctggctgtgcccaggaaaggtggcgtgaagtaccagcccagcggaagagctggcctggggatccagtggactccgacctggggaagggccattttccacatcaaagcttaaagagaaagtgggaaactctggtcacatgataaccat

SEQ ID NO: 941001 - DNA, 612 bp, Homo sapiens
tgttggagtttgctggaggtccactgtagacctgtttgcctgggtatcaccagcggaggctgcagaacagcaaatattgcagaatggcaaatgttgctgtctcatccttcctctggaagcttcgtgtcaaaagggcacctggctgtatgaggtgtcagttggcccctactgggagatgtctcccagttagggggtcagggacccacttgaggaggcagtctgtccattatcagatctcaaactctgtgctgggagaaccactgctctcttcaaagctgtcagacagggacatttaagtctgcagaagtttctgctgccttttgttcagctatgccctgcccctagaggtggagtctacagaggcaggcagacctccttgagctgcagagggctccacccagtttgagcttcctggcmgcttttttacctactcaagcctcagcaatggcagatgcccctcccctagcctcgctgctgccttgcagttcgatctcagactgctgtgctagcagggagcaaggctctgtgggtgtgggaccctttgagccaggcatgggatatactctcctggtgtgccgtttgctaaggccattagaaaatcacagtattagg

SEQ ID NO: 941002 - DNA, 629 bp, Homo sapiens
ccactgtgagaggccagcattgagttccaatgcaaagtcccacaatcactgtgcaacccctcctccaagtgcacagattctctctctgaggccattgctggaggctgagtgaggaggtagtggagacacttccggactgctttttctactcttttcagtgcctctttccttgatgtgttagtccattttcatgctgctgataaagacatacccaagactgggtaatttataaataaaagaaagtctaatggaatcacagttccacatggctggggaggcctcacaatcatggtggaaggtgaaaggcatgtcttacatggcagcaggcaaagggaatgaatgctaagcaaaaggggttttgccttataaaaccattagatcttgtgagacttattcactaccaygagaacagtatgggggaaaccaccctcatgattcaattatctcccactgggaaactcccactacatgtgggaattatgggagctagaattcaagatgggatttgggtggggatacagcctaaccacgtcattctgacctagcccctcccaaatctcatgtcctcacatttcaaaaccaatcatgcattcccaacagtaccccaaagtcttaactcatttcagcat

SEQ ID NO: 941003 - DNA, 548 bp, Homo sapiens
gtttgctggaggtccattccagaccctgtttgcctgggtatcagcagcggtggctgcagaagagtggatattggtgaaccgcaaatgctgctgcctgatcgttcctctggaagttttgtctcagaggagtacccggccatgtgaggtgtcagtccgcccctactgggggrtgcctcccagttaggctactcgggggtcagggacccacttgaggaggcagtctgcccattctcagatctcaaactgcatgctgggagaaccactgctctcttcgaagctgtcagacagggtcatttaagtctgcagaggttattgctgtcttttgtttgtctgtgccctgcccccggaggtggagcctacagaggcaggcaggcctccttgatctgtggtgggctccacccagttcgagcttcctggctgctttgtttacctaagcaagcctgggcaatggcaggtgcccctcccccagccttgctgctgccttgcagcttgatctcagactgctgtgctagcaatgagcgaggctgcatgggcgtaggaccctccga

SEQ ID NO: 941004 - DNA, 550 bp, Homo sapiens
  misc_feature 1, 2, 3, 4, 5, 6, 7, 8, 9, 10, 11, 12, 13, 14, 15, 16, 17,18, 19, 20, 21, 22, 23, 24, 25, 26, 27, 28: n = A,T,C or G
nnnnnnnnnnnnnnnnnnnnnnnnnnnntggaaataaaaatacatttcctataaagaactgaataatctgtgagcgagcttgctaggcaatggccctaagcactgaaaggacatgcaataatttatttttctctattcccaaattttgaatagtttttgttaacaagagttaggagagaaatgtgacctctaagaactttctctttcttccttcccttcttttctctcataaacacttctatagcattcttgtgtataccttttcttttctttttttattttagactgagtcttgcactgttgcccaggctggagtgcagtggcacattctcagctcactgcaacctccgcctcccggrtttaagcgattctcctgccccagcctcccaagtggctgggattataggcatgcgccactacacccagctagtttttgtatttttagtagagatggggtttcaccactttagccaggttggtctcaaactcctgacctcaagtgatctgaccgtctcagcctcgcaaagtgctggcattacaggcgtaagcc

SEQ ID NO: 941005 - DNA, 583 bp, Homo sapiens
tcaggtgatccacccacctcggtctcccaaagtgctgggattacaggagtgacccaccgcgcccagccaacagtttttatgaatgttaaacttcctgttcatttctcattttcctcttctgtacataagggagtgctsaatagatacaatataatttgggtgacagtgcttgctttattaacttttgatgttggaaataatttgtatttgtgataggtatgtagcagtctaaaacaaacttttgtgactgatttcttttactatgataaatgcaaaaaatctgtgccatgtgcagcaagtcagttctctgcagaatgatattaatttttcagtgaagaagcaaaatcatttctaacaatgattcttgttatgggttgaactgcatccctccaaaaagatgttgaagtcctaccccccagtctctgtaaatgtgtacttaaaaatagggtccttgtagttaatcaagttaagatgagatcattagggtgggtcctaatctgactggtgtcctgaaaaggaaaaattggggcatggggacagataagtagaaagggaagacaatgtgatgacacaagcagcagcc

SEQ ID NO: 941006 - DNA, 617 bp, Homo sapiens
attcctcaattaaaagaaataaaaatatatgccaatacaaactttttagaatggctacttttctttaaaaaaaaaaggacaatattaaatatggatgaagaggtagaacactttgactttttataaaataatggtgggttgtttacaattttacaaccatttattaaacactttggcatttttgaaaataatatgaaacttaacttatcctgtatcttactgtgttgcacaaaggaaatgaaacagatgtccaaaaacaaatacttgtatggaatattcttggctgcttaatttatagtaatcaaaaactggaaaaaaaaaccccttcctgaactgaatatacaaacaaattgtgatatagcatacaagaaaatgactaaaaataaaaaattatacatttttaaaacatraatggatctcaaaaatattatgtttagtaaaataactcagaaacaaagtgtatatattacacgatgctatttatatgaaagatgagaacaggctatgataagggaaaccagaacagtggttgcatctagtgcttatgcagagtttgacaggatagatcacaagagatatgtctagagtaatgaaaatgttgaatgagataatggtcg

SEQ ID NO: 941007 - DNA, 573 bp, Homo sapiens
atggctaaaagggtccaaggtacagcttgggccattgcttcagagggtacaagccccaagccttggtggcttccacatggtgttggctgcaggtgcacagaaggcaagagctgaggtttgggagcttctgcctagatttcagaagctgtatggaaacacctggatgtccaggcagaagtctgctgcaggggtggagccctgatggagaatctctactaaggaagtgcagagtggaaatgtggggtttgagctcccacacagaatctccactggggcactacctagtggaactgtgagaagaaggccatcatcctccagaccccagaatgttagatgcattgacaacttgcacyatgtgcctggaaaagctacagacacataacaccagcccatgaaagcagccatgggggctatatcctgcaaagtcactaggttgtagctgcccaagtccttgggagtccactccttgtatcagtgtgccttggatgtgagacatggagtgaaatgagattattttggagctttgagatttaatgtctgccttgctggcttttggacttgcatggggcctgt

SEQ ID NO: 941008 - DNA, 573 bp, Homo sapiens
atggctaaaagggtccaaggtacagcttgggccattgcttcagagggtacaagccccaagccttggtggcttccacatggtgttggctgcaggtgcacagaaggcaagagctgaggtttgggagcttctgcctagatttcagaagctgtatggaaacacctggatgtccaggcagaagtctgctgcaggggtggagccctgatggagaatctctactaaggaagtgcagagtggaaatgtggggtttgagctcccacacagaatctccactggggcactacctagtggaactgtgagaagaaggccatcatcctccagaccccagaatgttagatgcattgacaacttgcaccatgtgcctggaaaagctacagacacataacaccagcccrtgaaagcagccatgggggctatatcctgcaaagtcactaggttgtagctgcccaagtccttgggagtccactccttgtatcagtgtgccttggatgtgagacatggagtgaaatgagattattttggagctttgagatttaatgtctgccttgctggcttttggacttgcatggggcctgt

SEQ ID NO: 941009 - DNA, 573 bp, Homo sapiens
atggctaaaagggtccaaggtacagcttgggccattgcttcagagggtacaagccccaagccttggtggcttccacatggtgttggctgcaggtgcacagaaggcaagagctgaggtttgggagcttctgcctagatttcagaagctgtatggaaacacctggatgtccaggcagaagtctgctgcaggggtggagccctgatggagaatctctactaaggaagtgcagagtggaaatgtggggtttgagctcccacacagaatctccactggggcactacctagtggaactgtgagaagaaggccatcatcctccagaccccagaatgttagatgcattgacaacttgcaccatgtgcctggaaaagctacagacacataacaccagcccatgaaagcagccrtgggggctatatcctgcaaagtcactaggttgtagctgcccaagtccttgggagtccactccttgtatcagtgtgccttggatgtgagacatggagtgaaatgagattattttggagctttgagatttaatgtctgccttgctggcttttggacttgcatggggcctgt

SEQ ID NO: 941010 - DNA, 536 bp, Homo sapiens
atggacagatttgttatacaggtaaattgcatattgtgggggtttggtgtacacattgttttgtcaaccaggacataaacatagcaccaggtaggtaaatttttgatcatcaccctcctcccactctccaccttgaaattggcccgtgtctcttattctcttgtgtctatatgtgctgaatgcttagctgccacttacaagtgagaaattgcagtgctttattttctgtttctgtgttagttcgcttaagataatagcctccagctccaaccatgttattgcaaaagacatgatttctatgactgcatagtattcctttatacatataccaagttttctttatctactctaatgtttatgggcatttagggtgataccatgtctttgctattgtgaacasttttgcaatgagcatacgcacacatgctttttttttttttttttgacggagtctcgctctgtctcccaggctggagtgcagtggtgcgatctcagctcacagcaagctccgcctcccgcgttcccgccattctcct

SEQ ID NO: 941011 - DNA, 626 bp, Homo sapiens
ccactacgtgaacatttgaagtgtttccacttccttggatactatcaataatgctgccacgtgcattcccaaacaagtctttcagggacacatgttttcctatatgttttcatataggcaaatcatgttttcatgatatctgtgagtagagttgctgggttatatggtaaactcatgtttaacattttttgttgttgtttttgtttgttcgttttttttttttttaatttgagacagggtcttgctctgtcacccaggctggagtgtagtgacatcatcactgcaacctccgccccccrggttcaagtgattctcatgcctcagcctcgagagtagctggaattacagttgtgcaccaccatgggctggctaatttttgtgcttttagtagagatggggtttcaccatgttgaccaggctggtctcgaacttctggcctcaagaaatccacgcaccttggcctcctaaaagtgctaggaatataggtatgagccattgcactcagccaactattaaaaaaaaaaaagctgccaaattgctgccataatggctgtatcattttacattttcactagcattatatgaaacaatgtgtatttcagtttctgtatatcctaatgagaggt

SEQ ID NO: 941012 - DNA, 560 bp, Homo sapiens
gctcctgacctcaatgatccacccaccttggcctcccaaagtgctgggattacaggtgtcagccaccctgccagcctcttatctgccattctaatggaatctgctcaactctctaccccacccatgcaactcactttcatacagaattcctgtatgcatgaaaacatgcccagccaggcacggtggctcattgctgtaattccagctctttgttaggctgaggccgacagatggcttgaaaccagcctggscaacatggtgaaaccctgactctactaaaaatatgaaaattagccaggtgtggtggtgcatacctgtaatcccagctactcaagaggctgaggcatgagaattgcttgaaccctggaggcagaggttgtggcaagccgagatgtcaccactgtactccagcctgggtgacagagtgagacaatgtcttaaaaaaataaaaaaattagggctgggtgcagtggctcatgctttaaatcccagtgctttgggaggctgaggccggcagatcatgaggtcaggagtttgagactagtctggccaacatgatg

SEQ ID NO: 941013 - DNA, 439 bp, Homo sapiens
ctggtctcaagctcctgacctcaatgatccacccaccttggcctcccaaagtgctgggattacaggtgtcagccaccctgccagcctcttatctgccattctaatggaatctgctcaactctctaccccacccatgcaactcactttcatacagaattcctgtatgcatgaaaacatgcccagccaggcacggtggctcattgctgtaattccagctctttgttaggctgaggccgacagatggcttgaaaccagcctggccaacatggtgaaaccctgactctactaaaaatatgaaaattagccaggtgtggtggtgcatacctgtaatcccagctactcaagaggctgaggcatgagaattgcttgaaccctggaggcagaggttgtggcaagccgagrtgtcaccactgtactccagcctgggtgacagagtgag

SEQ ID NO: 941014 - DNA, 683 bp, Homo sapiens
gcactgctgaaaagatacctgaaaatgtggaattgactttggaactgggcaacaggcagaggttggaacagtttggagggctcagaagaagacaggaaaatgtgggaaagtttggaattccctagagacttgttgaatggctttgaycaaaatgctgataatgatatggacaatgaaatccaggctaaggtggtctaagacagagattaggaacttgttgggaaatggagcaaaggtgacccttgttatgttttagaaaagagactggaggtattttgcccctgccccagagaattgtagaactttgcacttgaggaacatgatttaggatatctggcagaaaaaatttctaagcagcaaaacattcaagaggtgacttgggtgctgttaaaggcattcagttttataagtgaagcagagcataaaagttcagaaaatttgcaccctgacaatgcgatagaaaagaaaatcccattttctgaggagaaattaaagcctgctgctgatatttgcataagtaatgagaagccaaatgttaatcccccaagataatggggaaaatatctccaaggcatgtcagaggtcttcatggcagcccctctcattacaggcctggaggcctagaaggaaaatgtgattttgtgggccaggctaagggtatttccgctgtgtgcagtctaggg

SEQ ID NO: 941015 - DNA, 611 bp, Homo sapiens
gaggcctagaagagacgtggcaagataagggcatttatagccctatcttatccatatgaacaggtgccccctcattcgtccatttataagctctccacaagggtcacattccattcccagagctatgaacatctgtttttctgggataggaatcttggtgatgtgaaacctccctgactacacgtctgttcataggctctctgcagggggaggcacrtcgctcactgttggctcattctggcagtccaacctggcattgtctttacacaatcctgcatgcaactttgtatttacaataattaggaacatttcatcttttaccccataacaatagtttcagggggtctccctacagttatcagcttaaaataaagggttacaagatagtatttacaagcctcatggtaacctcaaaacaaaaagcatgcaatagatacatatacaaaaaacaatcgtatctccggagaaaatcaccttcactgaaaggaagacaggaatgaaagaaagaaggaagacaaaaccataaaacaaccagaaaaataaataaataaataaataaataaataaacataatggcaggagtaagtccttacttgtcaataataacattg

SEQ ID NO: 941016 - DNA, 564 bp, Homo sapiens
aaaaaatatatatggttaaagactagtttaccatatcaggaagtctggacttgatcctgcagataatgggaaaccagtgaaggtatttaaacactaatggtgatttttaaaaaactcagtgtgtttaaaagggaatggatagtgcataatctcytttttatctctccttggttttgtttaagtgggctgctatgggaatccttagagtatcattttttaaaattaaaaaaaaatttattatactttaagttttgtgatacatgtgcagaatgtgcaggtttgttacataggtatagacgtgccatggtggtttgctgcatccatcaacctgtcatctacattaggtatttctgctaatgctatccctcccctagcccccccaccctccagtaggccccagtgtgtgatgttctcctccctatgtccatgtgttctcattgttcaactcccacttaggagtgagaacatatggtgtttggttttctgttcctgtgttagtttgcagagaataatggtttccagcttcatccatgtccctgcaaaagacataaaattatcctattt

SEQ ID NO: 941017 - DNA, 776 bp, Homo sapiens
gggcctgtcaagatattccttctaagatgaagaataagttgttgcatttggccccttttacaaccacgaaggaggtacaatgcctagtgaacctatttggatttgggagggaacacattcctcattttgatgagatacctggcccatttattgagtgacctggaaggctgccagttttggatggggtccagaacaggataaagctctgcaacaggtccagactgctgtgcaagctgctctgccacttaggccatatgactcagcagatccaatggtgcttgaggtgtcagtggcagatagggatactgtttggggcctttggcaggccctgataggtgaaacacagtagaggcctctaggattttgaagcaaggccccaccatatttgcagataactattctccttttgagagatagctcttggcctgttactgcactttgttggaaactgaacgtttgactaggggtcatcgagttaccatgtgacctgaattctctatcaygaactgggtgctttctaacccattggtccattaagtgggtcatgcacagcagcattccatcatcaaatggaagtggtgtatatatgatcaggctctagaagatcctgaaggcacaagtaagttacataaggaagtggctaaaatgcccatggtcttcacttttgccaccctgccttctctccaccagcctgctttgatggcctcatggggagctctgtatgattgtttaacaaaagtagagaagactagggcctggttcactgatggttctgc

SEQ ID NO: 941018 - DNA, 720 bp, Homo sapiens
ttttccacacccaaagcctctctttgttgaccttttatgtagctaaataagctcctggtaagctcaaggttggtactaagactcagcccggcccaggaacgtttgtctccagactaccttacttaagcgtcaaggactatggcccaacacttttttttttttttttttttttttttttgagacggagtctcgctctgtcgcccaggctggagtgcagtggcgcgatctcggctcactgcaagctccgcctcccgggttcacgccattctcctgcctcagcctcccgagtagctgggactacaggcgcccgctaccacgccyggctaattttttgtatttttagtagagacggggtttcaccgtgttagccaggatggtctcgatctccagacctcgtgatccgcccgcctcggcctcccaaagtgctgggattacaggcgtgagccaggcccaacacttttgaagtgaaggagtcagaaagttttttcaataaaggaaaaaaaaattacttgcaaaaaatgataaataatgtctcttactagcttgtcaaatctacattctaacaaacatatttttatgattgctagacatgcttcaggcatccatggctgctcacatatacaagtttgattccgagcaaaagaaaaaaaaacagtggaatcttcagatgagagttctaaggatgtttgctttttcctataagataggacaagacaaatt

SEQ ID NO: 941019 - DNA, 595 bp, Homo sapiens
ctccctccctcagctttctgggtatgagccttagccctggcctgacattttctctgggaaaaatccagtgaggctgatcctaggcagaggacttaactgagccttggttgctgatgaggactatgacaggcagtgcrgttcagtggtgaagatgcacgaggctccagtcccaattcctagctgagtgaccttgggcaagttatttaacatctttgcctatttcttcatctgtaaaataagaataggagaacctggccagtcacagtggctcacgcctggaatcccagcactttgggaggctggggcaggtagatcatttgaggtcaggagtttgagatcatcctggccaacatagcgaaaccccatctctattaaaaatacaaaaattagccaggcagtagtggagtgtgcctgtaatcccagcttctcaggaggctgagcaggagaatggcttgagcctgggagggggaggttgcgggtgagccgagatcgcaccactgcacaatctatctcttggagatgtgaacatacactgagataatacatataaagtccttagtttggtgcccaacatactattagctctcaccagatg

SEQ ID NO: 941020 - DNA, 720 bp, Homo sapiens
tggagaaactgaggggtgtgtactactggggtaaaagacaagggagccaaaggaaagggaacagccaaggggcccatcagggtgacccaccaacaaatgtggtatgacctgatattggcagggacacctactgcaaaaatagcttaatgctgttcttgtgggactgtggcagcagttcaagccagaacagcacttcaccaaaggagcctcaaaagttcaacccactgcccttcctgcagagggatggccagcatcaaccgctttagactaggatgtaggccaaggccccagaatcccaataacagcaatggcgactagggtgtctgggggctggtggccacatgtagaagtgcatattgctcacttaggctgtgcttgctccattggctactggaactgaatgcacgcataacattcattggttccaagggcctgtaatagcaatagatggttatacaggggccatgaaagacaggctgaattaaatattacaagttgggagattgccaccaaaatcctgtttagcatacaccrattccatctgagaatatatcttgggaatggatctcttattaggcttgaccctctaaaatggcaactgggaaattctgaccaggagttagggtggtgaagcatatgatcatggtaaacatgaaatggtttaaatggtacagttgccagccctgcagtgagtagggtattgctgcagcactgaagcaa

SEQ ID NO: 941021 - DNA, 667 bp, Homo sapiens
gagcagtggctcatgcctgtaatcccagcagttttgaaggctgaggcaggtggattgcttgagctcaggagttcaagcctgggcaacatggcgaaacccaatcttcacaaaaaatacaaaaattagccaggcatggtggtgggtgcctgaagtcccagctactcgggaggctgagatgggaggatcacttgagcctgggaggcagaagttgaagtgggccaagattgcaccactgcacttcagcctgggcaacagagcaagaccctagtccaaaaaaaaaattaaaactcctgtgcatcaaaggacattattaagaaagtacaaagcaacccagacaatgggagaaaatatttataaatcatatatctgataagggtccgatctccagaatatataaagaactgttacaaatcaacaataaaaagaataatagccccatttttaaagggrccaaggatttgtatagacatttctccaaagaagatatacaaatgactaataaacccatgaaaagatgttcaatttcatttgtctttagggatatgcaaatcaaaaccactataagatactacttcacaccactgacatggctatcaccaaaaaggcagacaatagcaaatgttgacaacgatgtgggaaattggaaccttcattcattgctgatggg

SEQ ID NO: 941022 - DNA, 549 bp, Homo sapiens
ggctagaaatctttccagcaaaacttactttttttttttttttttttttgagacggagtcttgctctgtcgcccaggctggagtgcagtggcgcaatcttggctcactgcaagctccgcctcccgggttcacgccattctcctgcctcagcctcccaagtagctgggactacaggcgcccaccaccactccgggctaattttttgtatttttagtagagacggggtttcaccgtgttagccaggatggtctygatctcctgacctcgtgatccgcctgcctctgcctcccaaagtgctgggattacaggcgtgagccaccgagcccggccactttcaaacattcatggtgctagaggctcaaaatttaggacctgccaaggagagtgggccgtggcaaatatctttggctttgggttgctattctgaggtgctgaactttaggatcgagtatgaacggaaaattgactagccctcatagagactgaggcccagcttcataccctctcattccctgactgggttaaggatcttgattggatggccagttt

SEQ ID NO: 941023 - DNA, 569 bp, Homo sapiens
gaaaccagcagttctgttcagagttttatttatatctaattgaactaaggagtgtcagcctcccctccagaatgcttgtcccggacttccaataccaaggtagctggactctgagcccacatccaggcccaatcctcgggtcatccaactttctaagttttgccagactgcctggtgtaaagtggtatctcagcattgctttcgttttcattgttcygggtattcataagttcaagcatctctacctgagcttgatagttttcggatttcttctcctgtgtattgcctgttcatatcctttgctccaacattgtttatagagcactccctccctactttggcatttggggtcccctaaactggcccccattgctaaagcttacttctcatgactgacctttgcccatgctgcatgtggtccaggaacaattcttctgtctttgtttttgctgtcccctcttgcctggattacatcatcttctccaaacccccaatctaaacatgtcccgaatcctaaatattctttagaaccaagctcagatatcacctcctcctggaagggttccttt

SEQ ID NO: 941024 - DNA, 580 bp, Homo sapiens
agaaaccagcagttctgttcagagttttatttatatctaattgaactaaggagtgtcagcctcccctccagaatgcttgtcccggacttccaataccaaggtagctggactctgagcccacatccaggcccaatcctcgggtcatccaactttctaagttttgccagactgcctggtgtaaagtggtatctcagcattgctttcgttttcattgttctgggtattcatragttcaagcatctctacctgagcttgatagttttcggatttcttctcctgtgtattgcctgttcatatcctttgctccaacattgtttatagagcactccctccctactttggcatttggggtcccctaaactggcccccattgctaaagcttacttctcatgactgacctttgcccatgctgcatgtggtccaggaacaattcttctgtctttgtttttgctgtcccctcttgcctggattacatcatcttctccaaacccccaatctaaacatgtcccgaatcctaaatattctttagaaccaagctcagatatcacctcctcctggaagggttcctttatttgctcag

SEQ ID NO: 941025 - DNA, 439 bp, Homo sapiens
aattggtttgtaggttgatgaagccctatgcctgatttgaatttctcttgaatggtctgcagccctggaccaagttgaagaagccatgagagtctcagcttttttccttaccccattatgagataaactcattccttaaatatcttgctcatttgataaaacttggcaccyttctcctttctactggtccctaatacttactacctgtactgtaagctcaaattttttacaatttctgcctttattatgtaacgtattccactggaatatgtgttacaggaaaggggtcccgatccagacccctagagagggttcttggatatccggcaagaaagaattcagggccagtccataaagtgaaaacaagtttactaggaaagtagaggaataaaagaatgggctctccatagagagaacagcctgaaggctgcttggttgc

SEQ ID NO: 941026 - DNA, 439 bp, Homo sapiens
aattggtttgtaggttgatgaagccctatgcctgatttgaatttctcttgaatggtctgcagccctggaccaagttgaagaagccatgagagtctcagcttttttccttaccccattatgagataaactcattccttaaatatcttgctcatttgataaaacttggcacccttctcctttctactggtccctaatacttactacctgtactgtaagctcaaattttttrcaatttctgcctttattatgtaacgtattccactggaatatgtgttacaggaaaggggtcccgatccagacccctagagagggttcttggatatccggcaagaaagaattcagggccagtccataaagtgaaaacaagtttactaggaaagtagaggaataaaagaatgggctctccatagagagaacagcctgaaggctgcttggttgc

SEQ ID NO: 941027 - DNA, 728 bp, Homo sapiens
acactaaacaacagatttttcttttcttttctttttttttttttttgagatggagtttcacttttgttgcccaggctggagtgcaatggcgtgatcttggctcaccgcaacctccgcctcccgggttcaagccattctcctgccttagcctcccaagtagctgggattataggcatgcgccaccatgcccagctaattttgtatttttagtagagacggggtttctccatgttggtcaggctggtctcgaactcccaacctcaggtgatctgcccgcctyggcctcccaaactgctgggattacaggtgtgagccaccgcgcccggcctcttattccttttttttttttcagatggagttccactcttggtgcaatggtgcgatctcggctcacttcaaactccacctcctgggttcaagtgattcttctgcctcagtcccccaagtagctgggcatgtaccaccatgcccagctaattttttatttttagtagaggcagagttctactatattggtcaggctggtcttaaactcttgacctcaggtgatccatccacctcggcctcccaaagtcctgggattataggcgtgaaccactgcatctggcagagatttttaatatacacaaaacagccttctattggaaggagatgccatctaggactttcatagctagagaggagaagtaatacttggcttcaaagcttcaaaggacaggctgaatctc

SEQ ID NO: 941028 - DNA, 728 bp, Homo sapiens
acactaaacaacagatttttcttttcttttctttttttttttttttgagatggagtttcacttttgttgcccaggctggagtgcaatggcgtgatcttggctcaccgcaacctccgcctcccgggttcaagccattctcctgccttagcctcccaagtagctgggattataggcatgcgccaccatgcccagctaattttgtatttttagtagagacggggtttctccatgttggtcaggctggtctcgaactcccaacctcaggtgatctgcccgccttggcctcccaaactgctgggattacaggtgtgagccaccgcgcccggcctcttattccttttttttttttcagatggagttycactcttggtgcaatggtgcgatctcggctcacttcaaactccacctcctgggttcaagtgattcttctgcctcagtcccccaagtagctgggcatgtaccaccatgcccagctaattttttatttttagtagaggcagagttctactatattggtcaggctggtcttaaactcttgacctcaggtgatccatccacctcggcctcccaaagtcctgggattataggcgtgaaccactgcatctggcagagatttttaatatacacaaaacagccttctattggaaggagatgccatctaggactttcatagctagagaggagaagtaatacttggcttcaaagcttcaaaggacaggctgaatctc

SEQ ID NO: 941029 - DNA, 728 bp, Homo sapiens
acactaaacaacagatttttcttttcttttctttttttttttttttgagatggagtttcacttttgttgcccaggctggagtgcaatggcgtgatcttggctcaccgcaacctccgcctcccgggttcaagccattctcctgccttagcctcccaagtagctgggattataggcatgcgccaccatgcccagctaattttgtatttttagtagagacggggtttctccatgttggtcaggctggtctcgaactcccaacctcaggtgatctgcccgccttggcctcccaaactgctgggattacaggtgtgagccaccgcgcccggcctcttattccttttttttttttcagatggagttccactcttggtgcaatggtgcgatctcggctcacttcaaactccacctcctgggttcaagtgattcttctgcctcagtcccccaagtagctgggcatgtaccaccaygcccagctaattttttatttttagtagaggcagagttctactatattggtcaggctggtcttaaactcttgacctcaggtgatccatccacctcggcctcccaaagtcctgggattataggcgtgaaccactgcatctggcagagatttttaatatacacaaaacagccttctattggaaggagatgccatctaggactttcatagctagagaggagaagtaatacttggcttcaaagcttcaaaggacaggctgaatctc

SEQ ID NO: 941030 - DNA, 728 bp, Homo sapiens
acactaaacaacagatttttcttttcttttctttttttttttttttgagatggagtttcacttttgttgcccaggctggagtgcaatggcgtgatcttggctcaccgcaacctccgcctcccgggttcaagccattctcctgccttagcctcccaagtagctgggattataggcatgcgccaccatgcccagctaattttgtatttttagtagagacggggtttctccatgttggtcaggctggtctcgaactcccaacctcaggtgatctgcccgccttggcctcccaaactgctgggattacaggtgtgagccaccgcgcccggcctcttattccttttttttttttcagatggagttccactcttggtgcaatggtgcgatctcggctcacttcaaactccacctcctgggttcaagtgattcttctgcctcagtcccccaagtagctgggcatgtaccaccatgcccagctaattttttatttttagtagaggcagagttctactatattggtcaggctggtcttaaactcytgacctcaggtgatccatccacctcggcctcccaaagtcctgggattataggcgtgaaccactgcatctggcagagatttttaatatacacaaaacagccttctattggaaggagatgccatctaggactttcatagctagagaggagaagtaatacttggcttcaaagcttcaaaggacaggctgaatctc

SEQ ID NO: 941031 - DNA, 537 bp, Homo sapiens
gttgaatccaatgctcatttactgttctgaaatttctagggttcttaggaattatgccaaatatactttgcctgtgcgctgtcaatgaaacaacaaagcctggacgacagcaaatctgtttacagcatgttttactaactattttaagcccattgttaagacctactgctcagaaaaatccctttgaaaayattactgttcattgacaatgcacctagtcactcaagagctctgatggcattgtacaaggagataaatattgctttaatgccttaacataacatctatttggcagcccatggatcaagaagtaatttaatctttcaagtcttattatttaagagatagatttcataaggctatagctgccatagatagtaattcttctgatggatctgggcaaagtacattgaaaacctggaaaagcacattcctgattcatgggaggaggtcaaaatatcagtcttaacaggagtttgaaagaagttgattccaaccctcatgggtaactttgagaggttttagacttcagtggag

SEQ ID NO: 941032 - DNA, 549 bp, Homo sapiens
aggttacctaacctctctgagcctcatttcttcatctttaacatgaggatcatagcagtacttcttaggatctttgcaaagatacattgagatcacatatgaagaagcacttttctctggttcctcgaaaatgccaaggggccctcacccccaagccttcatgcccacttttccttttgcttgaattgctcttcccagatctcctcatggtggacttcctcacttcactcaggtgtcacctctcaaagacggccagcctaagaattctctctcctccagcgccctagctcattcactcttctctcattccctgctttattttccatgtagcgcttgcagctcctgcattcgtgtccttgtttattgkctttctcacccaccagacggcaagacccaggaggatggaaacatctgtctccaccactgtattcccagagctaagaatagtgtctgtaaaggccccaaatatatttactggatgaatttatagaataaataagttccatggggacttcccagcaggtcagttgggttgaggggatgaggggt

SEQ ID NO: 941033 - DNA, 589 bp, Homo sapiens
gctgggattacaggcatgagccaccatgcccagccctatctctgttttctgatgatatggtcatatacctagaaaaccacaagattccaagattcctccaaaagattcctagatttgataaacaaattcagtaaagtctcaggttacaagatcaatgtgcacaaatcagtagcactgctatacactaatgatgaccaagctgagmatcaaatggagaagtcaatcccttttacagtagctgaaaaccaaaagcaaaaaacaccctaggaatatacttaaccaagaaggtgagctgtctacaaggagaactacaaaacactgctggaaaagaaaccatagatgacacaaacaaatggagacacaaacaaatggaaacacatcccatgctcatggataggaagaatcaatatcatgaaaatgaccatactgcccaaagcatttacagattcaatgaaatttctatcaaaataccaacatcatttttcacagaattagaaaaaaaaatcctaaaatttatatggaaccaaaaaagagcccaaatagccaaagcaatcctaagcaaaagcacaaatctggaggcatcacatta

SEQ ID NO: 941034 - DNA, 589 bp, Homo sapiens
gctgggattacaggcatgagccaccatgcccagccctatctctgttttctgatgatatggtcatatacctagaaaaccacaagattccaagattcctccaaaagattcctagatttgataaacaaattcagtaaagtctcaggttacaagatcaatgtgcacaaatcagtagcactgctatacactaatgatgaccaagctgagaatcaaatggagaagtcaatcccttttacagtagctgaaaaccaaaagcaaaaaacaccctaggaatatacttaaccaagaaggtgagctrtctacaaggagaactacaaaacactgctggaaaagaaaccatagatgacacaaacaaatggagacacaaacaaatggaaacacatcccatgctcatggataggaagaatcaatatcatgaaaatgaccatactgcccaaagcatttacagattcaatgaaatttctatcaaaataccaacatcatttttcacagaattagaaaaaaaaatcctaaaatttatatggaaccaaaaaagagcccaaatagccaaagcaatcctaagcaaaagcacaaatctggaggcatcacatta

SEQ ID NO: 941035 - DNA, 596 bp, Homo sapiens
gctaatgatggacttaaaaataaaaaagcgttaatagtgaatgatggactttcaggttccagtagcacagttaattaatttggatgaagtgtattgtcttagtgcctttaaattacagatgcaattttgcagataataccgctattctcacatttctcctctcattagctgctacktggttctccacttttgcatccatagaattttaggaaatttccaggactctgagctagatctcaaaatctcacgagcccagaaatcaatcagggtataaaagtggagactagcttttaaaactgatttataaaccagccaacaggtatctaaggaaatgagtttcaaactacccttaataatatcttttgtcaccacaacacaatgatcaaaattaggaaattaacattggtacagtagtgtaaacacaactatagaccttatttaaatttcaccaacttttccacgaatgtcctttttctattctggtatccagtacaggttctcaaatagcatttagttgttatttgtcctgagtctcctccaatatatgattgtttctcagcccttccttgtctttcatgaccttgacacttttgaag

SEQ ID NO: 941036 - DNA, 596 bp, Homo sapiens
gctaatgatggacttaaaaataaaaaagcgttaatagtgaatgatggactttcaggttccagtagcacagttaattaatttggatgaagtgtattgtcttagtgcctttaaattacagatgcaattttgcagataataccgctattctcacatttctcctctcattagctgctacttggttctccacttttgcatccatagaattttaggaaatttccaggactctgagctagatctcaaaatctcacgagcccagaaatcaatcaggktataaaagtggagactagcttttaaaactgatttataaaccagccaacaggtatctaaggaaatgagtttcaaactacccttaataatatcttttgtcaccacaacacaatgatcaaaattaggaaattaacattggtacagtagtgtaaacacaactatagaccttatttaaatttcaccaacttttccacgaatgtcctttttctattctggtatccagtacaggttctcaaatagcatttagttgttatttgtcctgagtctcctccaatatatgattgtttctcagcccttccttgtctttcatgaccttgacacttttgaag

SEQ ID NO: 941037 - DNA, 530 bp, Homo sapiens
cttgagctgtgaagtcagttggtgcaaacaaaagcctggccgtaatttaaaagcagctcctggaaaacaaggtgagcataaggaagttttaaaaacttcaggccgggcgcagtggctctcatgcctgtaatcccagcactttgggargccgaggcgagcggatcacaaggtcaggagatcaagaccatcctggctaacacggtgaaaccccatctctactaaaaatacaaaaaaaaaattagccaggcatggtggcaggcacctgtagtcccagcaactcaggaggctgaggcaggagaatggcatgaacccgggaagcagagcttgcagtgagccgagattgcgccactgcactccagcctgggtgatagaatgagactccggctcaaaagaaaaaacaaaaacaaaaacaaaaacaaaaaacttcaatatattcctggggatctaaaaggatgtttgcatgtgcaaggttgtatatatgcccagaaagacctgggaaaggaaaagcctgtcatcacccctgcctgaac

SEQ ID NO: 941038 - DNA, 530 bp, Homo sapiens
cttgagctgtgaagtcagttggtgcaaacaaaagcctggccgtaatttaaaagcagctcctggaaaacaaggtgagcataaggaagttttaaaaacttcaggccgggcgcagtggctctcatgcctgtaatcccagcactttgggaagccgaggcgrgcggatcacaaggtcaggagatcaagaccatcctggctaacacggtgaaaccccatctctactaaaaatacaaaaaaaaaattagccaggcatggtggcaggcacctgtagtcccagcaactcaggaggctgaggcaggagaatggcatgaacccgggaagcagagcttgcagtgagccgagattgcgccactgcactccagcctgggtgatagaatgagactccggctcaaaagaaaaaacaaaaacaaaaacaaaaacaaaaaacttcaatatattcctggggatctaaaaggatgtttgcatgtgcaaggttgtatatatgcccagaaagacctgggaaaggaaaagcctgtcatcacccctgcctgaac

SEQ ID NO: 941039 - DNA, 530 bp, Homo sapiens
cttgagctgtgaagtcagttggtgcaaacaaaagcctggccgtaatttaaaagcagctcctggaaaacaaggtgagcataaggaagttttaaaaacttcaggccgggcgcagtggctctcatgcctgtaatcccagcactttgggaagccgaggcgagcggatcacraggtcaggagatcaagaccatcctggctaacacggtgaaaccccatctctactaaaaatacaaaaaaaaaattagccaggcatggtggcaggcacctgtagtcccagcaactcaggaggctgaggcaggagaatggcatgaacccgggaagcagagcttgcagtgagccgagattgcgccactgcactccagcctgggtgatagaatgagactccggctcaaaagaaaaaacaaaaacaaaaacaaaaacaaaaaacttcaatatattcctggggatctaaaaggatgtttgcatgtgcaaggttgtatatatgcccagaaagacctgggaaaggaaaagcctgtcatcacccctgcctgaac

SEQ ID NO: 941040 - DNA, 561 bp, Homo sapiens
aggcaaggaactgctggtatcacccctcccctaatcccaggctgcatggctcacagctcaaaagagacacatcctttcgcttgaggagaggagagggaagagtggggaggactttgtcttgcatcttggataccagctcagccacggcaggatagggcactggtcagagttgtaaggcccttgttctagaccctagcccccagatgacatttctagacacaccygggtccacagggaaccaaatgccttgaaagaaaagactcagttatggcagcactaatcacctgctaactgaataaccagcagtgatacccaggtattacgtcgagggtcttgggtgagcctctgagacttgctggcatcaggtgagacttggcacattactagctatgatggctatggggcaaaactcctcctgcttgagaaaagcagagggactagtaaaggggacttagtcttgcattttaggtaccagcatggccacagtggggtagatcaccaagcggcctcttggagtcctcaattccaagacttgacccttagatggcatttccggacctg

SEQ ID NO: 941041 - DNA, 556 bp, Homo sapiens
caataccttgctttcagtaatggataaaacacataggccaatgatcaacaaggtaacaaaagacctgaacaacactataaaacaactaaaccgaacagatattaatagaacattttacccaacagaagaagcatacacttttcctcaaatcaygtaaaacattcttcaagatagattacgtgctagcccataacacaagcctcaatatactgaaataatacagtgtgttcactgacctaaaccaattaaattagaaaccaacaacctaaggttttgggaaaattcagttttaaaaatcaaaaacacactattaaataaccagtgggtcaaagaagaaatcacaagagaaattagaaaatattctgaagtaaatgaaaatgaaacacaaaataccaaaacttttgagatgcagcatcagttattgaagggaaatatatagatgctaatgccaatatcaaaaaggaagaaagatcttaaatcagtaatctcactttccacattataaaactaaaaaagaaaagcaaataaattcaaagcaagcagaaagaagacacaa

SEQ ID NO: 941042 - DNA, 556 bp, Homo sapiens
caataccttgctttcagtaatggataaaacacataggccaatgatcaacaaggtaacaaaagacctgaacaacactataaaacaactaaaccgaacagatattaatagaacattttacccaacagaagaagcatacacttttcctcaaatcacgtaaaacattcttcaagatagattacgtgctagcccataacacaagcctcaatatactgaaataatacagtgtgttcactgacctaaaccaattaaattagaaaccaacaacctaaggttttgggaaaattcagttttaaaaatcaaaaacacactattaaataaccagtgggtcaaagaagaaatcacaagagaaattagaaaatattctgaagtaaatgaaaatgaaacacaaaayaccaaaacttttgagatgcagcatcagttattgaagggaaatatatagatgctaatgccaatatcaaaaaggaagaaagatcttaaatcagtaatctcactttccacattataaaactaaaaaagaaaagcaaataaattcaaagcaagcagaaagaagacacaa

SEQ ID NO: 941043 - DNA, 556 bp, Homo sapiens
caataccttgctttcagtaatggataaaacacataggccaatgatcaacaaggtaacaaaagacctgaacaacactataaaacaactaaaccgaacagatattaatagaacattttacccaacagaagaagcatacacttttcctcaaatcacgtaaaacattcttcaagatagattacgtgctagcccataacacaagcctcaatatactgaaataatacagtgtgttcactgacctaaaccaattaaattagaaaccaacaacctaaggttttgggaaaattcagttttaaaaatcaaaaacacactattaaataaccagtgggtcaaagaagaaatcacaagagaaattagaaaatattctgaagtaaatgaaaatgaaacacaaaataccaaarcttttgagatgcagcatcagttattgaagggaaatatatagatgctaatgccaatatcaaaaaggaagaaagatcttaaatcagtaatctcactttccacattataaaactaaaaaagaaaagcaaataaattcaaagcaagcagaaagaagacacaa

SEQ ID NO: 941044 - DNA, 533 bp, Homo sapiens
gaagctttgaatttagtctatgatgtctcctccatagctgtgaaaatcttagatgatgtctttttccaatataaggcttttttgtctacgttgaacatttgttgtttagtgtagttaccctcagcagtgatctcaggtagttttcctggatagcttgtcacaacttctactcagcacttgcaacttcaccttgcacttttctattaatggggaygggttctttccttaaaccttaagatccaacttctgctaccttcgaacttttcttctgtagcttcctcacctctctcccgccttccctgaattgaagacacttagggccttgccctgggttaggctttttaataagggaatgttgtgactgttttaatattttatacagactgttaaaaactttctccatatcagtaataagggtgtttcactatcttatcattccttgtatcactgaagtaacacttttaatttctttcaccaaatttttctttaaattcacaacttggctgcttggtacaagaggcctaactttttca

SEQ ID NO: 941045 - DNA, 644 bp, Homo sapiens
ttttaattaattaactttttttttttttgacggaatctcactctgtggccaggctggagtgcagtggcatgatctcagctcactgcaacctctggctcccgggttcaagcgattcttttgcctcagcctcctgagtagctgggactacaggtttgtgccaacatgcccagctaatttttgtatttttagtagagatggtgtttcatcatgttggccaggaaggtctygatctcctgacctcgtgatctacccaccttggcctcccaaagtgctggaattacaggcatgagccactgcacccagccctggggtcccttttgtaagggcaccaatcccattcgtgaggactccaccttcttatgtctaatagttacctcccagtggcctcattttctaatggcgtcacactaggagcaatgatttcaacatgtgaattttgggggaacataaacatgtagtttgttgtcatgatgtaaaattaacaatacttcaatactttgttatatgtcttatgttacatgaccaggaaataagagagacaataaaaaatattttatacaaacatgcacatatttataccaaaataagaaggaaatgctcatgtcaattacagttatctttttctgtaactagtcacatggtca

SEQ ID NO: 941046 - DNA, 374 bp, Homo sapiens
ctctttacccttattctacaagctttttatatttttcaattttttaactttttaaatgttttattaaaaattaaaacacaaatgccgcattagcctaggcctgcacagggtcagaaccatcaatcactgtcatcttcctcctccacagcttgtcccactggaagatcttcaggggcagtaacatgcgtagagctgtcatctcctatgagaacartgccttctggattccttctgagggacctgctggaggctgctttacagttaacttttttttaataagtaggagtacactctaaaataatcattaaaattatagtgactacatacagcagtaacatagtcctttcatatcatgatcacgtgtgatgtactgc

SEQ ID NO: 941047 - DNA, 629 bp, Homo sapiens
cctctctttgtactatttctctttatttctcagactggctgacacttaggaaaaatagaacctacattgaaatattgggggtgggttcccccgatattacttcttcaaaaagaataataaaattgacaaccctagagctatatggactaagaaaaaaagaaagatgaattactaaaataagaaattacagtggagatattgttcattactccagatgaaaaaattatttaaaatactatgaattatcatatgccaacaaattggataatctagattaaatgaataaattcctagaaacatgaagccaacaaaaactaaattacaaagaaatagaaaatctgaaaagacctatttactagtgaggagattgaatcagaaaccaaaaatytcccaacaaacaagagccctggacctcatagcttcactgatgaattctagcagatatttaaagaagcactaatagagttgggaaaactaaccttttttaagttttccaaaaacataaagaaggaaaacacatcctaattcatgttgtaaagccagcattgccaggatatcaaattgtctgtaggcaaagacattgcagaaaaataaaaatagaaaccaatatcctgtatgaacattgacgc

SEQ ID NO: 941048 - DNA, 721 bp, Homo sapiens
taatacatagatgcttgttaaccaagagattcaccagtaaatgaatgtctcttatatatttttttaaagcaggtatcctgaaaaacattttcctcaaaatatctgctaaagcattacttattggtgcctctaagcacatacccttctcatctgtgttagcaccacccttttctctttcttgtcttaaggcttccacaaggctatcagtcagtttttactgcctaacaagccaccacatttcctattgcccctgtaacaaactaccacaaatttaatgacttaaaatgccacacatttggccaggtgcggtggctcatgcctgtaatcccagcactttgggaggccgaggcagttggatcacctgaagtcaggagttcgagaccagcctggtcaacatggtaaaaccccatctctactaaaaatacaaaaaattatctgggcgtggtggcatacacctgtaatcccagctacttgggaggccgaggcaggagaatcagtcaawcctgaacccaggaggcggaggttgcagtgagcagagattgcaccattgcactccagcctgggcgacaagagagaaactccatctcaaaaaaaaaaaaaaaaaagctacacatttattctcttacagttctgtgagccagaagtccaaagtgagtcttcctgggctaaaattgaagcatctgcagggctggcttcttctaggggctgcagggagaatctg

SEQ ID NO: 941049 - DNA, 712 bp, Homo sapiens
tgcagcaggggtaggagggagtggccattccttggggcccaggccacaggatgatgtcagaagcttagtaccaaggctcccagaggtacacatcccatcaccatggtgttcatccatgaagactctcatggttcagcttcttaaatgcaggtccacgatgggcaaagctctgatcctcatattccatcctgtggtgtcccttcatcctttacatgttggaaggcagcatgggacccatcaataggacagcggtttgagcctgcagaaagccagccacatctatctctaggtttcagcctgagtacagttccctctcaggcctggggcagaatttactctgcgtggttcctttctccatgcttggctgcacccaacacccagaatggtgcattgacygattatttgtgtgtcctcccctctacagtgctggggctatgttttattcatctctgtactgtctgtagctggattaacagtagctggattaacacacagaaggccttaagcagactgatgggctgggcgtggtggtttacgcctgtaatcccagcattttgggaggccaaggcaggaggatcacgaggtcaagagatcaagaccatcctggttaacacggtgaaaccccatctctactaaaaatacaaaaaattagctgggcgtggcagcaggcgctggtagtcccagctactcgggaggctgaggcaggagaatg

SEQ ID NO: 941050 - DNA, 637 bp, Homo sapiens
gtgattaatcctgaatatcaaggagaaatataggttattactataaaatggaaataagtaagaagatgccttgaatggaagatatcccaacaggcacctgttagtatatgcatgccctgtgataacatcaatgaaaactacaaccacccataagactcaggacagcyaacagcctagatccttaaacagggaaggtttgagtcactcaatcatgcaaggaaccataataggccaaggttcttgctgagagcaaatgggataagaaatgggcagcagaaggaaattataaataccaactacaaccacatgaccagttgaagaaaagaggacagtaatagacagtgagtatttcttccttattttgatatgaaaatatttgtgcatatgttaattacttcttctcctcctctctcattcccctaccatctaacataggatttgttaacagtagctaaccttatcattcagaatttaaataagaggtctaagaaggaatttgactcagctaggaaaggaatgaacctcacccaaagaggaggtacaaaagagactttgtgtcatattttgaaaagaaggttagtgtagcgtgttttcagttttacaagggacagttgcattatgttaggaggaagcatgc

SEQ ID NO: 941051 - DNA, 613 bp, Homo sapiens
ggtgaggcagtccctaggtccacaggtggtatgtgtaggtgcatgtaagctgctgtggtagtggcaggttgggtggatccatcttgaagcccaaggaggaatgcttagatgcaaatggtggtggagtgggctggataatccctaggcttctggacagcatgctttggcactgggattgcagggggtagaaatacagaatatacattctcagcacatggaaatttctccaggatagaccatatattaggacatgaaacaagtctcaacaaatttataaattcaaagttatatcaagtatcttctcaaaccacaaatgagtaattctagaaattagtaamtaggagaaattggaggaaatttgcaaactgtaaaaacacacggaaattaaacaaaatgctcctgaatgaacactggttcaaggaagaaattaaggaagtacccaaaaatttcttaaaacaaatgaaaatcaaagcaacgtatcgaaagctatgggatacagcaaaagcattgctaaaagggaagtcttaacagtaaatacctttctcaaaatagaaaaatttaaacgaacaatctaacgatgaacttcaaggaattagagaagcaagaacaaaca

SEQ ID NO: 941052 - DNA, 668 bp, Homo sapiens
ataactgattctccgtatgcagaagattgaaactggaccccttccttacaccatattcagaaatcaactcaagatgaattaaatacttaaatgtgaaacccaaatctataaaaattctgaaagataacctagcaaataccattcyggacataggacctagcaaagatttcatgatgaagatgccaaaagcaattgtaacaaaaccaaaaattgacaaataggacctaattaagaaactctttttcaacgtagtaaacagaaaacctacagaatgggagaaaatatttgcaaactatgcatccaacaaatgtctagtatctataaggaacttaaaaagagttacaagcaaaaaacaaacaacctcgttaaaaaaaaacagacaaaaatccaacaaaggtcagaatctacaaggaattaaaaagagttacaagcaacaaacaaacaacctcattgtaaaaaacagacaaaagacatgaatagacacttttcaaaagaagacatacatgtgcccaacaaacatatgacaaaatactcaacagcactaatcattacagaagtgcaaatcaaaaccacgaagacatacatctcacaccagttaaaataatttttattaaaaaaacaaaaaattacagatgctggcaagattgtggagcgaagggaatgtttat

SEQ ID NO: 941053 - DNA, 668 bp, Homo sapiens
ataactgattctccgtatgcagaagattgaaactggaccccttccttacaccatattcagaaatcaactcaagatgaattaaatacttaaatgtgaaacccaaatctataaaaattctgaaagataacctagcaaataccattctggacataggacctagcaaagatttcatgatgaakatgccaaaagcaattgtaacaaaaccaaaaattgacaaataggacctaattaagaaactctttttcaacgtagtaaacagaaaacctacagaatgggagaaaatatttgcaaactatgcatccaacaaatgtctagtatctataaggaacttaaaaagagttacaagcaaaaaacaaacaacctcgttaaaaaaaaacagacaaaaatccaacaaaggtcagaatctacaaggaattaaaaagagttacaagcaacaaacaaacaacctcattgtaaaaaacagacaaaagacatgaatagacacttttcaaaagaagacatacatgtgcccaacaaacatatgacaaaatactcaacagcactaatcattacagaagtgcaaatcaaaaccacgaagacatacatctcacaccagttaaaataatttttattaaaaaaacaaaaaattacagatgctggcaagattgtggagcgaagggaatgtttat

SEQ ID NO: 941054 - DNA, 668 bp, Homo sapiens
ataactgattctccgtatgcagaagattgaaactggaccccttccttacaccatattcagaaatcaactcaagatgaattaaatacttaaatgtgaaacccaaatctataaaaattctgaaagataacctagcaaataccattctggacataggacctagcaaagatttcatgatgaagatgccaaaagcaattgtaacaaaaccaaaaattgacaaataggacctaattaagaaactctttttcaacgtagtaaacagaaaacctacagaatgggagaaaatatttgcaaactatgcatccaacaaatgtctagtatctataaggaacttaaaaagagttacaagcaaaaaacaaacaacctcgttaaaaaaaaacagacaaaaatccaacaaaggtcagaatctacaaggaattaaaaagagttacaagcaamaaacaaacaacctcattgtaaaaaacagacaaaagacatgaatagacacttttcaaaagaagacatacatgtgcccaacaaacatatgacaaaatactcaacagcactaatcattacagaagtgcaaatcaaaaccacgaagacatacatctcacaccagttaaaataatttttattaaaaaaacaaaaaattacagatgctggcaagattgtggagcgaagggaatgtttat

SEQ ID NO: 941055 - DNA, 668 bp, Homo sapiens
ataactgattctccgtatgcagaagattgaaactggaccccttccttacaccatattcagaaatcaactcaagatgaattaaatacttaaatgtgaaacccaaatctataaaaattctgaaagataacctagcaaataccattctggacataggacctagcaaagatttcatgatgaagatgccaaaagcaattgtaacaaaaccaaaaattgacaaataggacctaattaagaaactctttttcaacgtagtaaacagaaaacctacagaatgggagaaaatatttgcaaactatgcatccaacaaatgtctagtatctataaggaacttaaaaagagttacaagcaaaaaacaaacaacctcgttaaaaaaaaacagacaaaaatccaacaaaggtcagaatctacaaggaattaaaaagagttacaagcaacaaacaaacaacctcattgtaaaaaacagacaaaagacatgaatagacacttttcaaaagaagacatacatgtgcccaacaaacatatgacaaaatrctcaacagcactaatcattacagaagtgcaaatcaaaaccacgaagacatacatctcacaccagttaaaataatttttattaaaaaaacaaaaaattacagatgctggcaagattgtggagcgaagggaatgtttat

SEQ ID NO: 941056 - DNA, 659 bp, Homo sapiens
tgggcttccctttgtgggtaacctgacatttctctctggctgcccttaacattttttccttcatttcaactttggtgaatctgacaattacgtgtcttggagttgctcctctcgaggagtatctttgtggtgttctctgtatttcctgaatttaaatgttggcctgccttgctagattggggaagttctcctggataatatcctgcagagtgctttccaacttggttccattctcccagtcactttcaggtacaccaatcagacgtagatttgatcttttcacatagtcccatatttcttggaggctttgtttgtttctttttattcttttttctctaaacttcccttctcacttcatttcattcatttgatcttccaacactgataccctttcttccagttgattgaatcagctactaaagcttgtgcattcgttgcatagttcycatgccatggttttcagctccgtgaggacctttaaggacttttctgcattggctattctagttagccattcatctaatatttttcaaggtttttaatttctttgccatgggttcaaacttcctcctttagcttggagtagtttgatcatctgaagccctcttctctcaactcgtcaaagtcattctccattcagctttgttccattgctggtg

SEQ ID NO: 941057 - DNA, 557 bp, Homo sapiens
caggtacttgcctcctactccacggggaaaatagaagccattgaagagaattccctcagcttcctacaaccaaacctacaattttacctcttttgtagctgctcattttttatagtggatgaagtgtccctcagccttcctgaggctactctcctcacccatgctctggaccctatgttctcctgccttctcagagaccttggtcaatcaagcacccctgcctgtactataattttaacttctccactgtacagtctcctaaccatacacatttagacatgttcaaatctccactttcttaaaaaytcaacaatgcttcctctgagtttatgtcagaggaatgccttttacttaagggtattttctcttctcaacaatgaaactccctgacgatgttgtctacatttccttgctccttttcccaacctcactgctatgctgccatacttctacccacgctgctcccacacaccacaccttagatattgttttttctaaagttactgatgacctgaatctatagacactttgctgcattttctgtaatgtataaaaca

SEQ ID NO: 941058 - DNA, 612 bp, Homo sapiens
aaactaacaaacagaaaggacattcacaccaaaaacccatgatgatgtacatcaacatcatcaaagaccaaaagtagataaaaccacaaagatggggaaaagacagagcagaaaaactggaaactctaaaaagcagagtgcctctcctcctccaaaggaacacagttcctcaccagcaacggaacaaagctggatggagaatgactttgacaggttgagagaagaaggcttcagatgatcaaactactccgagctacaggaggaaattcaaaccaaaggcaaagaagttcaaaactttgaaaacaattttcacgaatgtataactagaataaccaatacagagaagtgcttaaaggagctgatgtagctgaaagccaaggctcgaggactacatgaagaatgcagaagcctcaggagctgatgygatcaactggaagaaagggtatcagtgatggaagatgaaatgaatgaaatgaagcaagaagggaagtttagagaaaaaagcataaaaagaaatgaacaaagcctccaagaaatatgggactatatgaaaagaccaaatctacgtctgactggtgtacctgaaagtgacggggagaatggaaccaagtt

SEQ ID NO: 941059 - DNA, 558 bp, Homo sapiens
ttactttgaaaggctggataaatgctcagtttctttcttttaattaccaatcatcaaagtaaaagtagtttgaagagttactgctgatagcaatatgaaattttcccaactttttcctttttgattattgttattaactcatgaattttcattgactcatagtatttatatccactacaatctttatttctgggtatttttctggtctcttaaccacctcattattctaaaakactctttcccacagctcttctctgttcaaatctctagtgcctccaccttcatgctcattctcagacgatggctgtctttgtttcctatttcactgaggaaaaggaggtaccatgaaagtaataggagtcctttcatcctggttcctgcatccttttcacatggccccattatttagtccaatagcttcttgatttttgacataagatgttctaggctcaccttgaaccactcatgctactgaattgaacaattttaaagtgacccctggatgttttcagtggagaatgatgttagagacaacagtttgtatgctaggtctgaata

SEQ ID NO: 941060 - DNA, 558 bp, Homo sapiens
ttactttgaaaggctggataaatgctcagtttctttcttttaattaccaatcatcaaagtaaaagtagtttgaagagttactgctgatagcaatatgaaattttcccaactttttcctttttgattattgttattaactcatgaattttcattgactcatagtatttatatccactacaatctttatttctgggtatttttctggtctcttaaccacctcattattctaaaagactctttcccacagctcttctctgttcaaatctctagtgcctccaccttcatgctcattctcagacgatggctgtctttgtttcctatttcactgaggaaaaggaggtaccatgaaagtaataggagtcctttcatcctggttcctgcatccttttsacatggccccattatttagtccaatagcttcttgatttttgacataagatgttctaggctcaccttgaaccactcatgctactgaattgaacaattttaaagtgacccctggatgttttcagtggagaatgatgttagagacaacagtttgtatgctaggtctgaata

SEQ ID NO: 941061 - DNA, 633 bp, Homo sapiens
aactactagtcttagagaagagctaaagttgggggtttatttaccttgcgtggcaccttttcttaaagcaactagttctcttagtaaattttattattgttttttaggagcacaggtgggtctggtagagtgaaggtctcccttagtaaatttaaactgttttcaattactagaatttggcttacttacattttaggaaaaaatctaatttgtaaagagaagtaactgcatattgctgtatatttagtcattcaacaacaccggttactgtgcctctgctgggaattaataggtgagacacagttctttcagtgagcttagagagatagacatgtaaaaagttcttacactgtgctgtgctggaggcatggacagggtagggtgggaaacagttaaaatcacataggggaggccaggcayggtggttcacgcctgtaatcccagcactttgggaggccgaggcaggaggatcacgaagtcagaagttcgagaccagcctggccaacatggtgaaaccccgtctctactaaaagtacaaaaattagccgggtgtggtggcgggcgcctgtagtcccagttgctcgggaggctgaggcaggagaatcgcctgaacctgggaggtggaggtcacag

SEQ ID NO: 941062 - DNA, 696 bp, Homo sapiens
cgggatttggaatcagaaaacctgattttgcactctaccattgccactgactagtcagatgaccctggggaaatcactgaatgcttctcaacttagcttcttcatctgcaaaacagggaaaataaaaatagctatctcacagataacaactgtgaggttcagataaggtgatttacgtgaatttcctttgccaacttctaaactctgtacatatgagttccttggtgattgttagtrttatgggctgaatgtttgtgtcttcccctagaatttatacattgaatctctaacccacaatgtgatggtattaggaggtggggttttgaggggtagttaggtttagatgaggtcacgagggtggagccccgtgttagaattagtatccttacaagaagtgactaacagctcgctctttgtctgtgtgtgtcatgtgaggacacagcaaaaactcagccacctacaagccaggaagagggcccccaccaagaactgaatctgccaacaccttgatcttggacttcctagcctctggaactgtgagaaacaaagtgtctgttgcttaagccacccagtctaggatacttgttatcacagctcaaactaagaccgttagtaacaacaccagaactgaagaatgtatcaaattttcttattcagaaatttttatttacaaaaaccttagtgacgtgcttaagt

SEQ ID NO: 941063 - DNA, 696 bp, Homo sapiens
cgggatttggaatcagaaaacctgattttgcactctaccattgccactgactagtcagatgaccctggggaaatcactgaatgcttctcaacttagcttcttcatctgcaaaacagggaaaataaaaatagctatctcacagataacaactgtgaggttcagataaggtgatttacgtgaatttcctttgccaacttctaaactctgtacatatgagttccttggtgattgttagtgttatgggctgaatgtttgtgtcttcccctagaatttatacattgaatctctaacccacaatgtratggtattaggaggtggggttttgaggggtagttaggtttagatgaggtcacgagggtggagccccgtgttagaattagtatccttacaagaagtgactaacagctcgctctttgtctgtgtgtgtcatgtgaggacacagcaaaaactcagccacctacaagccaggaagagggcccccaccaagaactgaatctgccaacaccttgatcttggacttcctagcctctggaactgtgagaaacaaagtgtctgttgcttaagccacccagtctaggatacttgttatcacagctcaaactaagaccgttagtaacaacaccagaactgaagaatgtatcaaattttcttattcagaaatttttatttacaaaaaccttagtgacgtgcttaagt

SEQ ID NO: 941064 - DNA, 610 bp, Homo sapiens
aatttaattctgacactatccgcccgaagatagtgttagatcccacaggctgagggctcagtccccaagatggacccccaatccaatgcccatttcaatccccaggttgtttttcctatgtttctgaccaaccggctatgaattggagttcccacaaccctctccttgggtttgattaatttgctagagtggttcacagacctcagggaaacacgtttaccggtttattataaaggagattacaaaggatacagatgaaaagatgcataggacgaggtatgtgggaagaggcatggagcttccatgccctcttgggtgtgccaccttctaggaacctccatgtgttcagcacccagaagctctcggaacacagtccttttggctatttatagaggcttccttagctagrcatgattgattaaaccattggccattggctatcaacttatctatcagcccctctccccaccctggaggctagtgagtggggctgaaaatcccaaccctttatttaggccttggtctttcaggtaaccagctctgtcctcaagtcactgaggagctgtcagccattaatcaatcattagcacacaaaaagatatcactttgg

SEQ ID NO: 941065 - DNA, 589 bp, Homo sapiens
ttttaacatctcatgtatctatggataacaggttctcaggtgaagcgccaagtatgtcactgaaagcccagtggagttaagtgtgcaaagtcagtctgaacatatgctgtaatggatttgacctcgaatagcactacaaagagaaattgcagataaccatctgaactgacttctgaagcttrtagttctggctcctgagatacagagagaaaagtgagaccaaacaggtgggagcaaacaactcagagagaccagaatgaatacgagtctaactttaaaagtaaataaaattaaataaaaatgatttattctatagctctttgtcttttattggttcccacacaatgtccacacaataaacagttttcagcacatgttatactttttctgatcacattggtgtctgttaaaataaggcccagcactttgggaggccgaggcgggtggatcacgaggtcaggagatcgagaacatcctggctaacacggtgaaactccgtctccactaaaaatacaaaaaattatccgggcgtggtggcggcacctgtagtcccagttactccggaggctgaggcaggagaatggtgtga

SEQ ID NO: 941066 - DNA, 592 bp, Homo sapiens
gcctgcccagattgagggtgggtctgcctttcccagctcactgactcaaatgttaatctcctttgggaacaccctcacagacacacccaggatcactactttgtatccttcaatccaatcaagttgatgctcagtattaaccatcacacatgtccaccagtgccatgtcaatttatcgttgctatggcaacacccrgaagttaccactcctttccatggcaatgaccaggaatttaccaccctttttctagaaatgtctgaataacctgccccttaatctgtatgtaatgaaaagtgggtataaatatgactgcagaactgcccctgctactctgggcaccctgccaatggggtggccctgccctggaaggagcagtccctctgctgctgctgtgcacagccgcttcagtaggagttgctaacaccgctggctcatctctgaagtttttcctgggcaaagccaagaaccctcccaggctaagccccagtttgggggttcacctgccctgcatcaaaaccaagaagaaactaatgaggtattacccattcacatgtaatgtcttgtcacttttatttttaaaagaatgcaaaa

SEQ ID NO: 941067 - DNA, 605 bp, Homo sapiens
taagagattaaagtaaagacaggcataggaaatcacaagggtattgattggggaagtgataagtgtccatgaaatctccataatttatgtttagagattgcggtaaagacaggcataagaaattataaaagtattaatttggggtactaataaatatccatgaaatcttcacaatccacattcttctgccatggcttcagtgggtccctccatttggggtccctgactcccgcaacagtgattaaaatattaartgcttccaaatggtacaatttgagattctgtgtataaaattgagtatgaatgattaaaatagtgaagtagtttccatcgacttctgaaaacaaagaagctttctgtttgttcagtttcttttttaattttaaaaatttatgactatttttattacataatattcaatcttataattgacattgaatgtatttttttcaaaataaaatttttcttcaccttcaaaaaagacttctattttactaaaatgatgtagaaaccagttagccttaagtttaaatggagaccaatatattaattttcaagttacagaattcctaccaaagaggggatagctatagctatctaacacc

SEQ ID NO: 941068 - DNA, 611 bp, Homo sapiens
ctttaaatcaaaagctagaaatgattcaacttcatgaggaaggcatgttgaaagctgagataggccaaaagctaggcctcttctgccaaacagttagccaagttgtgaacacaaagaaaaggttattgaaagatattgaaagtgccaatccagtgaatacacaaatgataagaaagcaaaaccatcttattgctgatttggagaaagttttagtggtttgggtaaatgatcaaaacagacacaccattcccttaacccaaaacaaagccctaactttsttcaattctctgaaggctgagaggggtgagaaggtaaaaaagaaaagtgtgaagctaacagagtttggctcatgaagtttaagaaataagtcacctccataacataaaagttttaggtgaagcaacgagttcagatgtaaaagtcataacaacttatcctgaagatctagctaagatcattaaagaaggtggctacactaaacaacagatcttctatgtagacaaaatagttttgtattgaaaggcaataccatctaggactttcctagctagagtgcagaagtcaatgcctggcttcaaagctttagaggacaggttgaatctcctgttagg

SEQ ID NO: 941069 - DNA, 655 bp, Homo sapiens
caactcatttattgagtgaaccaaaaggctgctaaatttgagtgaggcccggaagaggggaaggctctgcaacaggtccaggctgctgtgcaagctgctctgccacttgcaccatatggctcagcagatccaatggtgcctgaggtgtcagttgcttatagagatgctgtctggagcctttgtcaggcccccataggtgaatcccagtggaagcctctaggattttggagcaaggccctgtcatcttttgcagataactactctcctttrgagagacatctcttgacctgttactaggccttggtagaaacagaatgtttgactatgggtcaccaatttattatgtaacctgaactgcctatcataaactgggtgctttctgacccatctagccataaagttggatgtgcacagcagcatttaatcatcgaatggacatggcatatacacaatcaggcttgggcaggtcctgaaggcacaagtaagttaatgagacagtggcccaaatgcccatggtccctactcctgccaccctgccttctctctccagtcctgcactaatgacctcatatagttcaccatgaaaagttgacagagaaaggaagactaggtcctggtttatagattgttctgcatgatatgccagcaccacctg

SEQ ID NO: 941070 - DNA, 568 bp, Homo sapiens
taaaaggggccaacgtacagctcaggccattgcttcagagagagaaagccctaatccttggcatcttacatgcggtattgagcctgtgggtgcacagaagtcaagaactgaggtttgggaaccttkgtctagatttcagaggatgtatggaaacacctggatgtccaagcagaaggttgctgcagaggcagagtcctcatggagaacctctgctagagcagaatggaagggaaaagtgggctctgcctagcagagctgtgagaagagggccaccattctccagatcccagaatagtagatacaccagcagcttacacctggaaaagccacagacaattccagcttgtgatggcagcgaggagtggagcagcaccctgcagagccacaggagcagaactgcccaaggctgtgggagcacacctcttgcatcagcatgccctggatgtgagacatggagtcaaaggagatcattttgggacttcaaggttttatgactgccctattggattttggacttgcatggggcctttagcctctttgttttggccaagttctgccatttggaaca

SEQ ID NO: 941071 - DNA, 503 bp, Homo sapiens
cctgaggcttcactcagcaggggatctgtgggcccagtccaggaaaccatttttctctcctaggcctctagacctgtaatgggaggggctgctgtaaaggtctgtgacataccctagagacattttccccattgtcatggtgattaacatttggctcctcattgcttatgcaaatttctgtagctggcttgaatttctctccagaaaatgggcttttcttttttattgcatygtcaggttgcaaatttttcaaactttaatgctctgcttcctcttgaatgctttgctgcttagaaatttcatctgccagataccctaagtcatctctctcaagttcaaaattacacaggcctctagggcaggggcaaaatgccaccagtctctttgcatagcaagagtcacctttattccagttcccaagttcctcatctgtatctgagaccacctcagcctagaccttattttccatatcactctcagcattttgatcaaagccactcaac

SEQ ID NO: 941072 - DNA, 861 bp, Homo sapiens
caataaggagagagtggtatgagatcaggcagggccttgcagacattatggaagattcctttcttcctcctaagaggaattaaaaagccacggaaggatttcaagattggaagtagatgatgtgatgcattgtgatgattcaaaaagctcaatctgaggccgggcgcggtggctcacgcctgtaatcccagaactttgtgaggccgaggcgggtggatcatgaggtcaggagatcaagaccatcctggccaacatggtgaaaccctgtctctactaaaaatacaaaaattagccaggcgtggtggcgcatgcctataatcccagctactcagggggctgaggcaggagaattgctcgaacctgggaggcagagkttgtagtgagccgagatcgcgccactgcactccagcctgggcgacatagcacaaattgacggtgacttggactaagctgatggtggtggatgagggagaagagtaggtgaacttgagagatatttatttagaaggtcaaatctccagaactcaatgactgattggatatgggagtgatagagaagaaggcatcaaagatgactcaagatctctggcttgtgtaagaggatggcaggctattcactgacaccaggaattctggaaaggaacagggttagagggaaagatcatgagttctattttagacacctattgagctgttaacatttccacttagaggaaatgttaagtaaacagctagggttcagtggagatgtctgagtgattaaagttgtaggccatctctgtgtaagcaatagctgaggccacagcatggacagaatttcctgctcgcctggagagaaagtgagcagcctgggctggagga

SEQ ID NO: 941073 - DNA, 861 bp, Homo sapiens
caataaggagagagtggtatgagatcaggcagggccttgcagacattatggaagattcctttcttcctcctaagaggaattaaaaagccacggaaggatttcaagattggaagtagatgatgtgatgcattgtgatgattcaaaaagctcaatctgaggccgggcgcggtggctcacgcctgtaatcccagaactttgtgaggccgaggcgggtggatcatgaggtcaggagatcaagaccatcctggccaacatggtgaaaccctgtctctactaaaaatacaaaaattagccaggcgtggtggcgcatgcctataatcccagctactcagggggctgaggcaggagaattgctcgaacctgggaggcagagtttgtagtgagccgagatcgcgccactgcactccagcctgggcgacatagcamaaattgacggtgacttggactaagctgatggtggtggatgagggagaagagtaggtgaacttgagagatatttatttagaaggtcaaatctccagaactcaatgactgattggatatgggagtgatagagaagaaggcatcaaagatgactcaagatctctggcttgtgtaagaggatggcaggctattcactgacaccaggaattctggaaaggaacagggttagagggaaagatcatgagttctattttagacacctattgagctgttaacatttccacttagaggaaatgttaagtaaacagctagggttcagtggagatgtctgagtgattaaagttgtaggccatctctgtgtaagcaatagctgaggccacagcatggacagaatttcctgctcgcctggagagaaagtgagcagcctgggctggagga

SEQ ID NO: 941074 - DNA, 861 bp, Homo sapiens
caataaggagagagtggtatgagatcaggcagggccttgcagacattatggaagattcctttcttcctcctaagaggaattaaaaagccacggaaggatttcaagattggaagtagatgatgtgatgcattgtgatgattcaaaaagctcaatctgaggccgggcgcggtggctcacgcctgtaatcccagaactttgtgaggccgaggcgggtggatcatgaggtcaggagatcaagaccatcctggccaacatggtgaaaccctgtctctactaaaaatacaaaaattagccaggcgtggtggcgcatgcctataatcccagctactcagggggctgaggcaggagaattgctcgaacctgggaggcagagtttgtagtgagccgagatcgcgccactgcactccagcctgggcgacatagcacaaattgacggtgacttggactaagctgatggtggtggatgagggagaagagtaggtgaacttgagagatatttatttagaaggtcaaatctccagaactcaatgactgattggatatgggagtgatagagaagaaggcatcaaagatgactcaagatctctggcttgtgtaagaggatggcaggctattcactgacaccaggaattctggaaaggaacagggttagagggaaagatcatgagttctattttagacacmtattgagctgttaacatttccacttagaggaaatgttaagtaaacagctagggttcagtggagatgtctgagtgattaaagttgtaggccatctctgtgtaagcaatagctgaggccacagcatggacagaatttcctgctcgcctggagagaaagtgagcagcctgggctggagga

SEQ ID NO: 941075 - DNA, 828 bp, Homo sapiens
tcagcatactgccaagcctcagtgtctctatctgtaaagtgggcataaaatcttcctccttcacagggtagtgttgttattagcacagtgcgcaacatagaacacacgtgttaggtggaacttgatcatggtgatgtgattatcataattgtcatattgtgattctgcctccatcattgcctcagcctgcagcttttagctaaatatcactgcctcggggaagccttctccccactatcacccccacccccaatcaggtcaggccgtctaacagccaggctgtggcaaactgtgggacagatccaccctctgttttcatatgggcacaaccacccctctttggttgacatatcgcctgtggctgttttcatgcagcagtggcagagttgagtgcttgggacaaagaccctgtggmctgcagagcgtgaactatttactatctggcttttacaggcacatgctggccctggctccttcctgcaactggccctcatgctcctccgtggcacttccttctgcagtgatggcacagttagttgtgggcttatttgcccatgtctgtctgctccgccagactgaaagctccttgaggaagggcccagtctagaattcctagagcccaggacagaaatccctccgtcagccacaactcttcaagctccttacagggtcctgtaggcacctggtcctcagaggcagctccagagtgggctgactgctgactcggcacagccttgggagaagtgctgatgctggcagttttccacagcagagcaagccccagctcataggagtgttttccaccaattttccaaatccctggcttca

SEQ ID NO: 941076 - DNA, 742 bp, Homo sapiens
tctttaaggaatgatgtgagggttgtgatttacaacattattttttttcttagaatccaggctggggcctggagggaatcctgtgccttcttgtgctgtagcttcctggagtccaccagacactatggtgtcttccctagagagttgcctgctgcttctgtgatgtggccgactggcactctgtagagcagacggaattcccttctgagaggtacttcctgctttgcatgtttgttttgaagatgtgggttttggtaagcataggggaccagaaaaagaggagaggccctagactgttgtatgagaaatgagatgcaatataagtcagagtggaaagaggaagatgaaaagtccttgtatttccaaggttaaagtcaaggttaggcaaccttcttaagtcagtttaattattgtattagggttctctagagggacagaactaataggtgctatctatatatatgtatatatatatatatttctatatctgtctatctatctatatacatacactttattatakatatacaaagggtagtttactaagtattaactcacatgatcacaaggtcccgcaataggctatctacaagctgaggagcaaggatagccagttccagtcccaaaattgaagaacttggagtcagatgttcgagggcaggaaggatccaccacggaagaaagatgtagactgggaggctaggccagtctagtattttcatgtttttctgccttctttata

SEQ ID NO: 941077 - DNA, 665 bp, Homo sapiens
agaacatttgtatagtgcaagaggttgaaagtattaaaagtagtttcttgatattctgctgttaatcctcagatatttattggtgatcttccagctttttcatagcaaatgaatattttttccatgtagctacagtgttgcaccactagtgtcattgtgtatcatagcttttgtctagttaaaaaaacttaaagggaggagccaagatggccgaataggaacagctccggtctacagctcccagcatgagcaacccagaagacgggtgatttctgcatttccatctgaggtactgggttcatctcactagggagtgccagacagtgggcgcaggacagtgggtgcagcgcaccatgagccagccgaagcagggcgaggcattgcctcactcgggaagcgcaagrggtcagggagttccctttcctggtcaaggaaaggggtgacagacggcacctggaaaatcgggccactcccacccaaatactgcgcttttcagacgggcttaggaaatggcgcaccaggagattatatcctgcacctggctcagagggtctgacgcccacggagtctcgctgactgctagcatagcagtctaagatcaaactgcaaggcggcagcgaggctgggagaggggcgaccaccattgcgtaggcttgcttaggtaa

SEQ ID NO: 941078 - DNA, 665 bp, Homo sapiens
agaacatttgtatagtgcaagaggttgaaagtattaaaagtagtttcttgatattctgctgttaatcctcagatatttattggtgatcttccagctttttcatagcaaatgaatattttttccatgtagctacagtgttgcaccactagtgtcattgtgtatcatagcttttgtctagttaaaaaaacttaaagggaggagccaagatggccgaataggaacagctccggtctacagctcccagcatgagcaacccagaagacgggtgatttctgcatttccatctgaggtactgggttcatctcactagggagtgccagacagtgggcgcaggacagtgggtgcagcgcaccatgagccagccgaagcagggcgaggcattgcctcactcgggaagcgcaagaggtcagggagttccctttcctggtcaaggaaaggggtgacagacggcacctggaaaatcgggccactcccacccaaatactgcgcttttcagacgggcttaggaaatggcgcaccaggasattatatcctgcacctggctcagagggtctgacgcccacggagtctcgctgactgctagcatagcagtctaagatcaaactgcaaggcggcagcgaggctgggagaggggcgaccaccattgcgtaggcttgcttaggtaa

SEQ ID NO: 941079 - DNA, 767 bp, Homo sapiens
aaaaaactgccaaactgttttccaaagtggctgtattattttacattcccatgagcaatgaatgagagttcctgttttccacaccttcatttaatttataacattttacaaacaatttatttagacatatttaaatattcacattttaaaagcataatgagtaaaatcataggcaccaaaagaatgagttgcaagagaaatgatcatatttttcaatggaaggaccaccagtccataaacacaggactaagtctcaacaattagcaccaaatattggcactcttagttcagggaatgaatcactataagataataattttaaaaagcaacaaataaaagcaagcagaattgtggcaaacacgctttgttgcagcgaaagtgtttagaatttaccctagactcgccataaygtgcaaccaaagaaacagcatgccaacattaaaccatgacatctccctggcacatagacaggccattggccagatggttgcagaggtgaaggcactatcccagtctagtcctaagccaaaagatgacttagtgagagccagtctcatgtctgagaggatgaagatctgatctgaggaagaaaccttcctcttctggcccaaccacagatgtctggcattcttattcctgtctggctattaaaggcagaagttttcagtgtgattgtattcaacgtgtgttcactaactacaggctaggggggtcctaatctctctgctttgaataacttgctcaaagctcaaaatcccatgggtaac

SEQ ID NO: 941080 - DNA, 582 bp, Homo sapiens
acacacactcaccacaagacaaagaacgggtatggagggcacacacacacttttaccatttatagtaagccaaaatcacgaaattcaaaatccgagttccaaaagattcaagacaagtcaaaaccaaaaccaaagtatctagcaattcaagtcaagtcaaaaccagaacaaaagtgccaatgcaggcacacygtgggtgatcaggccactcttccactcagatggagtggggcaagttccaaagactagtcttaccaagtttcagatgtccggactccaagtgccagttccttcccagtgttcagccactgtgttaatcctccacgggggcctgctatgcgctgctctggcaaggcgttccactggggcaatttcctacccgggagtgctctttggatcctgtcactcaggctggccggagtcccccgcaggatgctccacagggcaggcctaagccgcctaaggggctgcctcggctgtccatcagttacctcgtttccccgtcagggaaccaagaaacgtagcaggattagccgcagacaaaacttctcagacaccgagttgtagaaggaagggctttat

SEQ ID NO: 941081 - DNA, 582 bp, Homo sapiens
acacacactcaccacaagacaaagaacgggtatggagggcacacacacacttttaccatttatagtaagccaaaatcacgaaattcaaaatccgagttccaaaagattcaagacaagtcaaaaccaaaaccaaagtatctagcaattcaagtcaagtcaaaaccagaacaaaagtgccaatgcaggcacactgtgggtgatcaggccactcttccactcagatggagtggggcaagttccaaagactagtcttaccaagtttcagatgtccggactccaagtgccagttccttcccagtgttcagccactgtgttaatcctccacgggggcctgctaygcgctgctctggcaaggcgttccactggggcaatttcctacccgggagtgctctttggatcctgtcactcaggctggccggagtcccccgcaggatgctccacagggcaggcctaagccgcctaaggggctgcctcggctgtccatcagttacctcgtttccccgtcagggaaccaagaaacgtagcaggattagccgcagacaaaacttctcagacaccgagttgtagaaggaagggctttat

SEQ ID NO: 941082 - DNA, 556 bp, Homo sapiens
tagcctggccaacatggtgaaaccccatctctactaaaaatacaaaacattacctgggcatgttggcggccgcctataatcccagctacttgggaggctgaggcaggaaaatcacttgaacctgagaggcagaggttgcggtgagccaagatggtgccattgcattccagcctgggcaacaagagcgaaactccgtctcaaaaaaaataaaaaaataaaaataaaacaaaaacatatagatagatagatagatagatagatagatagatagatagatagacagacagacccttaacatagctggatagtactgttgtacyggttgtacacctgacttaaaggtccattttgggtatagaaagaaatttgtcagaagggaattttttcttccttatctcagtgaggggctgatcctatttgtttgctttagttcttaccacttagaacttcgtggctaaatcatcttttgttcaaatctgagatccatctatatgaccttttggagagtaagttactctcttgaactagaagtttcttcttctgtaaactaggaata

SEQ ID NO: 941083 - DNA, 608 bp, Homo sapiens
tctcctgcctcagcctcccaggtagctgggactacaggcgcgcaccaccacgcctggctaatttttgtatttttagtagagatgggattttactatattggccaggctggtctcgaactcctgaccttgtgatctgcccacttctgcctcccaaagtgctgggattacaggcatgarccactgcacctggccccataaactctatattttacctgctatgtttattgtctgtcttccctgccagaatgtaggttccatgagggtaggggttttgtctgttttgtttctgctgtgaccccagcacctagaacaatgtctagcactcaaacagtatttgtggaatgaataccagcatgcttggtcagcatctgaagaataagtagatgcatgagcaaataaacacatggccatgtgttccctcatcccatcccaagaacccagctttgtagctgggcccactgcccttaccacatgtacccaagaccccagcacggagtctcagccatacttctctcttgccccaggtgtcaaatgtgggggtgtgctctcagcaccttctggaaacttctccagccccaacttccctagactgtacccctacaacacag

SEQ ID NO: 941084 - DNA, 675 bp, Homo sapiens
gagaacgaaaagactgcctcctcaagtgggtccctgacccctgagtagcctaactgggaggcaccccccaggaggggcagactgacacctcacacggccgggtgctcctctgagacaaaatttccagaggaacgatcaggcagcgacatttggtgtccaccaatatcccctgatctgcagcctccgctgctgatacccaggcaaacagggtctggagtggacctccagcaaactccaacatacctgcagctaagggtcttgactgttacaaggaaaactaacaaacagaaaagacatccacaccaaaaccccatctgtaggtcaccatcatcaaagaccaaaggtagataaaaaccacaaaggtggggaaaaaacagagcagaaaaactgaaaattctaacaatcagagcagctctcctcctccaaaggaacgcagctcctcaccagcaatggarcaaagctggacggagaatgactttgacaagatgagagaaggcttcagacgatcaaactactccgagctaaaggaggaagttcgaacccatgacaaagaagttaaaaaccttgaaaaaagattagacaaatggctaactagaataaccaatgcagagaagtccttcaaggacctgatggagctgaaaaccacagcacgagaactacgtgacgaatgcacaa

SEQ ID NO: 941085 - DNA, 629 bp, Homo sapiens
aagttagagcaactcagagcaacatagggagccttggggactgaaccccttttgctgcatcctactgtatctgccctgtgcacaaaaccccctggtttccgcacagccctgggttctgtctcctcctactctctgggcatatcctcctgtcagttcacacgtttgggggctggggggaggggctgtaatctcttgtgggcaggatcccagaggtccttggtaaatgtgggctgccccactgtcccttcactcacctcctaggagccattcggtgtgggcactagcccttgtatctggcaacactgcacagggttcccagcttcctgtctcttcagcctcagtgtccgcattgcctctctattgactctcagtatttactctccaaagatctrttcaaaatctattggttcacttggtatttttatctctcttggtgggagcagcctttctcctggctgcatctcgtctgctatcttgtttccctgtactgcgattttttgaagacttctgacttgatcatgatttattattcttttattataatgttacatttaatttgctaatatttaaagtttttgaatctgtttctaattaagagttacctatagcttgtttgtgtgtgtgtgagt

SEQ ID NO: 941086 - DNA, 646 bp, Homo sapiens
actccttatttgctataggctccgtcttgtattacactaagcccatgtcacccatttggctcctgcaggcctttgggtttgagaccctggtctacacacttggagaccacctgttgtaaagtacatggatgtgctttggtcaaggartagaccaaggtggatatccaggccagagtgactcagcgagtttaggtcacaggcgtatactccacttgttatataacctgcttgtgtaagttcatacttggctcaaagccactattgtttggaaaaggtataactgccctgctgacgctgtacagatgttcttgggctcggatgggcatggctccacgtggtgtgcactagcacccagagagagtgaagctattgacccctgtaagggagagtgaccatctggcagatagatagaggggagccaggacatggctcagcttgtgcccagagggagagttaagccgctgaccctgtagccagggagtgcacctgcaagcatgggggtggcaggagccacagagctggctgctgagaggagctgcagatctggagaagacagcctaggtaaaggtggacagtgtgagagctgctgatgagatagctgctgaataaaactacattttacctgcctatggcccgccaggttttc

SEQ ID NO: 941087 - DNA, 612 bp, Homo sapiens
ccctgcatttgggaggctgaggcaggaggattacttgtgcccaggaatttaaggttacagtagtgagctatggtttcgtcattgcattccagcctgggcaacagagtgagaccatatctctaaatacatatatatatgattactttggatttgagagtagagtcagagaatttagaggaaactaggctgtggttttcacacgatatttttcyttgttgcttttgcctttatgcaaagttttcctttgtctttggagagtagaaaaactgtggatttttttttttttgagacagagtctcactctgttgtccaggctggagtgcaatggtgcgatcttggctcactgaaacctctgcctcccgggttcaagcgattctcctgcctcagcctcccgagtagctgggataacaggcatgagccaccacgcccaactaattttgtatttttagtagagacagtgtttctccatattgatcaggctggtctcgaactcccgacctcaggtgatcagcccgcctcggcctcccaaagtgctgggattacaggcgtgagccaccgcacccggctgcaaaagacatactttataaaggtccaaggataatggaaatagaa

SEQ ID NO: 941088 - DNA, 742 bp, Homo sapiens
ctggacctggagcctcagcctgggggtcagtgttggctgctgctcctgcacaagtcagtgggcttctctgagcctcagtttcctcatctgtagaatggggattagaatgctacctactgggccaggcaccgtggctcacacctataatgccaacactttgggaggccaaggtgggtggattgcttgagcccaggagctcgagaccggcttgggcaacatagggagacccctgtctctacaaaagaatttaaaaaattagccaggtgtggtggcacgaacctgtgtttccagccacttgggaggctgaggcaggaggatcacttgagcccaggagttggaagctgcagcgagccacggtcgagctactgcactccagcctgggtgacagagcaagaccctgtctcaaaaaacaaaacaaaacaaaacaaaacaacaacaacaaaaaaaaaaamcccagaaaaccaagaatgttacctactgcgttggggtttttagaggatgaaattagatgatcaggagatgaaatgcgtagtgcagtactgggcctaataaatgtgcaacattattatttgaaaccagggcctgtgtgcatattggcagatgaggatcctgtctctagaggggtccaccccacctggccagatacacagtaaggaatgagccgagtgggagcaggggaagtttcaggtgattcttccatgaaatgatggacacagggcgctggcccagtgtctgtgctgga

SEQ ID NO: 941089 - DNA, 582 bp, Homo sapiens
ggcacgctggaaggcacacgcctgccaggcagggcagtctggcgcccatgatgggagggattgacatgtttcaacaaaataatgcacttccttacctagtggcccttcacacaacttttgaatctctaaaaatccataaaatccttaaagaactgtaaggctgaggacatgatcatcgaaattgagagtatgttattaatagaacccctgagcagaagtggctttgggagtctcccagcagggcaggrattcccactgaacccccaggcactaaggtggccagtctctggtagattggatacttctggggccgggagcccacttcctgctggggcagtccttcttgttgctggaagattttccttatcactcgaggcaaattctttctccatgtaattgccgctccctggtccaaaggctgccctttgaggacactcaaagccactgtcggccagttgcggtgcctcacccctgtaatcccagcacactgggaggccgaggcgagtggatcacctgaggtcaggagttcaagactagcctggccaacatggtaaaaccccgtctctgctaaaaatataaaaa

SEQ ID NO: 941090 - DNA, 561 bp, Homo sapiens
agtgcttctgcctgcagacatgactagggtacactgaggtggggaggcaggggaggtaaaagaaggcacgagctctccttcctgtaccctgctccagggggagaaacctccccagccatcatcagtgcagactggcagggggagggccaaacatttgcagggcggggacctgggcatcaggcatggcagaacccaggggcggccctgttgatggcagtcttcccttcttccttccaggtggcatttacaccctacgccccggagcccgggagcacatgccggctcagagaatactatgaccagacagctcagatgtgctgcagcaaatgctcgccgggtgagggcagccacgggggcactcggggcccatgccctggaggagcgtgtgtgtacaggggctggggcgcaagagcatrgcccttgattcttactgaactcctagttctatgcactggcccatgctccctgctgcttctgggcctgtgaacatgctgttccctcttcctggcacacttcccaactccctttccctgattaactccaacttgccctttagacctc

SEQ ID NO: 941091 - DNA, 601 bp, Homo sapiens
agtaagatctaaaggagtggaatggtctgggtttcttgaacatttgaaacttccttccagggtagtcactcactgaggacaaactgttgagagcaggacccaaactgagcagtataaagacaagggaaagagaaggtaaagataaaagtggaagaagtgcctagaggtaagagatctcagagaacaagctgctgtatgttttgaaaactgcatgaaaacraaaggagaaggtgctgtaaagcctaaagttggaaaagttagtaaaactatactgaactatatcccgattaaaagttgaaaagatgctgagcgtgttggctcatacctgtaatcccagcactttgggaggctgaggcaggtggatgacctgtcaggatttcaagaacagcctggtcaacatggcaaaaccccgtctctactaaaaatacaaaagattagctgggagtggtggtgggagcctgtaatcccagctactcaggaggctgaggctggagaattgcttgaacccaggaggcggaggcttcagtgagctgagatctcaccattgcactacagcctaggtgacaagagtggaactctgtctcaaaaaataaaaaaagtt

SEQ ID NO: 941092 - DNA, 570 bp, Homo sapiens
ggcagcaatatttgctgttctgcagcctctgctggtgatacccaggcaaacagggtctggagtggacctccagcaaactccaacagacctgcagctgagggacctgactgttagaaggaaaactaacaaacagaaaggaatagcaccaatatcaacaaaaaggacatccacaccaaaacccaatctgtagttcaccaacatcaaagaccaaaggtagataaaaccacaaagatggggagaaaccagagcagaaaagctgaaaattttaaaacccagagtgcctcttctcctccaaagaatctcagctcctggccagcaatggagcaaagctggacggagaatgactttgacragctgacagaagtaggcttcacaaggtcggtaataacaaacttctccaagctgaaggaggatgttcaaacccatcgcaaggaaattgaaaaccttgaaaaaagattagataaatggctaactagaacaaacagtgtagagaagaccttaaatgacctgatggagctgaaaatcatggcacaagaactacatgaggcacgcacaagcttcaatagccaa

SEQ ID NO: 941093 - DNA, 741 bp, Homo sapiens
ccctgtgagtgtgcctgtgcggggcagccgcggggccaagtgctcgcgcctgtcccggctgcggatggcgctgggccccgcggggtgcagctccttccgggataaacccgggcgcagtccttccgacgcccgggctgccgtgccacattcaccttcatccggtgcgcctgaatccgacgtgcaccgcccccctgcggatggtcccaattcacctacctgccccccttcccctctctccgtctgatatttccttccccttctcccaggtaacgcccccgagtccccaccagcactgattctggaacaccctctcccctacctgcgaaacaccccgctacccgacagaaaccaccatgcttgccccctcagctctgcaccgccctcctcttagggatgccttccccaggggtctcccccacggacctgtcccttcctctctacattctttacgggggctgactgccctcatccatcccactgtccccctaaggccgcacaacctgcctgcgatacctcctgctcggcctgctcctcacctgcctgctgttaggagtgaccgccatctgcctgggagtgcgctgtgagtaaggctgwccctacttcccacttacaccgaacgactttcgtcccgactctcgccccaaagctgatcttcctcagcagggatcatagtcactaccaccacctccttagctttgggtttggtttccagccagggctgttgtcttcctgaattgtcct

SEQ ID NO: 941094 - DNA, 620 bp, Homo sapiens
tctatcagacattcaaagaagaattggtaccaatcctattgagaaagaaatcctccctaattcattctatgaagccagtatcaccctaataccaaaaccagcaaaggacatattgaacaaacaaacaaacaaacaaaaacactacagactgatatccctgatgaacacagatgcaaaaatcctcaacaaaatactagctaactggatccaacagcatatcaaaaagataatccaccatgatcaagtgggtttcatacccaggatgcagggatggtttaacatacttaagtcaataaatgtgatacatcataattaaaaacaaaatcacatgatcgtctcaatagaagcggaaaaagcatttgacataatgtagcattcctctatrattaaaatcctcagcaaaattggcatagaaaggacatacttgaaggtaataaaagccatctatgacaaacccacagccaacattgtactgaacagaaaaaagttgaaagcattccctctgagaactggaacaagacaaggatacgcactcactttaaccacttcaattctgcatagaaaggaagtgcttaccagagcaatcagacaagagaaagataaaaaagggcatccaaatt

SEQ ID NO: 941095 - DNA, 653 bp, Homo sapiens
atttactacaaagtaactaaagagcccttgggctttagtgaacatcagcggtaccccggcagtactccctatggacttgtggtggtgagggccatggagaaagactcctctgcctgtggaaagggaagggaagagtgagaaggactgtgtcttgtggtttgagtgccagctcaggtgtagtagaataaagaagtatatttctaaggtttctgactatagatactggttcccagatggcatctctggaaccacccagggcccagggggaactcactactcttaagggaacaacacaagcctggctggcttcaccacctgctgattatgcagccctagggccttgaacaaacataggcggtagccaagtagtgattacagtggaccttgcacaagcctcagtcagtgstggcttcaggtctgacccaccatggctccagtgatggtggccacatgcatgcttgtgtcacccctccaccagttccaggcagctcagcacacagagaatgactcaattgtttgggaaaaagtaagggaagagaacaagaatctctgcttggtaatctggagaattcttctgaatcttatccaaggccaccaaggtggtaccttgtctgcaagaaccacagcattactgagctttgggtactccctaa

SEQ ID NO: 941096 - DNA, 607 bp, Homo sapiens
cagaggtcacttactaattgctgactaagtaccttaagaagagttcagaaaaaaatacttattcaaggccttgattaatagggtgtatgatactgttctcacagtcttggtggggataatcagaccaagaaaatactgaagtctcaataatgttttaaatattcattgtattataaagatttaaatagccaagctctattgttactgaaacatcaggggtatcgtctaggtcctgctgcttgctgcacagaaagccaatcactaaaaggacaggttttgccaaggaagaaggctttaatcaggtgctgcagccaaggaggtgggagctcagtctgaaatccatctccctcactgactaaaactaggggcwtatatataaggaaagaaatgtaacaatgtgtaagaaaaccagaactagggagaggcaaggaggcatctggggccatgatttagtgagttttggttctttgatacttttttcaagaggcctgaaggtcctttcctgaggaaggacttcaggtaaaacaaacgcaaatttcaagctttgatagcaggaggtaaatttctatgtttatccaaaagaggagtccatgagagtattggccca

SEQ ID NO: 941097 - DNA, 613 bp, Homo sapiens
acccagagtcaagagacgacagaaaaatgccctcagtggttagtggtgttttaggatgggagttcttgtcggtttcatgttattctacttccctgccctcatccaggcagggttatttctatactgggagaaaaaaacaaacccgtttcatcccagggagcagccgtcctgggcacacatccttccctggtgaaatgagaccggacctgcagcagctggtacaggggaggcccrtaactgccaggctgagcctcagtttccccacctggtaaagcagggacgatcatcctaaccgggagagcaccagagggtaggcctgcacagaatgaggaaccagagagacactggtggcgttcgagagagtcctgggtaccccgggcaggtggggagctgggtggggagctgggcaggtgggtgggtgctgcagtctgccctttttgtgactgcaaacaggtgcgcccaggactggagttcagctccctgctgaagtaccagctctggcccagctttcctgcttgaggacggccgggtttcctgcctggcctgtcccccacagagggctctgtcccaggccctggcaggggcagcctccctcccactgggctcccgcctg

SEQ ID NO: 941098 - DNA, 613 bp, Homo sapiens
acccagagtcaagagacgacagaaaaatgccctcagtggttagtggtgttttaggatgggagttcttgtcggtttcatgttattctacttccctgccctcatccaggcagggttatttctatactgggagaaaaaaacaaacccgtttcatcccagggagcagccgtcctgggcacacatccttccctggtgaaatgagaccggacctgcagcagctggtacaggggaggcccataactgccaggctgagcctcagtttccccacctggtaaagcagggacgatcatcctaaccgggagagcaccagagggtaggcctgcacagartgaggaaccagagagacactggtggcgttcgagagagtcctgggtaccccgggcaggtggggagctgggtggggagctgggcaggtgggtgggtgctgcagtctgccctttttgtgactgcaaacaggtgcgcccaggactggagttcagctccctgctgaagtaccagctctggcccagctttcctgcttgaggacggccgggtttcctgcctggcctgtcccccacagagggctctgtcccaggccctggcaggggcagcctccctcccactgggctcccgcctg

SEQ ID NO: 941099 - DNA, 613 bp, Homo sapiens
acccagagtcaagagacgacagaaaaatgccctcagtggttagtggtgttttaggatgggagttcttgtcggtttcatgttattctacttccctgccctcatccaggcagggttatttctatactgggagaaaaaaacaaacccgtttcatcccagggagcagccgtcctgggcacacatccttccctggtgaaatgagaccggacctgcagcagctggtacaggggaggcccataactgccaggctgagcctcagtttccccacctggtaaagcagggacgatcatcctaaccgggagagcaccagagggtaggcctgcacagaatgaggaaccagagagacactggtggcgttsgagagagtcctgggtaccccgggcaggtggggagctgggtggggagctgggcaggtgggtgggtgctgcagtctgccctttttgtgactgcaaacaggtgcgcccaggactggagttcagctccctgctgaagtaccagctctggcccagctttcctgcttgaggacggccgggtttcctgcctggcctgtcccccacagagggctctgtcccaggccctggcaggggcagcctccctcccactgggctcccgcctg

SEQ ID NO: 941100 - DNA, 594 bp, Homo sapiens
tctagtatttttatagtgttaggtctataagtctttaatctatcttggttaatttttgtatatggttagagataggagtccagtttcattcttcaacatacggctagccaattttcccagcactatttattgaacagggtacccttttcccaggtatgtttttgtcaactttgtaaaaagatcagttggctatagttatgtggctttatttctgtgctctctattctactccaytgatctaggtgtctatttttgtactagtaccagctgttttggttaccttacccttgcagtataatttgaagtcaggtaatgtgatgccgccagatttgttctttttgcttaggattgctttggctatttgggctcttttttggttccatatgaatttacttttttttaattcctgaaaaatgatattggtattttgctgggattgcatcgaatctgtatattgtttcgggcagtacggtcatttaactatattgattcttatgatctgtaagcatgggatgctttttcatttgtttgcgtcatctacaatttctttcatcagtgttttgtagttttccttatagagatttttaaccccct

SEQ ID NO: 941101 - DNA, 594 bp, Homo sapiens
tctagtatttttatagtgttaggtctataagtctttaatctatcttggttaatttttgtatatggttagagataggagtccagtttcattcttcaacatacggctagccaattttcccagcactatttattgaacagggtacccttttcccaggtatgtttttgtcaactttgtaaaaagatcagttggctatagttatgtggctttatttctgtgctctctattctactccactgatctaggtgtctatttttgtactagtaccagctgttttggttaccttacccttgcagtataatttgaagtcaggtaatgtgatgcckccagatttgttctttttgcttaggattgctttggctatttgggctcttttttggttccatatgaatttacttttttttaattcctgaaaaatgatattggtattttgctgggattgcatcgaatctgtatattgtttcgggcagtacggtcatttaactatattgattcttatgatctgtaagcatgggatgctttttcatttgtttgcgtcatctacaatttctttcatcagtgttttgtagttttccttatagagatttttaaccccct

SEQ ID NO: 941102 - DNA, 630 bp, Homo sapiens
ccagatatggtgtgtgatcaatgagtatttgttgaaggaattgtatggcaaaggcatctcttccatagacatttatgtggcccatcccactatctcagtagtgtctgagatgggcagctcccaccttatcctcaatgttcccaaccccagccccgccaccaccacaagmaatcgctgttttaatctccaccatctaagaagtggcaggacttccagtgtaacagacaaaggccatgtatagaatttctacagcgaaaggcatttggcaaaaaacctactatttgaaatgtctctagtcttaaatccatcgttgggatgaagggcaagtatattagtccattttcacactgctataaaggaataccagagactgagtaatttataaaggaaacaggtttcattgactcacagttccacatggctgaggaggcctcaggaaacttacaatcacagcggaaagggaagcaggcaccttcttcacatagcagcaggagagagaagagaaagcaaaggagaaagagcctttcgtgaaaccatcagatcaaatgagaactcactcacgatcatgagaacagcatgggggaaaccgcccccataatccaatcacctctcagtaggtccctccctact

SEQ ID NO: 941103 - DNA, 551 bp, Homo sapiens
cattaggttctgagcttttcttcaatgagagacattttatcacagattcaatcttcttattcattattgttctgctcagatattctatttctttatgattcagttttggtaggttgcatttgtctaggaatgtatccatttcttctaagttattcaatttgttggcaaatagttgttcatagtaggctcttatggttctttgcattcctgtggcatcagttgtaatgtttcctgttttatttctgatcttatttactgagtcttttcttagtctagctaaaggtttgccagttttgttatctttacaaaaaaaaaactgtagtttttttgttgttgttgtttcattgtattgtttttcaagtttctaattcatttatttctkctctggtctttattttcttccttctgttaactttgggattagtttctttttttctggttatttgagatacaatattaggttgttaatttgagatcttcttttttgatgtaggcatttattgctataaattttgttcttagaattgcttttgttgcatcctgtaagtttg

SEQ ID NO: 941104 - DNA, 610 bp, Homo sapiens
atggtgcattgctaatgtattattgctaatggtgacatgttaagtattttaaagattccagtaaacgcaatgcagggatttttaaataagactctatggtagcctattaaaaagaaaggtatctccatgaagaaaagttaatgacatttggaaactgatttgtggagtgaaaatgcagaatttctgtagaaatgggtgactcataaagggtartaagaacccatgataaattgaagaagaatccttattgcgggaaatatcaagcttgaaagctttgcaagtaaaaggaagagaaaacagaaaagaaagacaagcagaaagcaacccaagtcttgctaaagtgtatagacataggcaactctgctcagcgaagccaaatgaagccagggtgctcagggccaacagagcactttatgtaaagggccaggagatggagagtgaactttgaaacactcacttaccagaaaatccaagaaggtcctagtcggtaaacataagctctttttcatcagtaaatgcattttgtatattcttattactcatgagactagcgtactgttaacctacagaaataacttatgttttattattattatactacaattaatta

SEQ ID NO: 941105 - DNA, 577 bp, Homo sapiens
ggagaagcaaattgtggtatatccttataatgaaatgttatttgcccataaaagtaagtaaaatactgatttgtgttataatatggacgaatcttgaacatgtactaagtgaaagaaactaggttcaaaaggccacttactgtatgatttcatttatataaaatgtccataattggcagatcaatagagacagaaagtggatgagtgctttccaaaggctgggggtggtttgagggtggggagcggctgctaataggtacggggtttcttttggggggtgataaaagggttccaagtatccaagattagataaattgtggtgatggttgtgcaaccctaragtatactaaaaactacttaagagtagaaatgaaacttcagaaactttaaagagtgttgagaggctgggtgcagtggctaacgcctgtaatcccagaactttgggaggctgaggtgggtggattgcttcagccagaagtttgagaacatcctaggcaacatgcaaaaccctatcttcacaaaacaaaaaaatacaaaaattagccaggcgtggtggcgcctggtcccagctatttga

SEQ ID NO: 941106 - DNA, 554 bp, Homo sapiens
attcaactgattctcgtgcctcagcctcccgagtagctgaaattaccagcacatgctaccatgtccagctaatttttgtatttttagtagagacgatgttttgctatattggccaggctggtctcaaactcctgacctcaagtgatctacccaccttggcctcccaaagtgctgggattagaagagtgagccaccatgtctggcctaacttttgtatttttagtagagacagggtttcaccatgttggcaaggatggtctcaaactcctgacctcaagtgatccacctgcctcggcctcccaaaatgctgggattaaaggcataagccaccaygcccagcacaacatacatttttaactcaacaaagactaccttcaaatcagacagaaatctgtcttacgacagaatacttctagttccctttcctattcttcatgttattgttgtcatacctgtacttgtacacattttacaaatgctataatacattgctataatttctacttttaaatgtcaattctcatttaaataaatttaaaaatacagaaaaggtt

SEQ ID NO: 941107 - DNA, 577 bp, Homo sapiens
aagctatctagaggcccaccaagagtagactcattagaacaaaagacacttttattacccttatggctcaggaaattccaagggttttaagacctctgtgccaaaactcagggacaaagaccagatatctttctgtgataccacatctgcccttaccatctcaaattgtaaagtttctttcacaattatttctccttttccaaatattgatcacattccaggcgctcatgaaaccacattactctyttaactggtctctctgcattcatctggtttatcccctttgatatggtttggatttatgtccttgcccaaatctcatgtcaaattgtaatccacaatgttagaggaagggcctggtggcaggcgactggatcatcgggcggatttcccccttgctgttctcatgatagtgagttctcaggagatctggttgtttaaaagggtgtagcacccccgcttcgccctcttcctcctggcgccagccatgtaggacgtgcctgcttcccctttgttttccttccaccatgactgtaagtttcctgaggcctccccagccatgtttcctgtacggcct

SEQ ID NO: 941108 - DNA, 577 bp, Homo sapiens
aagctatctagaggcccaccaagagtagactcattagaacaaaagacacttttattacccttatggctcaggaaattccaagggttttaagacctctgtgccaaaactcagggacaaagaccagatatctttctgtgataccacatctgcccttaccatctcaaattgtaaagtttctttcacaattatttctccttttccaaatattgatcacattccaggcgctcatgaaaccacattactctcttaactggtctctctgcattcatctggtttatcccctttgatatggtttggatttatgtccttgcccaaatctcatgtcaaattgtaatycacaatgttagaggaagggcctggtggcaggcgactggatcatcgggcggatttcccccttgctgttctcatgatagtgagttctcaggagatctggttgtttaaaagggtgtagcacccccgcttcgccctcttcctcctggcgccagccatgtaggacgtgcctgcttcccctttgttttccttccaccatgactgtaagtttcctgaggcctccccagccatgtttcctgtacggcct

SEQ ID NO: 941109 - DNA, 621 bp, Homo sapiens
ctccctgagtggtcaaaaactgaatatatttgtatcccatgtgagtgctcaccaatgggtgacctctgcaagggaagacttaaataaacaagtggagaggatgacccattctgtgaataccacccaacctctttccccagccacccctatgattgcccaatgggcccatgaacaaagtggccatggtggcagggatggagkttatgcatgggttcagcaacatggacttccacttaccaaggctgacctggctatagccactgctgagtgcccaatttgccagcagcatagatcaacactgagccctcgatatggtaccatttctcagggtgatcaggcagctacttggtggccagttgattatattgaacctgttccatcatagaaagggcagaggtttgtcctcactggaatagacacttattccagatatgggtttgcctatcctgcatgcaattcttttgccaagactaccatctgtggaatcatggaatgccttttccactgtcatggaattccacacagcattgcctttgaccaagtcacttactttatggctaaagatgtgtggcagtgggttcatgctgttgatattcactggtctcaccatgttccccatca

SEQ ID NO: 941110 - DNA, 638 bp, Homo sapiens
gagcaaatggggagatgccccttatgaaaccatcagatcttctgagaaatcacttactatcatcagaaaagcatgggagaaaccgtccccatgattcaattgtctcccactgggtctctctcacatatgtggagattatgagattaaaattcaagatgagatttgggtggggacacagagccaaaacatatcattttgtttctggcccctcccaatctcataaactcacatttcaaaacacaattatgccttcccaacagtctcccaaagtcttaactcattccaggcttaacccaaatgccaggtccaaagtctcatctgagactaggcaagtcccttccacttatgagcccgtgaaataaaatgcaagttagttaagtcttagatacaatggaggtacaagcatttggtaaatataaccattccagatcagagaaaatggtcaaaacaaaggggctacaggccccatgcmagtccaaaatccaatagggcagtcattaaaccttatagttacaaaacgatttcctttgataccatatctcacttccaggtcatgctgatgtaagtggtgggctctcatggcttttcacagctctgcccctgtggctttgcagggtacagccccactcctagctgcc

SEQ ID NO: 941111 - DNA, 622 bp, Homo sapiens
aatggttaactgcagaacaacatttttctttttctttataataaggcaattttcacataacataaagtccacaattttaaccattttaaagtatacaatgcagtaaacttttgttcattcacaatgttgtacaatcatcaccacaatctaattccagaatattttcatcatcccaaaagaaaccctacacccattaagcaatcacctctcttctctccacccacctccagtcaatcgttcatttgtttkctgtctctatggatttgcttatgcttgacctttcatagaagtggaatcatacaatatgtggtctttcatgactggtttatttcacttagcatgatgttttcaaggtttatctatatatctatatggtggtatgtattaacatcaatactttattgcttgtatagctgaataatattccattgcatagataaaccaccttttatttttccattcatcaggtgatgagtatttgacttgttccattttctggctattatgaataaactgatatgaacatgtgtataacaagcttttgtttgaaaatgtattttcaattctcatatgcctaggagtgaaattgccgggtcatatggtaatggtatgtttaacttct

SEQ ID NO: 941112 - DNA, 622 bp, Homo sapiens
aatggttaactgcagaacaacatttttctttttctttataataaggcaattttcacataacataaagtccacaattttaaccattttaaagtatacaatgcagtaaacttttgttcattcacaatgttgtacaatcatcaccacaatctaattccagaatattttcatcatcccaaaagaaaccctacacccattaagcaatcacctctcttctctccacccacctccagtcaatcgttcatttgttttctgtctctatggatttgcttatgcttgacctttcayagaagtggaatcatacaatatgtggtctttcatgactggtttatttcacttagcatgatgttttcaaggtttatctatatatctatatggtggtatgtattaacatcaatactttattgcttgtatagctgaataatattccattgcatagataaaccaccttttatttttccattcatcaggtgatgagtatttgacttgttccattttctggctattatgaataaactgatatgaacatgtgtataacaagcttttgtttgaaaatgtattttcaattctcatatgcctaggagtgaaattgccgggtcatatggtaatggtatgtttaacttct

SEQ ID NO: 941113 - DNA, 707 bp, Homo sapiens
agcacctgttatatggcaattgattaacaaatagttgctgaacaaattatctaatttttcagataagaaaattgaagcccagaagatggaaacactaagaggtaagaaactgaagcaattgcttaaaaaaataaaaactcctctaaattgttttccacagtggccgaactaatttacattcccaccagcagtgtataagcattcgtttttctctgtaaccttgccaacatccattattttttttactttttaataatagtcattctgactggtgtgagatggtacctcactgtggttttgaattgtatttctctaatgattagtgatgtagagcattcttgcatatgcttgttggccaagtgtatgtcttcttttgataagtgtctgtttatgccctttgcccatttttaaatggggttgttttctgcttgttgatttgcttaaattccttgtagattcagaacttaaaacagaactaccatttgacccagcaatcccattactgggtatataccctaaggatataaatcattctaccaagaagacgcatgcacttgtatgtttatcacagtaccattcacaatagcaaagacatggaatcaacctagatacccatcaacggtggactgaattttaaaaaaaatgtgttacatayacaccatggaatactacacagccataaagaaataaatcatgtcccttgcagc

SEQ ID NO: 941114 - DNA, 626 bp, Homo sapiens
aacaattccgtttaattttttgacccgcattgggaaaaagccagttgattctcttaacgggcaaggtcattgaaaactaaaaaagccctaactcgtttaatgttcatttttccatgttatcaattctgggtaaaacaatagtcatgctgtccattgcaaattacctttcaggagccagaagtccgcatggaaggagcatgctgcttagaggacaaaggaaacaatgcctgcagaggacattctggaagggagagggaaataaagaattagaacttcacggccaggcrtggtggctcacacctgtaatcccagcactttgggaagccaaggtgagcagatcacttgaggtcgcgagtttgagaccagcctggcaaacatggtgaaaccctgtctctactaaaaataccaaaataagctgggcgtggtggcaggcccctgtaatcccagccactcagaagactgaggcacgagaatcacttgaacccaggcggcagtggttgcagtgagcagagatcgcaccattggactccagcctgggcgacggagtgagactctctcaaacaacaacaacagacccttcacaaccaccaaggaaaaggtgtggtttggatttgctgcatacaatg

SEQ ID NO: 941115 - DNA, 624 bp, Homo sapiens
ttcagctgtgacaacccaggaacaattccgtttaattttttgacccgcattgggaaaaagccagttgattctcttaacgggcaaggtcattgaaaactaaaaaagccctaactcgtttaatgttcatttttccatgttatcaattctgggtaaaacaatagtcatgctgtccattgcaaattacctttcaggagccagaagtccgcatggaaggagcatgctgcttagaggacaaaggaaacaatgcctgcagaggacattctggaagggagagggaaataaagaattagaacttcacggccaggcgtggtggctcacacctgtaatcccagcactttgggaagccaaggtgagcagatcacttgaggtcgcgagtttgagaccagcctggcaaacatggtgaaaccctgtctctactaamaataccaaaataagctgggcgtggtggcaggcccctgtaatcccagccactcagaagactgaggcacgagaatcacttgaacccaggcggcagtggttgcagtgagcagagatcgcaccattggactccagcctgggcgacggagtgagactctctcaaacaacaacaacagacccttcacaaccaccaaggaaaaggtgtgg

SEQ ID NO: 941116 - DNA, 579 bp, Homo sapiens
gttcaagaccagcctggccaacatggtgaaaagccgtctctactaaaaacacaaaaattagctgggtttggtggcatgcacctttaatcccagctacctgggaggctgaggcaggagaattgcctgaacccaggaggtggaggttgcagtgaaccaaggtcacgccacttcactccagcctgatgacagagcaagacttgcctcaaaaaaacaaaaaacaaaaaaaaagagtttgggagagattttatgacactgaaagcacaatggataaaatgttagactgatccaaacttagargtagggcaattcattcaggctttgaaaagatgctcactcatattttaaattatagcatgagaagaaaaatgcaagcactgttgaaaaggtgttttgaaacaaagaaataaaacactttaattctcagtgtttgtaatggtttacattaccatgcactaaataaatactagtttttatagtttttattttcttatttataaccaacagtgagataattattaatgttttgacaaaaattgttaaagatcacagaacaagtataactcttcccatggattattg

SEQ ID NO: 941117 - DNA, 486 bp, Homo sapiens
tccctcccctgtaaaggcattttgccccctttttaattaagaatgaatctgttgagggtgcgaggccaggatggctgactagaagcagcggtgatgggaggcccccatcgaaaagaaccataacagcgtgccaatcctgcaccagcaaccaaggtatccaagttctgtcatcagaactgactaggtggctggcatgacccacggagaggaagaaagagtggcgtggtgcagcagcccacctgacagccacatgaagcaggggagcccccaccccccagctaagggaggcagtgagtgagcatgctacctacctggaaaaacatgctttttctayggaactgtgcaacccacagattggaagatcccactcgtgagcccacatcaccagagcctagggtcctaactacggagccttgcagagtctcaacagccactaagctagaatctgcttaagcctgttgagctcccggagggaggggtgaccag

SEQ ID NO: 941118 - DNA, 693 bp, Homo sapiens
gtaacaagtgatgatagggcagattcccttgaccagatggcagatagattacactgggccgctgccaaaatcgcagggatacacacatgtgctgatgtctgtagacacggccactggcctgttgttcacctaccttgtagggtggctgaccgacaacataccattcaggacctgcaacacttgtgtgctctrtatagttgccacttagccattgaaagtgatagaggaacacatttcactggacagcagataaacagtgggcatggcagacggacatatagtggggatttcatgttccatataatccacaggctgctggcatgattgaacaatataatggactcttgaaaagtgggttacacttgcatgttactcccccgtctttgcagggctggagttcaagtttggacctggtgctccagaacttgaatgagcggccatgaaaaggtggcccagccatggtggagatactgctacaccaggctgctgcctccattcagttacagatgcacaccaaggatgacctcctccaaccaggtatggggacaaacagtaatctattgttgcctgccccaacacccctaaaggtaagagaacaaaaaacctggctttggccatgggccctcaaagacccccactgcaagtggttggccatcgtagccccctgggagaaaggtctacagtatgatttac

SEQ ID NO: 941119 - DNA, 605 bp, Homo sapiens
ataaacagtgggcatggcagacggacatatagtggggatttcatgttccatataatccacaggctgctggcatgattgaacaatataatggactcttgaaaagtgggttacacttgcatgttactcccccgtctttgcagggctggagttcaagtttggacctggtgctccagaacttgaatgagcggccatgaaaaggtggcccagccatggtggagatactgctacaccaggctgctgcctccattcagttacagatrcacaccaaggatgacctcctccaaccaggtatggggacaaacagtaatctattgttgcctgccccaacacccctaaaggtaagagaacaaaaaacctggctttggccatgggccctcaaagacccccactgcaagtggttggccatcgtagccccctgggagaaaggtctacagtatgatttacatgtcactccttgggtacttgatatatagtatccacaattgaccattcatgggggaacaaccaagaaaagaaccctcctgtagggcacatatgtgctgtctgtgtagcctattataagctccccagtaactttagcatgaatacagaaccgaaaggaacca

SEQ ID NO: 941120 - DNA, 605 bp, Homo sapiens
ataaacagtgggcatggcagacggacatatagtggggatttcatgttccatataatccacaggctgctggcatgattgaacaatataatggactcttgaaaagtgggttacacttgcatgttactcccccgtctttgcagggctggagttcaagtttggacctggtgctccagaacttgaatgagcggccatgaaaaggtggcccagccatggtggagatactgctacaccaggctgctgcctccattcagttacagatgcacaccaaggatgacctcctccaaccaggtatgggracaaacagtaatctattgttgcctgccccaacacccctaaaggtaagagaacaaaaaacctggctttggccatgggccctcaaagacccccactgcaagtggttggccatcgtagccccctgggagaaaggtctacagtatgatttacatgtcactccttgggtacttgatatatagtatccacaattgaccattcatgggggaacaaccaagaaaagaaccctcctgtagggcacatatgtgctgtctgtgtagcctattataagctccccagtaactttagcatgaatacagaaccgaaaggaacca

SEQ ID NO: 941121 - DNA, 605 bp, Homo sapiens
ataaacagtgggcatggcagacggacatatagtggggatttcatgttccatataatccacaggctgctggcatgattgaacaatataatggactcttgaaaagtgggttacacttgcatgttactcccccgtctttgcagggctggagttcaagtttggacctggtgctccagaacttgaatgagcggccatgaaaaggtggcccagccatggtggagatactgctacaccaggctgctgcctccattcagttacagatgcacaccaaggatgacctcctccaaccaggtatggggacaaacagtaatctattgttgcctgccccaacacccctaaaggtaagagaacaaaaaacctggctttggccatgggccctcaaagacccccactgcaagtggttggccatcgtagscccctgggagaaaggtctacagtatgatttacatgtcactccttgggtacttgatatatagtatccacaattgaccattcatgggggaacaaccaagaaaagaaccctcctgtagggcacatatgtgctgtctgtgtagcctattataagctccccagtaactttagcatgaatacagaaccgaaaggaacca

SEQ ID NO: 941122 - DNA, 646 bp, Homo sapiens
ggaacgcagtgttgtacctttattccagacaatcaacaaaacataacagcagccttacaagggatgtcacaggagattaaaacagttgagagccttactgacaatcctctacagagatggtgggcgtgcctgggctctggcctatgttaggccctgataatcataggcagcatagcagaaacattagtcrtaggttgctgctccctgtattgttgctgtggcctatgggtccagggtgctgccttatgggcacgtttccccactaagaggacaccctcggcttaggggttggagtgtaaggaaactggctgtgcagcagtcaagagtaggcccaggtaaatatccagtgcagcatgacccagcaggattggagtgcaggcacacaatcttgtgcattatatagtcacagttatgaaaccatgttatgcgtgggctcgtcacctgactctgagccactattgtctgtgaggtgcataaatgtatcaccgacactgtgagagtggcagtgcgtaataaaaccatgtcccgcctgcctatggccccccaagtgttctttcaactacccgcccaccaactccccttggacctcagctcaggttggaacctgacaggatgtcaaagcaaagatggggtatatgaaagtgga

SEQ ID NO: 941123 - DNA, 646 bp, Homo sapiens
ggaacgcagtgttgtacctttattccagacaatcaacaaaacataacagcagccttacaagggatgtcacaggagattaaaacagttgagagccttactgacaatcctctacagagatggtgggcgtgcctgggctctggcctatgttaggccctgataatcataggcagcatagcagaaacattagtcataggttgctgctccctgtattgttgctgtggcctatgggtccagggtgctgccttatgggcacgtttccccactaagaggacaccctcggcttaggggttggagtgtaaggaaactgsctgtgcagcagtcaagagtaggcccaggtaaatatccagtgcagcatgacccagcaggattggagtgcaggcacacaatcttgtgcattatatagtcacagttatgaaaccatgttatgcgtgggctcgtcacctgactctgagccactattgtctgtgaggtgcataaatgtatcaccgacactgtgagagtggcagtgcgtaataaaaccatgtcccgcctgcctatggccccccaagtgttctttcaactacccgcccaccaactccccttggacctcagctcaggttggaacctgacaggatgtcaaagcaaagatggggtatatgaaagtgga

SEQ ID NO: 941124 - DNA, 646 bp, Homo sapiens
ggaacgcagtgttgtacctttattccagacaatcaacaaaacataacagcagccttacaagggatgtcacaggagattaaaacagttgagagccttactgacaatcctctacagagatggtgggcgtgcctgggctctggcctatgttaggccctgataatcataggcagcatagcagaaacattagtcataggttgctgctccctgtattgttgctgtggcctatgggtccagggtgctgccttatgggcacgtttccccactaagaggacaccctcggcttaggggttggagtgtaaggaaactggctgtgcagcagtcaagagtaggcccaggtaaatatccagtgcagcatgacccagcrggattggagtgcaggcacacaatcttgtgcattatatagtcacagttatgaaaccatgttatgcgtgggctcgtcacctgactctgagccactattgtctgtgaggtgcataaatgtatcaccgacactgtgagagtggcagtgcgtaataaaaccatgtcccgcctgcctatggccccccaagtgttctttcaactacccgcccaccaactccccttggacctcagctcaggttggaacctgacaggatgtcaaagcaaagatggggtatatgaaagtgga

SEQ ID NO: 941125 - DNA, 638 bp, Homo sapiens
tgggggaaatgaggagtgactgctaatgggtatgcagtttccttttggggtgaagaaaatgttctaaaatgaattgtggtgatggccacacaactctgtgaatatacagtactaaaagccactggttgcacacttttattgtatggtatatgaattatatctcaataaagctgttttwaaaaaaaagatcacatcgtagagtctgtagtcagaaagtgtggattcaaatccatgctccaccctttaccttgggcgagttacttaatttctccttgcctcagtttcctccatctgtaaagcagaggcagtagcagtaacaagacccacctctctaaggttgttgtgagaatttaatcagacagtgcatgtagagaaatcaaggtaatgcctggcacatagtacatgctcaattttagctattatcaatatcattattaatagactcattttacagaaaggacactgaagtcagaagtaaagtaagttgattgaggtcatacaagtaaaaagtggcagaggacagattctaactcaggctggtgtgactagaaagcttatatcctttccactgaagaaccttgcctctccactatacacctattgtgccttccaaaacctactagtgactgatcactggc

SEQ ID NO: 941126 - DNA, 647 bp, Homo sapiens
tccatctcaaaaaaaaaaaaaaaaaaaaaaaaagagagagagagagaattcagacatattgtaaagtatagaaaaggaaatgaaaatctctagttatcctatgattcaaagctcagatacaaccattatttgtttttggtgattttttttgtactcaactactagtatttgctatgcagctccttccccctttcatctaggaaaggtttccccacccttcctttgggaaatgtcctctccctgccagtgctcaggctggtggtgcagagattgactcactctcagctctgtggttgggtcctcaatggtttaagtcaatcatcatagcccactgycctggccaaggaatttggttcgggatcagtcatgccacccaagccagtccaattaaagtgacattcatgtctgtttctaggatgttgaagcaaagatattctctactccccctgaatgaggaaatatgtagccctaggaactgttgaccaccaccttgggatcatgagaggtgaagcaacccccaagcatgcagaagagacagaaagaaaccagcccctctgagacattattgagcccctggaagcctcaacttttcagtttcatgatcaataacttcctgtattattaaatgagctttgagacgggttttc

SEQ ID NO: 941127 - DNA, 647 bp, Homo sapiens
tccatctcaaaaaaaaaaaaaaaaaaaaaaaaagagagagagagagaattcagacatattgtaaagtatagaaaaggaaatgaaaatctctagttatcctatgattcaaagctcagatacaaccattatttgtttttggtgattttttttgtactcaactactagtatttgctatgcagctccttccccctttcatctaggaaaggtttccccacccttcctttgggaaatgtcctctccctgccagtgctcaggctggtggtgcagagattgactcactctcagctctgtggttgggtcctcaatggtttaagtcaatcatcatagcccactgccctggccaaggaatttggttcgggatcagtcatgccacccaagccagtccaattaaagtgacattcatgtctgtttctaggatgttgaagcaaagatattctctactccccctgaatgaggaaatatgtagccctaggaactgttgrccaccaccttgggatcatgagaggtgaagcaacccccaagcatgcagaagagacagaaagaaaccagcccctctgagacattattgagcccctggaagcctcaacttttcagtttcatgatcaataacttcctgtattattaaatgagctttgagacgggttttc

SEQ ID NO: 941128 - DNA, 620 bp, Homo sapiens
gaaaacaccaggctctcctgttcctgcccgtggcctgcctcgcctcacctcctcgtgctgcaccggctccgaggagcgggtgatggacgacaccagcggctcctcggctggctcatccagctcattgtcagtgtaggcgcctccttcaccgtccgtgtcttcaaagtcactgatgaggcggctgtcgcaactcagatagtcygcgcccatggcggttaagtaggacatgcggtcttcggggtcatcatccatcccttccatctagaggaatttgtgttggacggtcagtggggtctgatgtggctcctgggagtggggactcaagaaaattcccaaggacacagccaagcgactgaaaccttgatgtgctcgccagggaaggcatcttttatttttctccctgagatcacttggctttggtacaatgttgatattatggtcgtttttgtgcaggaactcaaattaggggccctgcagcctatctgtgctaccatccatcctccataccgcggctaagccacactttctcagtctgtcttgcttttcttctgaatccagctcctctgcagcctgttctcctggtaccactctcctagtaatatcaacacattgcacgctgc

SEQ ID NO: 941129 - DNA, 544 bp, Homo sapiens
atatatcttcacttgaaaactagacagaagcattctcagaaacttccttgtgatgtgggcattcaactcacagagttgaaccactctttggatagagcagttttgaaacactctgtttgtggaatctgcaaggggacatttggagtgttttgaggcctatggtgaaaaaggaaatatcttcacataaaaactacacagaagcaatctctaaaacttgtttgtgatgtgygcattcaactcacagagttgaacattccttttcatagagccgttttgaaacacactttttgtggaatctgcaagtcgacatttggagcactttgaggcctgaaatgaaaaaggaaatatcttcacataaaaactacacggaagcattctaagaaacttctttgtgatgtttcctttcaacccacagagttgaacattctttttcatagagcagtttggaaaccctctttttgtataatttgcaagtggatatttcgacagctttgaggccttcattggaaatcgggatatcttcacaaaactagacagaagcatt

SEQ ID NO: 941130 - DNA, 605 bp, Homo sapiens
aacttctttgtgatgtctgcattcaactcacagagttgaacattccttttcatagagaagatttggagcactctttttgtagaaactgcaagagaacatttggagcacttcgaggcctaaggttaaaaaggaaatatcttcacttaaaaactagacagaagaattctcagaaacttcttcgttatgtgtgtactcaactcacagagttgatcctttcttttgatagagcagttttgaaaaacactctttgttgaatctgcaagtggatatttggacagctttgaawctttctttggaaatgtcaatatcttcacataaaaactagacagaagcattctcagaaacttttttgtgaagtttgcattcaaatcacagagttgaacataccttaaatagagcagttttgaaacaatctttttgtagaatctgcaagtagacatttgcagcgctttgaggcctaaggtgtaaaaggaaatatcttcacataaaaactagacagaagcattctcagatacttctttgtgatatgtgtactcaactcaccgagttgaacctttcttgtgatagagcagttttgaaacactctctttgtagaatctgcaatt

SEQ ID NO: 941131 - DNA, 605 bp, Homo sapiens
aacttctttgtgatgtctgcattcaactcacagagttgaacattccttttcatagagaagatttggagcactctttttgtagaaactgcaagagaacatttggagcacttcgaggcctaaggttaaaaaggaaatatcttcacttaaaaactagacagaagaattctcagaaacttcttcgttatgtgtgtactcaactcacagagttgatcctttcttttgatagagcagttttgaaaaacactctttgttgaatctgcaagtggatatttggacagctttgaaactttctttggaaaygtcaatatcttcacataaaaactagacagaagcattctcagaaacttttttgtgaagtttgcattcaaatcacagagttgaacataccttaaatagagcagttttgaaacaatctttttgtagaatctgcaagtagacatttgcagcgctttgaggcctaaggtgtaaaaggaaatatcttcacataaaaactagacagaagcattctcagatacttctttgtgatatgtgtactcaactcaccgagttgaacctttcttgtgatagagcagttttgaaacactctctttgtagaatctgcaatt

SEQ ID NO: 941132 - DNA, 570 bp, Homo sapiens
aacatagaactcaggccttggccttgagagtgcaaacaccaagccttggcagcttccacatggtgttgagcctgcgcatgcatagaagtcaagaattgaggtttggaaacccccacctagatttcagaggatgtatgaaaattcccggatgtccaagcagaagtttgctgcagcggtggtgctctgatggagaacctctgctagggctgcgaagaagggaaatgtggggttggagcccstacaaatagtccctactggggcacttcctagtggagctgtgaggagagggtcactctcctccaggcctcagaatggtagatgcactgtgagcctggaaaagctgcagtcactcaacatcaacccatgaaagcagccaggaggtgggctataccctgcaaagccacaggggcagaattacccaaggctgtgggagcccacctcttgcatcagcaagagcttgatatgaaacatgaagtcaacggagatcattttggagctttaaaatttgactaccttgctggatttcagacttgcatggggcctgtaacccctttgttttggccaatttat

SEQ ID NO: 941133 - DNA, 718 bp, Homo sapiens
  misc_feature 1, 2, 3, 4, 5, 6, 7, 8, 9, 10, 11, 12, 13, 14, 15, 16, 17,18, 19, 20, 21, 22, 23, 24, 25, 26, 27, 28, 29, 30, 31,32, 33, 34, 35, 36, 37, 38, 39, 40, 41, 42, 43, 44, 45,46, 47: n = A,T,C or G
nnnnnnnnnnnnnnnnnnnnnnnnnnnnnnnnnnnnnnnnnnnnnnncccagtgaccaggtgtaagtggagtcaaaaacttacaagcacatgtaatgttagagttttgtgataagggacttttattcctaaggaatgtgttttcttaaaatatttcatgcttaagtgttagaacttcgtttgaataaattatttcattcaacccctttctctgtttctgwgcctatctcactgtaccagggatggtggagagtggagaaagctgcactccatagggcctctgctctcaaagagcttacttctcattaaggaggtaaatcagacatacataaaacaatcacaaatgtgtaagggcgtgtgattccatgagaaatcaatattccaggctctatgtgctgcaagagctttagaggggagagaaaaagaaaaggagaaaaagagccacagaaataagggcttcatgaaggatgtgtaatctgatcaagtccttgagagcaaggcgggatttaagagctgggcgacacctggctgggcgcggtggctcacgcctgtaatcccagcgctttgggaggccgaagtgggcggatcacaaggtcaggagatcgagaccatcctaacacagtgaaaccccgtctctactaaaaatagcaacaacaacaacaaaaaaaaagccgggcatggtggcgggtgcctgtagtcccagctactcccgaggctga

SEQ ID NO: 941134 - DNA, 588 bp, Homo sapiens
cccacggcagtgtctaggggtgaatgcttacagttcctgaagccccaatgggtgtgtgttacagagcgctcttttagttttgctatctgtaggcagcttgtgttaatcagctcgattagatcctctgccttatcacaaggacagagggctttctgtatcccagggtttttgccttggtgtactggargaatcagatcacacgtgggcttagggaccgagtgcaagtttttattgagtggaagtagctctcagcagatgggggagccagaagggagatggagtgggaaggtgaactatcaagataaaatcagtctactactccataacagaggtaaggaagagtatgcatggaatacaggacatcctttagagcatctcttagtattaccatgccctttgattaaggtcaatgggaaactacaatagcgcaatccaggcaggactacaaatagcccagacccctcaggaatgaaggtttgggtcactccaccaggaaaaaaaccacaacctgctgaggtgcttgctgaaggcaaagggaatacagaatgggtagtagaagaaggtaatcatcaataccacctatgacca

SEQ ID NO: 941135 - DNA, 565 bp, Homo sapiens
caaaggctgagtcctaattcttctttctcttaacacccctcagattgcttgccctcctcccctgctgaaaccccatctcatcacactgaattccttcatctccacctggcccactgtccccctcctccctgctctccgtctggagagtctgcccagcctctcccaccacaaggcctttgccgtcgctgtgccctccctctgacargttccttcccagcatctccgcacaggcagcgcctcttcagtattcagacaggactcctgcggagccctgggaacctgaactacggcagccctgcacctgccagccacccacctttcagcccacaccctctttcatgttccacattgcaatattacccaaaatcacctcactgggcctagtcccctgttgcctgtccttccccacccctcaccacacatgcacataaaaacatgaacctgaactctgtgattaagagcacaggcagctaggcatggcggctcatgcctgtaatcccagcgctttgggaggctgaggcgggcagatggtttgaagtcagaagttcaagaccagcctggccaa

SEQ ID NO: 941136 - DNA, 794 bp, Homo sapiens
tggattgccttatctacattctactactgatctctctacatttaaaacaaaagaacaatttctcagaaattatatacttggtttatcgtctactttcccttccctcagaactaaaggtcttttagcacaggtgccacccctagagtttccagcacaccaacatcagcctggggaccacgtccctgtcaaaagttagagaaaaggaaaaattagaaccagcctgggaaggatcttacctagcgctcctaactactgaaactgcagtccggacagcagaaaaagggtggacccctcacactcgagtcaagaaagcrccgccccctccacggtcatggaccatagtcccagaggaaaaccctaccaaactaaagctaagaaaaatttaactctctttcatctattctattacttctttcctcattctattgctgaccacctagttattaatgtaaccaagccaattttgcctcaaaatattacatttgatgcttgctttgttatacgctgtggagacttgccaagtcagaagcaactctctgcttcagaaaagtatatttatcctccctagctctccttagactggaaatctgttaactgggataggttagtttgagaagagtttgacgaagattccagtataaactgggaatcttgtccttctacagcagagcttctctgctgaagttggtccatataaaatactatatggacctataaaatactaaagagcgaggatggactgctccaactagtacttgcagtttcttaaaaccatatgttcattttactaaagg

SEQ ID NO: 941137 - DNA, 794 bp, Homo sapiens
tggattgccttatctacattctactactgatctctctacatttaaaacaaaagaacaatttctcagaaattatatacttggtttatcgtctactttcccttccctcagaactaaaggtcttttagcacaggtgccacccctagagtttccagcacaccaacatcagcctggggaccacgtccctgtcaaaagttagagaaaaggaaaaattagaaccagcctgggaaggatcttacctagcgctcctaactactgaaactgcagtccggacagcagaaaaagggtggacccctcacactcgagtcaagaaagcgccgccccctccacggtcatggaccatagtcccagaggaaaaccctaccaaactaaagctaagaaaaatttaactctctttcatctattctattacttctttcctcattctattgctgaccacctagttattaatgtaaccaagccaattttgcctcaaaatattacatttgatgcttgctttgttatacgctgtggagacttgccaagtcagaagcaactctctgcttcagaaaagtatatttatcctccctagctctccttagactggaaatctgttaactgggataggttagtttgagaagagtttgacgaagrttccagtataaactgggaatcttgtccttctacagcagagcttctctgctgaagttggtccatataaaatactatatggacctataaaatactaaagagcgaggatggactgctccaactagtacttgcagtttcttaaaaccatatgttcattttactaaagg

SEQ ID NO: 941138 - DNA, 640 bp, Homo sapiens
tcagctgaaccaatggaatccagtacagatgaccatcgctgctccccagagttcttcccctccattaagccatttctatggtataggggcagaagtctcagggaacaacccccataggatcctttgaaatgcgcttcattgccgcctcacctcctscacccccttctccctctcttaagttctccgctaaccaaaccttctcttgttatatacccaatgataaaaccaaagtagttgtagaggttaaagatttaaaacaaactatagcaattgacacagggtatcaggacacaaatgcttggcttgaatggattaaatattctgttctcatgctaaacaaaagtgactgttagacttgtgtgacaggcagcccagagacagagattgtcccctttccacttgggtggtcctctcacggaccgggcatgagctgttatggtagctctcttccaaaaccccacagcctggggtgatgagtgatggaagactctttcactgctgttccctgaggttaagagccctgcgggtcagcccctgaggtccatccagcctccagcccctggtgtttacttcacctcctgcctttcatggcagaggaaaaagttagcattccttggagacttaacagggtgcagtgaaa

SEQ ID NO: 941139 - DNA, 567 bp, Homo sapiens
taccagggatgcagggatggtttaaaatatgcaagtcaataaatgtgatacaccacataaacagaatttaaaacaaaaatcacatgatcatctcaataaatgcagaaaaagcatttgacaaaattcaatatcactttatgattaaaaccctcagcaaaatcagcgtacaagacccatacctcaatgtartaaaagccatctatgacaaacccacagccaacataatactgaatggggaaaagtttaaagcgttccctatgagaactgtaacaagacaaagatgcccactctcaccacttttctatttaacatagtactggaagtgctaaccagagcaatcagacaagagaaagaaataaagggcatccaaattggtaaagaggaagtcaaactgtccctgtttcctgatgatacgatcatatacctagaaaaccctaaagactcctccaaaaagctagataaatgaattcagcaaagtttcaggttacaaaatcaatgtacacaaatcagtagctctcctatacatcaacagcgactaagctgagaatcgaatcaataactcaaccc

SEQ ID NO: 941140 - DNA, 648 bp, Homo sapiens
tcggaaggctgaggaaggagaatggtgtgaacccgggaagtggagcttgcagtgagccaagatcacgccactgcactccagcctgggcgacagagtgagactctgtctcaataaataaataaataaataatcagaccatcttcactcttttcctatttttaaagtttttgtgtattattggaattttttgttccttgaatggttggtaggcctacatataaagcttcttaggctttatgttttctctgtaaaaatgtttgaaaaatgatccaattcctttgatagttatagaawaattcagatttcctattttttcttgattttgtccaggtaaagtctgtattactagaacaacaccggcatttcagatgttaatgtttgctggcatctctttctctaggctttcactttcaattgcatggttgcttgtctttcagttgagtccacagcaaatagaatataggaaaattctgtatttctaaacaaaataatggtttgtgttttttaacttgagaatttatttaatttttattaatagtaatttttttagatttatttgtattatctattttagtgctttccatttttatcacattttagcccctaatttcttgctgtttttggattaatgttttttccttcttgtac

SEQ ID NO: 941141 - DNA, 603 bp, Homo sapiens
tcgttcaggtgggaaggggaaggagtgtcatctggagaggttgaaggtagatgggcgctcttagccattcttcagctattcctcatgtgaccgatagaggtcccacaccttgtcctgtcttctccagtgctctagcctgatgctgcctcttgagaacacaatccgctagctatgcctgaccaggtcagtaggggtctactaatattctgttaatatatcccaagtttgtgttaactttttgttatcccatcacactgtggctgtcagtccatgaaaaactctgctcttggagcagggctcccccatcctgtcttgtagttgacaaaatgcagcactgtacttttgctcttatttmatttcatcatgttgctttcacctcctctttccatcctgtagggttattttgtagttctgattcttcttctgttgtgttgggttattcctcacaactttgtctcatcttgaagcttggaaaggtcccttctaatccttcaagactttggtgaagatgctggacagaaataagactattgtgccctggattatgccaccatataactctgtctaaactgaccacaatctatatattaatgaccactttct

SEQ ID NO: 941142 - DNA, 467 bp, Homo sapiens
aggagtgcctaagaattagctagggacacaaggaggatcgccaaactacagcatgacataaaaaataagaaagttatatctaacgataacatctgagtctcaactagaaaaataattctaaaggctatatatagtgggatatttataataatgaaagactgaacactttaatgtccaacattaggtgaaaagttaatacaataccaagaattcaactctaagtgatctcctggaactgctggscaaacatggccatcttggtatcacatttcccaggagtgcccagacatgggacaatgagagaaagtatctatgatataatgttgaatgaaaaaaatagcctataatagaatgcatgtatatgatgaaaatcatgttgtaaaaaaaagtactcttagaaccaggcacagtggcttatacctgtaatcttagcactttgggaggccgaaggaggtagatcattcgag

SEQ ID NO: 941143 - DNA, 763 bp, Homo sapiens
ctgaagagtggaaggatacattcaacatgtttttaaattttctgtatcctgatgctttgacacctggggctgtgctgatgaccctggagggactgccactcccagggttagccaattccgagaaacagtaaatgactcacgtgggagrgcgcacctttcctatgcaaaccaaccgatccagtatccatacccccaatcacttcctttattgggccgtctctcggggccaccatccacctactctaatcaccccagggccagtaacagacaactagggacagtccctgtgccccaaagttcactgaacttattcaaaggagccaatcctgagcctgtttaccctgtcttgcattaccattcctgcagaaatcacaataaaggctcttgtctgcattttccccttgctccctcgggcccctgaccagccctgatgcttccccatatgcccccactgcatgacaagctgtgcctcctgttttatacccatggggaactctctagaatttcatagggagcttttaacagccataccctagaccaattaaatcagaacctctaggaatgtgacccaaactttaagtattttttttaattccccaggtgattcgaaagtgtagccaactttgagaatgggtgctttaaaacatccccatcgacgttttcatagtacacatttctaagttaaaaaatctttcccatagtaatctccaatgtcttccttcaaatactaaaaaatgtggagggtactttaacttagaatctt

SEQ ID NO: 941144 - DNA, 763 bp, Homo sapiens
ctgaagagtggaaggatacattcaacatgtttttaaattttctgtatcctgatgctttgacacctggggctgtgctgatgaccctggagggactgccactcccagggttagccaattccgagaaacagtaaatgactcacgtgggagggcgcacctttcctatgcaaaccaaccgatccagtatccatacccccaatcacttcctttattgggccgtctctcggggccaccatccacctactctaatcaccccagggccagtaacagacaactagggacagtccctgtgccccaaagttcactgaacttattcaaaggagccaatcctgagcctgtttaccctgtcttgcattaccattcctgcagaaatcacaataaaggctcttgtctgcattttccccttgctccctygggcccctgaccagccctgatgcttccccatatgcccccactgcatgacaagctgtgcctcctgttttatacccatggggaactctctagaatttcatagggagcttttaacagccataccctagaccaattaaatcagaacctctaggaatgtgacccaaactttaagtattttttttaattccccaggtgattcgaaagtgtagccaactttgagaatgggtgctttaaaacatccccatcgacgttttcatagtacacatttctaagttaaaaaatctttcccatagtaatctccaatgtcttccttcaaatactaaaaaatgtggagggtactttaacttagaatctt

SEQ ID NO: 941145 - DNA, 763 bp, Homo sapiens
ctgaagagtggaaggatacattcaacatgtttttaaattttctgtatcctgatgctttgacacctggggctgtgctgatgaccctggagggactgccactcccagggttagccaattccgagaaacagtaaatgactcacgtgggagggcgcacctttcctatgcaaaccaaccgatccagtatccatacccccaatcacttcctttattgggccgtctctcggggccaccatccacctactctaatcaccccagggccagtaacagacaactagggacagtccctgtgccccaaagttcactgaacttattcaaaggagccaatcctgagcctgtttaccctgtcttgcattaccattcctgcagaaatcacaataaaggctcttgtctgcattttccccttgctccctcgggcccctgaccagccctgatgcttccccatatgcccccactgcatgacaagctgtgcctcctgttttatacccatggggaactctytagaatttcatagggagcttttaacagccataccctagaccaattaaatcagaacctctaggaatgtgacccaaactttaagtattttttttaattccccaggtgattcgaaagtgtagccaactttgagaatgggtgctttaaaacatccccatcgacgttttcatagtacacatttctaagttaaaaaatctttcccatagtaatctccaatgtcttccttcaaatactaaaaaatgtggagggtactttaacttagaatctt

SEQ ID NO: 941146 - DNA, 631 bp, Homo sapiens
gtgaaaattctccacaatgcacatggtacagactggtgtaaagactcactcagaatccctgagttgaaaccacctttgcaaagattatgacagtaagagaaatctgatatggctgactccatcttgcttctagcctcaccggttggctgtcttcactcattcctgggcataggacaagctaacatattcttacttttaaccaaattaaaatttatagtttaacttggaagcaaggatgataatagtttctccctgaaacgaatcctctccttgttggggccagggggcgggctgaaactactttcataagactaatgaaaggccataagattaggattatgggagggscctgaattctgctaaaatgtcggtatagtttttatgatcccttacttctcaggaatcgtgtggccagaggtcacaagatttatgacttccctaattgctcatatagataatatcactattgtagaacttaagattggtcttttgagatgtttttcagactgatgccacccagactcatgactcataactcaactatttctgtgccctcctctcccaccaagaggtggactcagtgcacagatggtgaccattttccacacccctatgattgcattgccaacca

SEQ ID NO: 941147 - DNA, 781 bp, Homo sapiens
ggacacacacacaaaaagattgttacctatcagatattctttttacattttggggagacaatgtagttcttgtatttttttcattctctaaagaaaatacacacattaaaaattttaatttttttaaataagggaaatccttgggatttatccagtaatttcagcatctgtgggcattactcagacattttgttttgcatattataaggctttgaacggcaatgtccttctatcctagcagagatggattcactgctttgaggaatagaactgcctgtactctaaaccagacagaaatcaatgctttaacccaaatgaatgagtggaaaacttgttagccaaatttgcacaagtataaattttaatactagaatatactgtagaaatgacaaaacatattgctcagcataaataacaaaatcttgttattattcagaacatctctttccaaagcgtatgataattttatttatgctttttcatatcaaccgcatcagcctgccccattttacrcatagaaatgtgaaggagaaatcaaataccttgtgtactggcactagcaaggcaagaacatgttggcaatattctcttgcgggcgtcataggcaccatgctgaagactagaacggcctgtactttccctggcctcagctagctcgagagccacgatctgaatgaattaaagccatttctacctgtttggggtgtgctatgcagaattcatagttctatcgccattttaatagtcagggaaaataaaaaagattctttccgtgagcaaa

SEQ ID NO: 941148 - DNA, 630 bp, Homo sapiens
agtatcatctgaatcccatcgtaaggaactatcagaaacccaaattaaagaacatttcataaaataactggcctgtactcttcaaaatgacaatgtcataaaggacagggaaaggctgaggatatgttacaaatgaaaggacactaaamgacataacaactaattgcaataaatgattctggaccagatcctgtactgagaaaaacaaatgtgataaaagacattacagtattggaacagttgacaaagtgagactatggactatagattaaagtattatatccctgttaaatttcccatagttgatcaatgtgctgtggctacagaagagaatatccttgttcttaaggaagacacactttagtattaacatgtaaagtggcataatgtatgcaacctacttgcaaatagttaagaaaaattatttgcattgagagataataaaacaaattttgcaaaatgttacttttctattgttcttacaacttttctgtaggcttgaaattattttaggttaattagtttcagaggatatctaatagaaagagactactaagccaagataattgtaggtctttctcccccacaacaattatcagtttaaatccttgttttccctatagactaccc

SEQ ID NO: 941149 - DNA, 489 bp, Homo sapiens
ttctatatttaaatctgtgtggtaaagacttctagttctccctcagtattcatcctctccttattcaatagtggttttaaatctcaatttttggtcgagtgcatgattgcccagaataaaggctatattttctagcatcctttgtagatggatgtgaccacatgactatgttctactcagtaggatgtagctggwagtggtccaatggcaggaggatctgcatttttttgtacactacttcctgtctgctgggtagaatgagtatgtaatcactggagccacagcatccatcttgcactacgaggtgatttttagaatggaaatcccacagtgtagttgagcctgatcttttacctctcgaagttctgatctgactaccactgtgattcttgaatgtgaaagagaaatgcacttctatttttattgaagccactgtaactttgggctattctgatgctcacattctaatattatcattaacacctactt

SEQ ID NO: 941150 - DNA, 626 bp, Homo sapiens
gaaatcagaataattcccccttgccaacttagggcaagctcagatcctactgccaatactgcaagtggtgctctcttgtaagcactacctcctggctggaggccaaccaactcaggccattacagcaactcatgacagaataactgctcccaggaaggagaaaacaaccgctaaagctactgcytccaacaccctgactaaccagtggtcctcagtctgtccatgtaacaacttcactgctagcataaccagcattcgagaaagccagcacactaaacctacctacgatgaaggattctcacagagtctacctcactcccctgccacctccactagagcaggtgctgttatccatgactgggagacctgaagactgatcgcatcacaggcagacattcccagcacataccggagcctggagccaggtagccttgctgagtagctagacccagaagaacaataacgatcactacagtctggctctcaggaagccccatcgccaggggaatagggagagcaccacatcaaaggatcaccctgtgggacaaaagaatctgaacagcaggccttgagttccagatcttttcactggtgggtagtttctcacagcagagacacaattgcag

SEQ ID NO: 941151 - DNA, 702 bp, Homo sapiens
gaaagtctgcatatacactgcaacaggcaggcagccactgtgatcatgaaggaccttggagaagaggtccttgttctccccaggactccactatagacatagctggggcatcccctacaggaatgcagcatggaggcacctatagaaagccattctggaataatccagggtaagtgcagcctgacaggaggagcaccccccagattcaggcctgcacaagaggcagagtcacaatcactccctgtttggaataacaacattcctatagatgaaaagaggtgcctgtctgatcagaatagctgaaacactagtataggagtgaggctgtgaggtaaatagttttcccgctgacttggtagggaagctgtggtagttcccactcttcactctgataaatcctcagcacatctaattgagagccrccccagctaccctcatcaaggctgggactttggcccaccattgggtattacatctactcacctgccttagcgacatctgctgcctatgcagggataccccctctatgggcctgaagccggaatcatcaacttaggaaaaaattaaataaataaggtgtacaccacgagagaacaagataagcttcaagagatccctgccattccaactctataggagacagtgaactcacccacacactaataatataactactatagccagcattagggaaagccagca

SEQ ID NO: 941152 - DNA, 702 bp, Homo sapiens
gaaagtctgcatatacactgcaacaggcaggcagccactgtgatcatgaaggaccttggagaagaggtccttgttctccccaggactccactatagacatagctggggcatcccctacaggaatgcagcatggaggcacctatagaaagccattctggaataatccagggtaagtgcagcctgacaggaggagcaccccccagattcaggcctgcacaagaggcagagtcacaatcactccctgtttggaataacaacattcctatagatgaaaagaggtgcctgtctgatcagaatagctgaaacactagtataggagtgaggctgtgaggtaaatagttttcccgctgacttggtagggaagctgtggtagttcccactcttcactctgataaatcctcagcacatctaattgagagccgccccagctaccctcatcaaggctgggactttggcccaccattgggtattacatmtactcacctgccttagcgacatctgctgcctatgcagggataccccctctatgggcctgaagccggaatcatcaacttaggaaaaaattaaataaataaggtgtacaccacgagagaacaagataagcttcaagagatccctgccattccaactctataggagacagtgaactcacccacacactaataatataactactatagccagcattagggaaagccagca

SEQ ID NO: 941153 - DNA, 741 bp, Homo sapiens
aaaagatgaccaacactgttagccatcagggaaatgcaaattaagaccacaatgatgtatcactacacatttattagaatggctaaaataaaaaatagtgacaatgtcaaatgttggcaaagatgtgggaaaactgggttactcatacattgttggtgggaatgtaaaatgctactgtcattttggaaaacagcttgacagtttcttaaaaaaaatcttaaagatgtaattacctgtgacctrgcaattgcactcttgggcatttatctcccagaaatgaaaacttatattcacataaaaacttgtacaccaacgttcatagcagcattatttgtaatagcccaaagctggaaaaagccctgatgtccttcaacaaatgaatcgttaaacaaattgtactatatccatatggtggaatactactcagcaataaaaaggagcacattatttatgcactcagtaacgtggatgagtcttcagggaattatgctgagtgaaaaaagccaatccccaaagattctaagattccatttatataacattttcaaaatgtatacattaagaaatggagatattagtggatgccaggggttaggagcgaagtgtattagtcagggttcaccaaagaaacagaataaacacacagacacacagatacacacacacacacacagacacacacacacacacacacacacacacagagagagagggagggagagaatgctacagagaaagaga

SEQ ID NO: 941154 - DNA, 550 bp, Homo sapiens
agaactatatacttacaaatggttaagatagtaaatacagtttatgtggtttttttttgagacggagtttcactcttgttgcccaggctggagtgcagtggcacgatctcggctcactacaacctcctgggttcaagcgattcttctgtctcagcctcctgagtagctgggattacaggtgcctgccaccatgcctggttaatttttgtatttttagtagagacagggtttccctatgttggccaggctggtctcraactcctgacctcaggtgatccgcctgcctcggcctcccaaaatgctgggattacaggtgtgagccaccacacctggcctgtgtgtgtgtgtgtgtttttaccacaataaaaattaaataaacaaaacaaaaatgcacatggaaacatttttatttaaaacaataaaacaaaaacttttttttctttttttgagatgagtctcactctgtcgcccaggctggagtgcagtggcaccatctcagctcactgcaacctctacctcccaggttcaagtaattatcctgcttcaccct

SEQ ID NO: 941155 - DNA, 617 bp, Homo sapiens
atgaatgcattttttttttttttttgagatagactctttctctattgctcatgctggagtgcagtagcagattcatagcttactgcaggcttgaactcttggactcaagcgatccttctgtctcagtctcccaagggactacaggcatgcattaccacacctggctttttatttttttatagcgatggagtctcattatattacccaagctggtctagaactcctggcctctagtgatcctcctatctcggcctcccaaagtgttgggattacagatgtgagccaccacacccagcctgaatgcaccttgtggtggcctcagaggtctacacagaagagtgggactgctggaaaagatctacagagacaggartgacaagtaggcttagtggcttctaggcccagctgtgctcctgactgtgtgatgttcagtaagcacagttgttttgggcttgttttctaaccagtgaaatgtgggatggtgtgctagaacttcctacccttcggtgtgcctgtgaaacttggggatcttgttaaaatgcagtttctgattcagtaagagagatctgagattccacatttccctaatgccacaggttcttgcccctgctccttgt

SEQ ID NO: 941156 - DNA, 731 bp, Homo sapiens
gccaaaaatatatacagtgttctataaacatgcctattatttatagtgcattataatttgttgctttaattatatgtgatagtataattactcactatgataatctgtcctaaaatatcataatttcaattatatgtatttgatctactagtttctcggaagaaataaaagctaagtgtcttccgtaatcccatgttctatccattgattgtataaaaataatatgcactataatgtgtgccattttgtgaaagtcgtgttatatagaacagcataaaaagtaccactggggaccaggcgcagtgactcacacctgtaatcccagcactttgggaggcygaggcgggctgatcacctgaggtcaggagttcgagaccagcctggccaacatggtgaaaccccgtctctactaaaaatacaaaaaaaaaaaaaaaaaaaaattagcagggcgtggtggtggccacctataatcccagctactcggcaggctgagacaggagaatcacttgaacccaggaggcagaggttgcagtgagccgagatcatgccacactgcactccagcctgggcaacaaagagagaaactccatctcaaaaagaaaaaaagtactactgggtgggtgcagtggctcacacctgtaatctcaactttagaaggcccaggagggagtactgtttgagggcaggagcttgagaccagccctggcaacatagtgagaccccccatctct

SEQ ID NO: 941157 - DNA, 685 bp, Homo sapiens
atttagtcctttcaactcaagccagtcaaaaactactcaaagggctgggtgaggtggctcatgcctgcaatcccagtgttttggaagaggctgatgggggaggatcccttgaggccaggagtttgaagttacagtaagctatgattgcgccactgcactccagcctgggtaacagagaatttgcctgaggccaggagttggagaccagcctggctaacatagcgaaactctgtctctacaaaaaaaaaaacaaaacaaaacaaaacaaaaacaaaaaaaaggctctaggaaactgggcttttacatttgtcattctaataaattaaatattacactaaaacgcccaggtctgttgtgccccttgaagatgtggggaggtggcttctcaactctttaagcgaccatgaggtccactgttgggcgggcatctttgttactgagtttgtcaaagaagaccacagtcaggtcattttccagtggtggctcagtggtgccacagcaggcaaggagaggggccggcggggcaggcaggatggggckgagtggagaaggcccatcaaccttgagggaggctggagccccagaaaacagaagagccctttgcacacatgcttcagcttggtgctattcccagagctcttttgagggcaccttctcatctgccctcaagtgcattcattattcc

SEQ ID NO: 941158 - DNA, 712 bp, Homo sapiens
agaatatttcaacagcctcgttcttcctatctgaagtgcatgcactctgaccgatgggccacatttggcctgccactagttttggtaaataaagttttttcggaacatagccatgcccattcatttacgtattgtctttggctgctgtcacactacaaaggcagggttgagtagttgtgactaagactcatatggcctgcaaagctgaaaatatttactctctggctagarttaccatatttagcaaatgaaaatatagaatgcctgattaaatttgaatttcagataaacaatgaataatatcgcatgggtcatacagacactaaaaacttatttgttgtttatctgagcatttacagtcatttattatttgcagattctatatttgcatatttgcctaatgctgaaatttatttgtattccctaaatcaatactcccagtgcttttgtggtcattcacagacatgcagagagcagcaaaaaattgagttgcccagtgcatatgttttcagcaggggctggacaaggtgatgctttaccttcttgttctagctctcctactataaacaactgttctttcctagtctacgtagcatcacagttttttttttgtatttttgtgctttttgttggtgattttgctgtttaaaatagccaccaaacatagtgctgaagccctgcctagcattcctaagccagagaaggctggaat

SEQ ID NO: 941159 - DNA, 617 bp, Homo sapiens
caaccctgatatgattcactggccggctcgtttttccatgatcctggatgactaattacattcattggctctcctcaaacggttgatgcaactcttccccagcctcacctaatattttacagagaaaatcaaagccaccagatgaggattttaycttcttctcgcccctaaacccacgttccatctgcatgtgctccagccttctcctccttctttcctgtcatgtgagagggagtctctgtcgtcctgtcaaaattagtcccttcagaggagctctgtccctatctcctcagacattcttaagggctgcatttctttagattttcttcctgtttcctgcaccatcaatctctccctctactatggataatgctattgatgtttaaatatgctcaagtatcttccttcctcagacaaaacaaagcaaaacaaaagtctccttcgtttttttgtcctctcactgagtctgcctcaagtctctcttcctggctaaaccttctgaaaactgtccgcacaagctgtctccacttctatccttgctgttctcatgctcttcatgccattgaaaccaattgtataaaggtcaccaatgttctccatcttaacagttctataat

SEQ ID NO: 941160 - DNA, 635 bp, Homo sapiens
agtttggggatctgacatgcggtttgatggagtgccaaattcttgctggaaagttcccagacaaaaactgagcactatgaagatactagaccttggctatttctacccaatgcagcattcttctacagtcacttaagtacagaattcttcaatagcatcatttttcatttctctgagataaattctcaagagcacagtttcaggggcatgtggtaattacatttttatttttctaagaaaacacaaagctgttttccatagagaatgtaccawtttatattcccaccaacaatgtatcagtgatccagtttctctgcatcctaaccaccattgatgttatcactttttttttttttttgaaacagagtcttactctgttttccagactggagtgcagtggtgcaatcttggctcacggcagcctccacctcctgggttcaagagatcctcatgcctcagcctcctgggattacaggcatacactaccacacccggctaatttttgtatttttagtagagatggggtttcaccaggctggtcttaaactcttggtctcgagtgatctgcccacctcagcctcccaaagtgctgggattacaggcatgagccagctcacccagcccaggtattttta

SEQ ID NO: 941161 - DNA, 651 bp, Homo sapiens
actcaaaccacaagatacagttcttcccactcttttctcccctttccataagcagaggagccttaccctatggtcaccaccatcacagactcacaggaagtactgccaggctattgtcgattttcccttaagatccaaaggctctttcatcaagttgtcatgaagrctgtctgggctgaaactcacttttcatggcagtgggcacccctctggcccagggatgggccatccaagaggcaagcctagaattggagacctcaagaggctgcttggtgttctatccctggtggcccagttggtatctaaagtacaagacaaagtcccctttagtttccttctgcttttctctagaaaatggagtttatccccatagccattacagctaggaatatgatgagtctcacctgaagccacctagtctcagagtctcaccaaggcccacagtacacaacctggttatcactgctttttatttaggccacaagggatctttagtcagcatgtgatagatccttcctggactgtgtccttcccttcaaggtagtgggtttccttttggcccagggtttgtctaaaaatatattagagctagtgcctgaaatagtgcctcaagagtcttactggtgccctattgtactgtggctgagctgg

SEQ ID NO: 941162 - DNA, 778 bp, Homo sapiens
cctttaaggcaacctgtgggatgggatattggcattgagcagggtaagagtgattaggttttaatgggatggtaaggggtgcatgatcagtcactaaggagggagtagaggtgtcttatacttgtgggttaaggtggggagatacaaggggaggatgtgaaggaggctttgaactggaggaaaaggcggcaatgaggagtggctgtagcccaggaatagtcagggaagcagataatttagttaaagcgtctcggcctaataagggcctaataaaggcaggtggggataactaaaaaggagtgcttaaaagactattgtctaagttggcaccagagttggggagttttaagaggtttagaagcctggccgtcaatacccacaacaattatggaggcaagggggaaacaggcccttgaaaagaaggtartgtggagtgggtagcctccgtattgattaagaaggggacagacttacattccactgtgagagttaccagaagctcggcgtctgtgatggtttagggagcttccgaggcgatcttgcagtgtcagccttcagccgctaagccgagaagatctgggaaggagtcagagagccttgggccagagttccaggggctctgggagtggctgccaggtgagttgaacagtccaattttcagtgggggtccttcacagatgggacgcggcttaggaggaatcccaggctgcggacattccttggcctggtggccagatttctggcgcttgtagcaagctcctgggggaggaggttctgg

SEQ ID NO: 941163 - DNA, 670 bp, Homo sapiens
atttctatgacatcaacttttaagattccacgtatgagtgagatcatgcagtatatgtatttctgtgccttgcttatttagcttttcataatattctgcagatttattcaagttgttgcaaacaacagaatttcattctttttatggttaaatattattccactatgattatatactacattttctttatccattcatccattgatggactctttagttgaatccatatcttggctattctgaatagcactgcaataaacgtaagagtgcagatatctcttcaacatactgatttcatttcctttggatatacacccagcattgctggatcatatggtaggcagttctatttttaattttttgtgaaactttcatactgtttttcagaatagctttattcatttaaattcctaccaatagtgtctaagtgttgtcatttctccacatcctccccaacacttatctcttgcctkttttataatagccatcctaataggagtgaaatgatacctcattgtggttttgatttgcatctccctaatgattagtgatgttgaatattttttcacatacctttggccatttgtatgtcttcttttgaaaaatgtctattcaaggcctttgctcatttttaattgattaatttgatttcttgctattgagttgttaa

SEQ ID NO: 941164 - DNA, 703 bp, Homo sapiens
ccagagggtttggtgcagaagcatctgtagtggaacatggacagggttacccatctccctaggcttgacttgctccaataggaggctttagccctaggggaactgttggacctgaactcttcagggtggccttgcccatcagatggggacagtccaacctgagcatcccttggtctcctggccaattccgtagccccagcctggccgtgtctgcttgcatggcagcgtcaggtgccccatcctttttagcaccagggaccaggttcatggaagacaatttttctgtgaactggggatggcggggaacggttttatgatggaactgcaatggaaccgttccaccttggatcatcaggcattagattctcataaggggcatgcgacctagatcctgcatgcacagctcacaataggattcactctcctgggataatctaatgycaccaatgatctgaaagaaggtggagctcaggcagtcatgctctcttgcctgctgctcacctcctgttgtgcggccccagaccagcaccagtccagggcctggggtttagtggctccttctctaggggactgcatcacagctcctgcaccattggaccatgcctgactgatggagagctccagtggggcagcccccatggccatacactaattgcccactccctccacaaactgcccctaggcacaccacgttagcagcata

SEQ ID NO: 941165 - DNA, 703 bp, Homo sapiens
ccagagggtttggtgcagaagcatctgtagtggaacatggacagggttacccatctccctaggcttgacttgctccaataggaggctttagccctaggggaactgttggacctgaactcttcagggtggccttgcccatcagatggggacagtccaacctgagcatcccttggtctcctggccaattccgtagccccagcctggccgtgtctgcttgcatggcagcgtcaggtgccccatcctttttagcaccagggaccaggttcatggaagacaatttttctgtgaactggggatggcggggaacggttttatgatggaactgcaatggaaccgttccaccttggatcatcaggcattagattctcataaggggcatgcgacctagatcctgcatgcacagctcacaataggattcactctcctgggataatctaatgcyaccaatgatctgaaagaaggtggagctcaggcagtcatgctctcttgcctgctgctcacctcctgttgtgcggccccagaccagcaccagtccagggcctggggtttagtggctccttctctaggggactgcatcacagctcctgcaccattggaccatgcctgactgatggagagctccagtggggcagcccccatggccatacactaattgcccactccctccacaaactgcccctaggcacaccacgttagcagcata

SEQ ID NO: 941166 - DNA, 566 bp, Homo sapiens
tattttacctttcaactttctcactgcaaatggaaaatagtattatctgaggttcttgtgaggattaagtaaattaatggattaacactttagtccaaacatacagcaaactctcaatgactggaagctatctttagtgagacagaaagcattcacagataatcaaatttaggagaaaaggtaatgaactcagttttatatttcaaagttgcatttgaagctatgtgtggaggtggtaggtaagtaaacagcaggatattcacatctggaactcaraaaaaagatgtgggttggagatacaaactgcctctagtgaagcatctgtgtatagatggtaactacacacaaaagtcaggggagtggaagaattcatggaaagaaattagtgaagagagggactgctatggattgtgtcccccaaagttcttgtgttggaaaattaatcttcaatgcaacagtgtcgggaggtagggcctaattagagaataggtcatgatggctctgtcctcatgaatagcttgttatcatgggagtgggttcattataatggaatgggcttgtaacaa

SEQ ID NO: 941167 - DNA, 634 bp, Homo sapiens
cctttcctacacatcaagctcgagtcctgcccaagactggcaaattgagtcagaaaactaaaatacctcctagtctaggtagacactttcactggatatgtagaggcctttcctacagggtctgagaaggccaccgcagtcatttcttctgtcagacataattcctcggtttggccttcccagctctatgcagtccgatagcagaccggcctttactagtcaaatcacccaagcagtttctcatgctcttggtattcggtagaaccttcatatcccttacagtcctcagtcttcaggaaaagtagaacagactaatagtcttttaaaaacacacctcaccaagctcagccaccaacttaaaaaggactagacaatactttcaccactttcccttctcagaattcaggcctgtcctcagaatgctacaggctacagcccatttgagctcctgtatagacgctcctttttaytaggccccagtctcattccagacaccagaccaacttaggctgtgcccccaaaaaacttgtcatccctactatcttctatctagtcatatgcctattcaccattctcaactactcatacatgccctgctcttgtttacactgctggtttacactgtttctccaag

SEQ ID NO: 941168 - DNA, 728 bp, Homo sapiens
cttgtggagggaattctgccaggcttcatgatggatactgatagaaaacgtaacagcaaccctttaaggaaggaactttcatccccgttttctaggtgaggaaaccaaggcccagagcagggctgccttgtatccaactccaaggtgaaaggaggcagcttgctgcatttaaacgtgggtctgcttccaagcccagcaatgatcaagccggctatagtgggcgcagcagagtggcagcatgaatctgagattggtcgcagtgtcttgtgcctactgaggagcaggggccatgtccctccccctacacctagcactgagccacactgagcacgctgtttcttaatctgactggtccccatttcttcyccttgcacatactgttctgtccacctggaatgtagccttgccactgctttcccacttggcagactctctgtgtgtccttcacagcccagctccaatgtcacctcctgggaactcatctttttttgtacccaggcaaaactggaaatctttccctccagggttctcacagtgcctcataccagccccctgttgaagcccagaccacactagcctctcatcttcatctgcctccccactgcccccaccccactgtactggaaactccttccttggtgtcaggactgggtccagtttcatccggggccccagctctacttagcatgagacctagagcatgggtcactggtattttagtcagtcct

SEQ ID NO: 941169 - DNA, 728 bp, Homo sapiens
cttgtggagggaattctgccaggcttcatgatggatactgatagaaaacgtaacagcaaccctttaaggaaggaactttcatccccgttttctaggtgaggaaaccaaggcccagagcagggctgccttgtatccaactccaaggtgaaaggaggcagcttgctgcatttaaacgtgggtctgcttccaagcccagcaatgatcaagccggctatagtgggcgcagcagagtggcagcatgaatctgagattggtcgcagtgtcttgtgcctactgaggagcaggggccatgtccctccccctacacctagcactgagccacactgagcacgctgtttcttaatctgactggtccccatttcttctccttgcacatactgttctgtccacctggaatgtagccttgccactgctttcccacttggcagactctctgtgtgtccttcacagccyagctccaatgtcacctcctgggaactcatctttttttgtacccaggcaaaactggaaatctttccctccagggttctcacagtgcctcataccagccccctgttgaagcccagaccacactagcctctcatcttcatctgcctccccactgcccccaccccactgtactggaaactccttccttggtgtcaggactgggtccagtttcatccggggccccagctctacttagcatgagacctagagcatgggtcactggtattttagtcagtcct

SEQ ID NO: 941170 - DNA, 738 bp, Homo sapiens
ccccagggatgacttcagaggctccagacccctggaacatcagatgcagacctcagtaaaacagggcctgtgataatagcacttacctcacatagccagtgtcattcactcatgctctaccaacataatttttgccagatccatggatcatttgtattattttccacttaatgtttttatttaaattgctttgttctaagtaatatgaaatcatagggcttgtaaaaattattttgaataggtgattccattcacaccattcagaattcaaaaaagtgccaaaggctataaaatgaaatctccctttcaccctgtccccagtcacccaggcccccccggggttagaatgttacctttcttgtacattcttgttttttgtttttttgttttttgttttttttttttgagacagagtctgctctgtcgcccaggctggagtgcagtggcaccatctcggctcacttcatctcccagataaagtgattcttgtccctcagcctcccaagtagttgggactacaggcaygcaccaccatgcccagctaatttttgtatttttagtagagacagggttttgccatgttggccaggctggtctctaactcctggcctcaagctgagattatagatgtgagccaccgtgcctagcctcttgtgcattcttttaaatagatgtgtatattctccccctacccccagccaatttttttttttaacccaaaaggtagcatacaatata

SEQ ID NO: 941171 - DNA, 783 bp, Homo sapiens
tgtagaagcagaaattaatttatcatgaatgggaggggaagtagagatattatcttatgtatcctgattatgtgtccggcaatttggcaatctttatgtatatgttttcttatttaattttcacaacagatcttggagttaggcagaatcgttacgcttactggattgacagggatacggaggcttataacaattaaatatctccagtaagtccacaccatagggtacctgatatctgaacccagttctgtctgacgtggaacatggggtcccacaaggggggcaagacttccacagattcttgggtcagtattattttcatgagggtacattgcctcttcctcactgttaagaaagcagattgcagccaggcgcagtggctcacacctgtaatcccagcactctgggaggccgaggcgggtggatcacgaggtcaggagatcgagatcatcctggctaacacggtgaaaccccgtctctactaaaaatayaaaaaattagccgggggtggtggcgggtgcctgtagtcccagctcctcgggaggctgaggcaggagaatggcgtgaacctgggaggcatagtgtgcagtgagccgagatcgcgccactagactccagtcagggtgacagagcaagactctgtctcaaaaaaaaaaaaaaaagcagattgcagggaatattactcagccataaaaggaatgaggtacagatgcatactgtggtgcagatgaaccctggaaacattatgctaagtaaaagaagccagcatgaaaggtcacatgt

SEQ ID NO: 941172 - DNA, 551 bp, Homo sapiens
cctcgtggaagtcgaatccaggggtggtggggacactgatgattctccagatatcccagggagtggaactacctccacctccaagacagagacagcaaagccccagatcaggtctgccaccaagaaaacagatccggctgggcatggtggctcacgcctgtaatcctagcactttggaagaccgaggcaggaggaccacttaggagcccaggagtttgagaccagcctaggcaacatagtgagaccccatctctaaaaaaaaaaaaaaaaaaaaaaaaaaaaaaaaaaaaaaaaaaaaagaaaatgacagatccagccakgcctggccagagcctccatctgtcatgctctgctcccgggcagaccctgggattcgatctcaccaggacaccccccttctttagttgtattggaaggcaaagccaacttttcccgggacgggggacttgggtgggctctgacctcactatgggcaccccagcatcggtaggggttacgtaaaagtatggagctccgggctcatctttcaccccccacaggtggcagcacag

SEQ ID NO: 941173 - DNA, 432 bp, Homo sapiens
agacatttggtggggcaggaagctgggggcgcagcaaagctggttccacggcccccacaggtgaggggacacctggcctggtgatcagtctctgtgtcacgacgtgggtagaagctggggccacaggaggctttcactcgctcctcttctracatcagtactattgaatacttgggcagagaggcattttcttcttgctttgtgcactgttggtgtaaggggagagagtgaagggaaggagaaaagcctccagtgtggatagcccctttcatgaaggcctgcaggcacccctccatctgaagagccctgtcctgagctggggactggcgggatggcccctccccattgcagatctgcttggtgtgattttgggaattccttaccgagtattcggatctaaagattccatttaggctgggtgcagtggctcat

SEQ ID NO: 941174 - DNA, 647 bp, Homo sapiens
agacatttggtggggcaggaagctgggggcgcagcaaagctggttccacggcccccacaggtgaggggacacctggcctggtgatcagtctctgtgtcacgacgtgggtagaagctggggccacaggaggctttcactcgctcctcttctaacatcagtactattgaatacttgggcagagaggcattttcttcttgctttgtgcactgttggtgtaaggggagagagtgaagggaaggagaaaagcctccagtgtggatagcmcctttcatgaaggcctgcaggcacccctccatctgaagagccctgtcctgagctggggactggcgggatggcccctccccattgcagatctgcttggtgtgattttgggaattccttaccgagtattcggatctaaagattccatttaggctgggtgcagtggctcatacgtgtaatcccagcactttgggaggctgaggtgggtggatcacctgaggttaggagttcaagacaagcctggccaacatggcaaaaccttgactctactaaaaatacaaaaattagctaggtgtggtggcacacccctgtagtcccagctactcgggaggctgagatgggacaatcgcttgaacctaggaggtagaggttgcagcgagctgaga

SEQ ID NO: 941175 - DNA, 647 bp, Homo sapiens
agacatttggtggggcaggaagctgggggcgcagcaaagctggttccacggcccccacaggtgaggggacacctggcctggtgatcagtctctgtgtcacgacgtgggtagaagctggggccacaggaggctttcactcgctcctcttctaacatcagtactattgaatacttgggcagagaggcattttcttcttgctttgtgcactgttggtgtaaggggagagagtgaagggaaggagaaaagcctccagtgtggatagcccctttcatgaaggcctgcaggcacccctccatctgaagagccctgtcctgagctggggactggcgggayggcccctccccattgcagatctgcttggtgtgattttgggaattccttaccgagtattcggatctaaagattccatttaggctgggtgcagtggctcatacgtgtaatcccagcactttgggaggctgaggtgggtggatcacctgaggttaggagttcaagacaagcctggccaacatggcaaaaccttgactctactaaaaatacaaaaattagctaggtgtggtggcacacccctgtagtcccagctactcgggaggctgagatgggacaatcgcttgaacctaggaggtagaggttgcagcgagctgaga

SEQ ID NO: 941176 - DNA, 664 bp, Homo sapiens
gccccactgcagcagcactcgcctgccaagtccaccaagctccagtaggaggcagcatttactcctgcctgtttcccgccctcacccgggacagcagtggcagcctaggccttgctgtgctgggcacagggctcctggccatgctggggtgtgctgcaggtctgcggggcctgtcccctctttccagtctgaaccacaggtgggaggcccctgaaggactggctccaaagcaggactcagagaggacagcacagagcagtgcttgggccagcagggctgtaccaggccaccttyctggaatgcagaaagaatgtgtcccctggcacgcaggcacacaaaattgagagaggcagcaagcaagctcattctgttgccaaagcaccctgtgtccaaggcccacttgctggggggctgggctcagcagcaggctgtccctccctgctacgagctatcaaggacctgtttgtaaatggcaggtaaacaagccaaccagtgagggccaaaccccaggacagttgcagtcctgctggccacctctgacaaggaacgtggactgaactagccccactctggtctcaccgcgacaggctgcaagcctccaggactagtggatctcccactgcctgtcctgcgctgaggctccctttgcccctgggctgaaggt

SEQ ID NO: 941177 - DNA, 635 bp, Homo sapiens
taccccagtggctcctggaatgccaacaagacagaaccattcactcccctggaaagaaggctgaagccagggagccaagtggtcttgctcagcagattgcacccccacagaccccagcaagctaagatccactggcttgaaattcttgctgccagcacagcagtgtgaagtggacgtgggactctcgagcttggtggggggaggggcgtctgccattactgaggcttgaataggcagtttttccctcacagtgtaaacaaagcctccgggaagttcaaactgggtggagcccacagcagcttgccaaagccgctgtagccagactgccttgctagattcttgctctctgggcggggcatctctgaaagaaaggcagcagccatagtcaggggcttatagataaaactcccatttccctgggacagagcacctgggggaaggggyggctgttggcgcagcttcagcagacttaaatgttcctgcctgccagctctgaggagagcaatgtatctcccagcacagcgctcaagctctgctaagggacagactgcctcctcgagtgaatccctgaccctcatgtctcctgatagggagacacctcccagcaggggtcgacagacacctcatacaggaga

SEQ ID NO: 941178 - DNA, 629 bp, Homo sapiens
ctgctctttaacacaatggccatttctggaaatgcatggatgtgggaaataattgcgtttctattgaagctattagaatgaatcacaattggatttcacataaaagattttaatgcacagatatttcacatatgttcatagttaaggtttcttcaaataaagctgctttgtccttaagggattttagtcaggtttacctccagttaratcagatattcttgctttttctttttgttttctttttaaatttcctacttaaattgtttgtaggcaatgtgataacacctatagttcttattatgttcaggctgaaaaagaaggatggacctcctcattcaaaatttggtctggatgtcaagactgataccatatgcacaacaaaagaatatgaaagatttattactcacatacacacgctttcgggggagagcagggcaggcccccaagctgtccaaaatgtcttgggaaataaggaaaggggaatggtttggggtttttatggtgattacataggtaggaccaggtgatcgctcctgcaggtggtttcttcctaacagtcaaaggaagcacctgggctttgttttcagcatgactgtatatgctccaggaggggaagggagaggggaaga

SEQ ID NO: 941179 - DNA, 607 bp, Homo sapiens
ctgagaggaattatccactccagtggttggaacctgagttttggcaagcaccctcacatagctaaagtgttctggggtcctaaataaatttgaaaggcatcccatgtcacaaggactgcaattcctgggcaagtctttgtgctgtgctgggctcagagccagtaaacttgggtgcacaacctagtgagacaccagccaggacagcaagggagtgcttgcatcactcttcctttaatcccaggtagcagctctgggagagacttcttcattctccttgaggaaagtaaagaggactttgtcttgcaacttggataccagctcagtcatggcagaatagggcactaggcagagtcccgaggccccctttctaggccctaccactcaggaaacatttctagacacascctggggcaagagggagcctgctgccttgaagggaaagagccagttttggcaggatttatcacctgctgactaaagagcccttgggccttgcataaacaacagtggtacccagggaatgctcacacaggccttggatgagacccaggcccatgctggcttcacgggtgacccagtgtattcccggctgtaatagccacaagga

SEQ ID NO: 941180 - DNA, 583 bp, Homo sapiens
gggaaaagccccttataaaaccatcatatctcatgagaactcactcactatcacaagaacagcagcatgtggttaatcacccccatgattcaattacctccccccaggtccctcccatgacacatggggattatgggaactacaattcaagatgagatttgggtggggacacagccaaaccatattattccactcttggcccctcccaaatctcatgtcctcacatttcaaaacacaatcatgcctttccaacagtcccccaaagtcttaattcattccagcattaacccaaagtccaaatccaaagtcttayctgagacaaggcaagtcctttccatgtatgaacctgtaaaatcaaaagcaagttagttacttcctagatataatggaagtacagacattgggtaaatacacctgttccaaatgggagaaattggccaaaacaaaagggctacaggcccatgcaagtccaaaatccagcagggcagtcaaatcttaaagctctgaaatgatctcctttgattccatgtctcacatccaggtcgcactgagacaagaagtgggttcccatggccttggtcag

SEQ ID NO: 941181 - DNA, 583 bp, Homo sapiens
tggctttgcagggtacatccctcttcccggctgctttcatgagctggtattgagtgtctgcaacttttccaggtgcacagtgcaagctatcggtgatctaccattctggggtctggaggacagtggccctcttctcatagctccactaggcagtgccccagtggggactccatgttggggctccaaccccacatttaccctctgcactgccctagcagaggytctcaattaggaccacacccctgcagcaaaattctgcctggacatccaagcttttccatacatcctctgaaatctagacagaggctcccaaacctcaattcttgacttctgggcacctgcagggtcaacaccacatagaagctgccaaggcttggggcttgcaccctcttgagccatggcctgagctacaccttggctgcttttagccatggctggagctgctgggacacaaggtaccaagtccctagattgcacacatgggcctggcccatgaaatgatttttattctcctaggcctccaggccagtgatgggaggagctgcccacaaaggtctctgacatgcccttgagacattttccc

SEQ ID NO: 941182 - DNA, 774 bp, Homo sapiens
ctgccttacaaatctacctttcattcagggtccaggaacccactagctgggactggttatgttgtcaaaccgtaatcatcaaactaaggaaaaagaccagtctaaaacatcaaaattggggatacatgtattacttttaaattctgagggtaactcatagtatgtgagctggatttgctacaaaacacttcttctggggacctgcttgaaaggctagataaaacaatttttgtttggcatgtgcaaaatttatatgtaaagagctatgtttaaagactttaaagatgttcaaaaacaaattattcttttaacattttaagcactattcttacaatcttgttttcacattattgcattaaacacttccattattatccacaaagaaaagattttttgagtaatattaaacaccactccagtyacttctgaaataaagcaaagtgtgaattaatagagtttaaattaatgaagactttctctaagttataaaatttagagtaaaattataaaatttagagtaaaatcattaaaagttttctaggccggacgcggtggctcatgcctgtaatgccagcactttgggaggctgaggcgggcagatcatctgatgtcaggagttcgagaccagcctgaccaacatggagaaaccccatctctactaaaaatacaaaattagcctggcgtggtggcacatgcctgtaatcccagctactcaggaaggctgaggcaggagaattgcttgaacctggtagggggaggttgcggtgagctgag

SEQ ID NO: 941183 - DNA, 774 bp, Homo sapiens
ctgccttacaaatctacctttcattcagggtccaggaacccactagctgggactggttatgttgtcaaaccgtaatcatcaaactaaggaaaaagaccagtctaaaacatcaaaattggggatacatgtattacttttaaattctgagggtaactcatagtatgtgagctggatttgctacaaaacacttcttctggggacctgcttgaaaggctagataaaacaatttttgtttggcatgtgcaaaatttatatgtaaagagctatgtttaaagactttaaagatgttcaaaaacaaattattcttttaacattttaagcactattcttacaatcttgttttcacattattgcattaaacacttccattattatccacaaagaaaagattttttgagtaatattaaacaccactccagttacttctgaaataaagcaaagtgtgaattaatagagtttaaattaatgaagactttctctaagttataaaatttagagtaaaatyataaaatttagagtaaaatcattaaaagttttctaggccggacgcggtggctcatgcctgtaatgccagcactttgggaggctgaggcgggcagatcatctgatgtcaggagttcgagaccagcctgaccaacatggagaaaccccatctctactaaaaatacaaaattagcctggcgtggtggcacatgcctgtaatcccagctactcaggaaggctgaggcaggagaattgcttgaacctggtagggggaggttgcggtgagctgag

SEQ ID NO: 941184 - DNA, 554 bp, Homo sapiens
tgccaccattattgaggggttctctgtcattagccaacagacctgctattaactgagtaaatgacccattattgtcattcaagcatcaaggaaagtctgtgtctcaatgccttttcatgctccctgggaaaagctgtgagtggcttgaggaggctgagatagagaatatatttgttctattgctgctgtaatatattactacaagtttaggggcttaaacaatagaaatttattatcttataattctggagagcattagtctcaaatgggtctcactgggctaaagtcaaggtacaagcagggctgtgttcctttttgaggctctgagagttcactttctttcattttctagcttctggaggctgtcarcttttcttggctcttggccctttcctccatctttaaagctggcaaaggtgagtggagcccttctcatgtcacatcactctgacctcctctgaagtcacatcttcctctgactgacttctgcccaccccttccacttttaaggacccttgtaactacattgcgcccacacagataatccaggataa

SEQ ID NO: 941185 - DNA, 578 bp, Homo sapiens
tagaaaaacagctattttatattcgatgaagattaaaaagaaagtttgttgcactgtcagaaacatctctaggatgctctaggtatctgtatgttcaaagcatacacacaagtttaacaggtggggaaagatgtatttttgaaatctggtgtttgacttccaacttgagaaggcgaggctcagtgggagagacggagagcaggaaggctgagcagggtcagacacccggggtctcacgctggctctgccacttacctgctgtgtgaccttggccaagttatttaacatttacatatgtaaatattattctgaaaagtgagaaacaataatagtcgcctttaggtctataaatgtytctttttaaaaattccttgagaataagaactctacacagagttgtagtagaagcaatcaaaaaggggaagctatttatattaaatatgaataatgaaaacataatttttcatgaaatgaaatacaatgattgttgggtgtggtggtgcacacctgtaatcccaggactcaggaggctgaggcaggagaatcgcttgaacctaggaagctaaggttgcagtgag

SEQ ID NO: 941186 - DNA, 578 bp, Homo sapiens
tagaaaaacagctattttatattcgatgaagattaaaaagaaagtttgttgcactgtcagaaacatctctaggatgctctaggtatctgtatgttcaaagcatacacacaagtttaacaggtggggaaagatgtatttttgaaatctggtgtttgacttccaacttgagaaggcgaggctcagtgggagagacggagagcaggaaggctgagcagggtcagacacccggggtctcacgctggctctgccacttacctgctgtgtgaccttggccaagttatttaacatttacatatgtaaatattattctgaaaagtgagaaacaataatagtcgcctttaggtctataaatgtctctttttaaaaattccttgagaataagaactctacacagagttgtagyagaagcaatcaaaaaggggaagctatttatattaaatatgaataatgaaaacataatttttcatgaaatgaaatacaatgattgttgggtgtggtggtgcacacctgtaatcccaggactcaggaggctgaggcaggagaatcgcttgaacctaggaagctaaggttgcagtgag

SEQ ID NO: 941187 - DNA, 599 bp, Homo sapiens
atcattatttctttttaaaaatttttaacttaagtttgggggtacatgtgaaggtttgttacataagcatgtgtcacggcggtttgtcatacatattattacatcacccagttattaagctcaggacccaatagttatcttttctgttcctctccctcctttgacccttcctgctcaagtagaccccagtgtctgctgtttccttctgtgttcctgagttcttatcatttagctccaacttgtaagtgagaacatgcagtatttggttttctcttcctgcattagtttactaagggtgatagcctccagctccatccatgttcccacaaaaggcataatctcatttttttatggctgcctaayattccatggtgtatatgtacattttccttatccagtctgtcattggtgggcatttaggttgattccgtgtcttaactattgtgaaaagtgctgcaatgaacatttgtgtgcacgtgtctttttttttttttttgagacagagtttcgttcattgcccaggctggaatgcaagggcacaatcttgggtcaccacaacctctgcctcccaggttcaagcagtcctcctgcctcagcct

SEQ ID NO: 941188 - DNA, 786 bp, Homo sapiens
agattgtgcccaccagatgaagggtgtgtctgcctttcccagcccactgactcaaatgttaatctcctttggcaacaccctcacagacacatccaggatcaatactttgcatccttcaatccaaccaagttgacactcagtattaaccatcacactcatgatccccaggaataggcaatgcaaaaaggacttcatcatgtcacattataatcagactgtctaaagtcaaagtggaagaacacattctgtaatcagccagagaaaagcatccagttacttataaaataaatctatcaggctaacattgaagttctcagtggaaaccttacaggccataagagaatgcggcaacatrtccaaactgttgaaataaaaaataaataataaccacccaagaattctatatctagcaaaactaactctcgtaaaagaaacagaggtaaggtctttctcggacaaacaaaggctaggggaaatcaccactagaccagtcctacaagatatgctcaagggagtcctaaattgaaagtgaaaggacaaaatttagcaacatgtaaacccaaaaatgtataaaactcatggtaaagcaaccacacaaaagaagaagggaaaggaatcaaagataccactacagaattctactaaaccacaattacaaacagagagagagagagagagagaaagaaagaaagaacaaacttataagacaactagaaaacaattaatgatatgacaggaagaaagcctcatatatcagaataaatcctgaatgtaagttgaataaat

SEQ ID NO: 941189 - DNA, 689 bp, Homo sapiens
acagtcaattaacacataatttgttttatttatttatttagagatgggatcttgctctgttgcccaggctggagtacagtggcatgatctcagttcactgaaacctcaacttcctgggctcaagtgatcctcctgtctcagtctcctgagtagctgggatcacaggtgtgagccaccatgcctggctaatttttttgtggacatggggtttcactatgttgccgagkctggtcttgaactctggagctcaaacaatctacttgccttggtctcccaaagtgctgggattatgggcatgagccaccacacctggccataatttgtatgtgtattataactatattcatacaataaagtaagctagagaaaggaaaatgttattatgaaagttgtaagtgagagaatacatttactattcattaggtagacgtagatcatcataaaagtctttaccctcatagcctttacattaagtaggctgaggaggtgggagagaaggggttggtcttgtcttggagtggcagaggcagaagaaaatctgcatataagtaggcccaagcagttcaaccccatgttgtttaagggtcaactgtatttcaaatgaggaaagcttgggctagacttagagaaaggtaagcaggagaaaagtaatcattagcatgaaatacctctgaattagaatgctgtcc

SEQ ID NO: 941190 - DNA, 755 bp, Homo sapiens
tggctgtgggacatgagcaggtcacgttccctctctgggcctcagcttcccaacctttcagggatgaataaggaaagatccttgaagttacagatctggaaagcgccataaggtaaaacatcatcaggacactgaaggtataccacaggacacactctacaaatgaggagaaagcttatgaaaaaagacttagtggcccagtgcggtggctcacgyctataatcccaacactttgggaggccgagcaggcggattgcctaaggacaggagttcgagaccagcctggccaccatggtgaaaccctttctctactaaatatacaaaaattagccaggtatggtggcaggcgcctgtaatcccagctacttgggaggctaagacaggagaatcgcatgaacctgggaggaggaggttgcagtgagccaacatcgcgccactgcactccagcctgggcaagaagaatgaaactctgtctcaaaaaaaaaaaaaagaaaagaaaaagaaaaaaagacttagtggcattttctctgagccttgaagaatgagtagaatttcagcaagttgaggtggaggtgagggagggcactcgaggcagagagaacagcctgagcaaaggccaggaggcggaaagttcagggtgggttcagggaagaaggagtgtccagtttctttctaagtcaacagctcaagggctttttgtaagtgggctgtccaagcggagcagcctccagtaaacacctgtttgcacaatcgag

SEQ ID NO: 941191 - DNA, 731 bp, Homo sapiens
tgggaggttgccgaggcacccaaggagttcccgtcccaactcagaaggggcggggctcccaccagctccatagagtgttcgaccccagccacacctccctgctgcagccagtgtgatggcagcagccactgccaccacttctaggtgccctttcctcgtggggttgtacagacggggccagcttctctcagcagcgatgagtgacaatacatacagagtatgcagacctgagaagagctcctgagccttcctatccagagggtttactggaggtcagttgcatagccatggctgactacccacgtggctgactttagtctttttwaaatttttattttgtttttaattttttgagacagaatctcgctctgccatccaggctggagtgcagtggtatgatctctgcccactgcagcctccacctcccaggttcaagcgatgctcctgcctcagcttcccgagtagctgggattacaggcacccgcaaccacgcccagctaattttgtatttttagtagagacggggtttcaccatgttggccaagctggtctcgaactcttcacctcaagtgatctgcccacttcggcatcccagagtgttgggattacaggcgtgagccactgcacctggcctgactttagtcttgagcccctccagaggctgaactgattaccacatggtccaaggccaccagcattaatcacgttttcagcaaaggctatacggcaag

SEQ ID NO: 941192 - DNA, 731 bp, Homo sapiens
tgggaggttgccgaggcacccaaggagttcccgtcccaactcagaaggggcggggctcccaccagctccatagagtgttcgaccccagccacacctccctgctgcagccagtgtgatggcagcagccactgccaccacttctaggtgccctttcctcgtggggttgtacagacggggccagcttctctcagcagcgatgagtgacaatacatacagagtatgcagacctgagaagagctcctgagccttcctatccagagggtttactggaggtcagttgcatagccatggctgactacccacgtggctgactttagtctttttaaaatttttattttgtttttaattttttgagacagaatctcgctctgccatccaggctggagtgcagtggtatgatctctgcccactgcagcctccacctcccaggttcaagcgatgctcctgcctcagcttcccsagtagctgggattacaggcacccgcaaccacgcccagctaattttgtatttttagtagagacggggtttcaccatgttggccaagctggtctcgaactcttcacctcaagtgatctgcccacttcggcatcccagagtgttgggattacaggcgtgagccactgcacctggcctgactttagtcttgagcccctccagaggctgaactgattaccacatggtccaaggccaccagcattaatcacgttttcagcaaaggctatacggcaag

SEQ ID NO: 941193 - DNA, 619 bp, Homo sapiens
aaagaaaagaaaatgaataggaaataagtaattgataaaaatagacaattcataggcggagaaacctgaaaggctaataaatatatgaaaagatgttcaacttcactattaataatagaaatacacattaaaactataccgagaccatttttgcaatagtttcacagttgtgcaaccatcactacaatgaattttctttccttatttgagatggaatttccctcttgttgcccaggctggagtgcaatggcgctatcttggctcactgcaaccttcacctcccgggttcaagcaattctcctgcctcagactcctgagtagctgggattacaggtatgtgccaccacacctggctaattttgtagttttagtagagacagggtttcaccatgttggtcaggctggtctcgaactcctgacctcaggtgatccacccacctcggcctcccaaarttctggggttacaggtgtgagccaccgtgtccagcacaatcaattttagaacgtttcatcacccccaaaataaatacagtagcctttagttatcatccttagcccctctctccctgcaccccacattcttgcaaaacagtaatctactttctgtatccatagattt

SEQ ID NO: 941194 - DNA, 714 bp, Homo sapiens
ccctcatctctgctgtcaaaatgcaaccttccctcaagagtcatttcacaggacccctctttctatgaagccctcaggtggaaataattttttgcctttttttccattttatttttggagtgtttatggcatttaacataccttactttgtatacaaatatttgccttgctccctcttttgcaaatttcttaaaggtagagaccattgtatgttttcttcatatgttgctggtgcctaacagaactatggccattgtccacattcatttagcagcctttgtagttattgctttgaggagcttyctctcatgaatgcccttgctttctctcccacagagtcatccccctatatatgacctgactgccatgaaagtgcctactgctatttgggctggtggacatgatgtcctcgtaacaccccaggatgtggccaggatactccctcaaatcaagagtcttcattactttaagctattgccagattggaaccactttgattttgtctggggcctcgatgcccctcaacggatgtacagtgaaatcatagctttaatgaaggcatattcctaaatgcaatgcatttacttttcaattaaaagttgcttccaagcccataagggactttagaaaaaatagtaaccaacaatgaggttgtcccccagcaccctgggggagatgcacagtggagtctgttttccaagtcaattgtgttag

SEQ ID NO: 941195 - DNA, 767 bp, Homo sapiens
ataccttactttgtatacaaatatttgccttgctccctcttttgcaaatttcttaaaggtagagaccattgtatgttttcttcatatgttgctggtgcctaacagaactatggccattgtccacattcatttagcagcctttgtagttattgctttgaggagcttcctctcatgaatgcccttgctttctctcccacagagtcatccccctatatatgacctgactgccatgaaagtgcctactgctatttgggctggtggacatgatgtcctcgtaacaccccaggatgtggccaggatactccctcaaatcaagagtcttcattactttaagctattgccagattggaaccactttgattttgtctggggcctcgatgcccctcaacggatgtacagtgaaatcatagctttaatgaaggcatattcctaaatgcaatgcatttacttttcrattaaaagttgcttccaagcccataagggactttagaaaaaatagtaaccaacaatgaggttgtcccccagcaccctgggggagatgcacagtggagtctgttttccaagtcaattgtgttagtgttatttatgtttagagacatctttgcatgggaccatctacaggtccttataaacaatgaggtagattaggcaaaaagataaacaagttgctactctatctggcatttaagtctaattaaattgtaatttttagggcataccatgaagtatagaaatgtctgaagcttcaaaggaacagtgaaattcct

SEQ ID NO: 941196 - DNA, 572 bp, Homo sapiens
ttccagtactatgttgaatagaagtggtaagagtgggcatgcttgtcttgttccagttctagggggaaatgctttcaacttttccccattcagtataatgttggctgtgggtttgtcatagatgatttgtattaccttaaggtatgtcccttctatgccgattttgctgagggttttaatcataaagggatgctgtattttgtcaaatgctttttctgcatctattgagataattatgtgatttttgttaattctatttatgtggtgtgtcacatttactgacttacatatgttaaaccatccatatgttaaactgggtatgaaacccagttgatcatgayaaattatgtttttgatatgctgttggattcagttcactagtattttgttaggatttttgcatctatgttcatcagggatattggtttgtagtttttgtttcttgttatgtcattttctcattttggtattagggtgatactggcttcgtagaataatttatggaggattttctgtttctctatccttggaatagtgtcagtaggattggtaccaattttttgaatgtctga

SEQ ID NO: 941197 - DNA, 572 bp, Homo sapiens
ttccagtactatgttgaatagaagtggtaagagtgggcatgcttgtcttgttccagttctagggggaaatgctttcaacttttccccattcagtataatgttggctgtgggtttgtcatagatgatttgtattaccttaaggtatgtcccttctatgccgattttgctgagggttttaatcataaagggatgctgtattttgtcaaatgctttttctgcatctattgagataattatgtgatttttgttaattctatttatgtggtgtgtcacatttactgacttacatatgttaaaccatccatatgttaaactgggtatgaaacccagttgatcatgataaattatstttttgatatgctgttggattcagttcactagtattttgttaggatttttgcatctatgttcatcagggatattggtttgtagtttttgtttcttgttatgtcattttctcattttggtattagggtgatactggcttcgtagaataatttatggaggattttctgtttctctatccttggaatagtgtcagtaggattggtaccaattttttgaatgtctga

SEQ ID NO: 941198 - DNA, 760 bp, Homo sapiens
taacccacaagtataagatacctctactccctccttggagactgatcatgcaccccttaccatctcattaaaacctaatcacccttaccacccacaacaccaatatcccatcccacagcatgctttaaaaggattaaagcctgttatcacttgcctgctacagcatgggcttctaaaacctataaactctccttacaattcccccattttacctgtccaaaaactggacaagtcttacagattagttgaggatctgcgccttatcaaccaaattgttttgcctatccatcctgtggtgccaaacccatacactcttttgtgctcaataccttcctccacaactcactattctgttctsgatcttagagatgcttttttcactattcccctgcaccctgcgtcccagccttgctttgctttcacctggactgaccctgacacccattaggctcagcaaattacctaggctgtactgccacaaggcttcacagacagcccccattatctcagtcaagcccaaatttcatcctcatctgttacctatctccacataattcacataaaaacacacgtgctctccctgctgattgtgtccgattaatctcccaaacctcaatcccttaaaaaacaactcctttcctgcctaggcatggttagtgcggtcagaattcttacacaagagccaggacctcaccctgtagcctttctgtgcaaacaacttgaccttactgttttagcctagccctcatgtctccatgca

SEQ ID NO: 941199 - DNA, 760 bp, Homo sapiens
taacccacaagtataagatacctctactccctccttggagactgatcatgcaccccttaccatctcattaaaacctaatcacccttaccacccacaacaccaatatcccatcccacagcatgctttaaaaggattaaagcctgttatcacttgcctgctacagcatgggcttctaaaacctataaactctccttacaattcccccattttacctgtccaaaaactggacaagtcttacagattagttgaggatctgcgccttatcaaccaaattgttttgcctatccatcctgtggtgccaaacccatacactcttttgtgctcaataccttcctccacaactcactattctgttctggatcttagagatgcttttttcactattcccctgcaccctgcgtcccagcctygctttgctttcacctggactgaccctgacacccattaggctcagcaaattacctaggctgtactgccacaaggcttcacagacagcccccattatctcagtcaagcccaaatttcatcctcatctgttacctatctccacataattcacataaaaacacacgtgctctccctgctgattgtgtccgattaatctcccaaacctcaatcccttaaaaaacaactcctttcctgcctaggcatggttagtgcggtcagaattcttacacaagagccaggacctcaccctgtagcctttctgtgcaaacaacttgaccttactgttttagcctagccctcatgtctccatgca

SEQ ID NO: 941200 - DNA, 644 bp, Homo sapiens
gactagccctccaccacctgcccagcaatttactcttaaaaaggttgctggagccaaaggcatagtcaaggttaatgctcctttttctttatcccaaatcagaagtgtttaggctccttttcatcaaatataaaaacccagcccagtttatggctcgttccacagcaaccctgagacgctttacagccctagaccctaaaaggtcaaaaggccatcatattctcaatatacattttattacctaatctgctcccgacattaaataaaactccaaaaactggaatctggccctcaaaccccacaacaggacttcattwatctcaccttcaaggcgtacaataataaaaaaaaagttgcaattccttgcctccactgtgagacaaaccccagccacatctccagcacacaagaacttccaaacgcctgaaccacagcagccaggagttcctccagaacctcctcccacaggagcttgctacaagtgccagaaatctgaccaccaggccaaggaatgcctgcagcccaggattcctcctaagccgtgtccatctgtgcgggaccccactggaaatcggactgttcaactcacctggcaggcactcccagagcccctggaattctggcccaaggctctctgactcctt

SEQ ID NO: 941201 - DNA, 638 bp, Homo sapiens
accttagaagcagcctgagaagcaaaagtttctctctgagttccccctgtcctcctgcctctggtacctcattctcccctgaggctagtcatggaagccagaatctctcttctccaagtggctcatagaaagcagaactcctttccctcaaagccaggcataaaatctaaaaatattactctaattttccccatgtctttctgtgtaaaactggccagaaagaaatgatctgacctacaatgtttgactgtcataagacccccattcctgggaggatccttccccatgctcaaaaagaaggaatgctacacagggaggccaagaagaatctaaacagagaggccttgctggatttccccattacgtctactcagattagatcataccccttttgtccaatcatatttctacagagttgtccataccttgtcraacctaagcagaaaaaaggacaatttccccgtactttgggtcttaattctgaaggctaccgtgtcacataaaactatgatcagataaatttgtatgcattttcttttattactctgcctcttgtcagcgatttttagttaaccttcagagggtgaagagaaagtttctccttgtcccctataatagatacagaagggctggtcatt

SEQ ID NO: 941202 - DNA, 737 bp, Homo sapiens
agtaaaaatgaaagtgagaactcccactattgagtgagactctcaaaggggggaataagggagtagaccacccctcatattgtcttatgcccaatttctgcctccaaagaaaaaaaaagtaaaaactaaaaggcattttttctttccacaagcagacagcccatcgccgcaccctgggcctggtagttaaagattgacccctgacrtaatcggttatgttatctatagattacagacattgtatagaaaagcactgtgaaaatccctgtcctgttttgttccgatctaattaccagcccccagtcacgtaccccctacttgctcaatcgatcacgaccctctcacgcgcacccccttagagttgtgagcccttaaaagggacgggaattgctcacttggggagctcggctcttgagacaggagtcttgccgatgcccctggtcgaataaaccccttccttctctaactcggtgtctgaggagttttgtctgcggctcttcctactacacatccacatcagtacttcttacaaacagcatccttgaatagtcagagggggtgctctggaagcacaggaatccccctctctggggctctggtttgtttacacttacacaatgccctggggctggtgactttagatgtgaggtgtggaggtgaggaggatacaaaagagcgcagaaatacacttgtggaggaggagggagccgagcacaggagcaacggcagaggaatga

SEQ ID NO: 941203 - DNA, 760 bp, Homo sapiens
aagtctgtaggaaatttaaccttattaattgctgcctacacatagataatcaagggcaagtatttgaagacatagttagagatatgacaaaactggcacacgtgcccatgcaagtgtgacggatttgatcctggggccatgtttagaaaatggttcccagagctaggaggatttaaaactcttataataagagttataatagtaataggaacctacttactgctcctttgtttgctacctgtacttcttcaaatgataaaaagcttcatcactaccttagttcaccaaaagcttcagcacaagtgtactatatgaatcactattgatctgtcttgccagaagacatgggtagtaaaaatgaaagtgagaactcccactattgagtgagactctcaaaggggggaataagggagtagaccacccctcatattgtcttatgcccaatttctgcctccaaagaaaaaaaaagtaaaaactaaaaggcattttttctttccacaagcagacagcccatcgccgcaccctgggcctggtagttaaagattgacccctgacataatcggttatgttatctatagattacagacattgtatagaaaagcastgtgaaaatccctgtcctgttttgttccgatctaattaccagcccccagtcacgtaccccctacttgctcaatcgatcacgaccctctcacgcgcacccccttagagttgtgagcccttaaaagggacgggaattgctcacttggggagctcggct

SEQ ID NO: 941204 - DNA, 594 bp, Homo sapiens
aggtgcacatcaccatgcctgcctaatttttgcgttttttgtagagatgggttttcaccatgtagtccaggctgaccttgaactcctgggttcaagtgatctacctgcctcagcctcccaaaatgctgggattacaggcatgagccactgtgcctagcctttaagaataattgacaacaatctctctcaaactcttgtaaataattgaagagaaagcagcatgccaaaacttatccttgatgcctgcattgccctgataccacatccagacaaaaacacaaggaaaaaaaatacatagcaatatttcaatacttcaatgaataycaatgcaaaaatcctgaataaaattctaataaattaaatttgacagcacattaaagtgagcatactcatggccaggtaggatttatacctgaaatgcaagaatgattcttttgcaggacaggtgagccccaaaattggggctgagcccaggagggttcttggctttgcctaggaaaaaattcaagggtgagccggtggtgttacacagtaatctataattgaatgatactgccccttttggagcagggcttactcataggcagtgtgccc

SEQ ID NO: 941205 - DNA, 566 bp, Homo sapiens
ttgtatttgtattcctccttttaggtggatccccgcattgatattcagatgtgcttgtctccttccccttcataaactaccttttttttttttttttttttttgagacggagtctcactgtgttgcccaggctagagtgcagtggcgcggtcttggctcactgcaacctccgcctcttggattcaagtggttctcctgcctcagccttctaggtagttgggattacaggtgtctcccaccatgtcaggctaacgtttgcatttttagcaggtgcagggkttttgccatgttgtctgggctggtttggaacgcctgacctcaggtgatctgcccaccttggactcccgaagtgctgggattacagccatgaggcagcacgcccagccaagagggaaagagggagggagtgggaggccaaaagcctacagcacctggtgtttccccgaaggtggggtggtagtctcccatccaagtaccatgcaggaccggaccgaccctgcttagcttctgggatcagacaagatctagcacattcagggtggtatggcggtagaccacaaacttct

SEQ ID NO: 941206 - DNA, 875 bp, Homo sapiens
ccaagtttttgtggagggccaggaagcattggttggagaggagaggagagcagagagggggtggtttgtggcatagagcaaaactggagctcctctctttgaatgcaaaatacaatgttggatcttttagtccatctgtgaatctatattaagcaattggtgaacgtattttaatatatttgttattacagtaaagttttatacaagcatatttcactgactttacatacgaagtgcttatattttaacacctcttgatgatgtcataattataattggcagcatcttttcatttttactagtacctattttcatgcgcgtctgtgtgaagagaccaccaaataggctgtgtgtgagcaacatggctgtttatttcacctgggtgcaggcgggctgagtccgaaaagagagtcagtgaagggagataagggtggggcygttttataggatttgggtaggtaaaggaaaattatagtcaaagggggtttgttctctggtgggcaggagtgggggtcgcaaggtgctcagtgggggtgctttttgagccaggatgagccaggaaaaggactttcacaaggtaatgtcatcagttaaggcaaggatcggccatttacacgtcttttgtggtggaatgtcatcagttaaggtagggcagggcctattcacttcttttgtgattcttcagttacttcaggtcatctgggcatatacgtgcaagtcacaggggatgtgatggcttggcttgggctcagaggcctgacattcctgccttcttatattaataagaaaaataaaacaaaatagtgttgaagttttggggcggtgaaaatttttggggggtggtatggagagagaatgggcgatgtttctcaggg

SEQ ID NO: 941207 - DNA, 605 bp, Homo sapiens
gaatgtaaattcattcagccactgtggaaaacagtttggagatttctcaaagaacgcagaactaatttgacccagcaatacaattattggatatacaaccaaaggactataaatcgttctaccataaagacacacacacatgtatgttcatcacaatttattcacaatagcaaagacatggaatcaacaggtacccatcagtggtaaactggataaagaaaatgtggtacaaacacaccatggaatactacccagccataaaaaatgagatcacgtcctttgcagtaatatggatggagctggaggccagtatcctaagtgaactaacacaggaacagaaaaaccaaacacaacatgttctcacttataagtgggagctaaacattgagtataccatagacacaaagaagggaacagyagacaccagggcctacttgagggtggagggtgggaggagggtgggatcaaaaaactacctcctgggtactacaattacctgggtgaaataatatgtacaccaaacccctgtgacacgcaatttatctatataacaaacctgtacatgtaaccctgaaactaaaataagagttaaatatatatccaca

SEQ ID NO: 941208 - DNA, 664 bp, Homo sapiens
aaaagaaggggttttcttttctactgcatcatcagcctgcaaatttttcaaacttttatcctatgcttctccttgaacactttgccgcttagaaatttcttccaccagataccctaaatcatctctctcatgttcaaagttccacagatttctagggcggggcaaaatgccaccaatatttttgcatagcaagaaygacctttactccagttcctaacaagttccttatctccatctgagaccaccttagcctggactttattgtccatatcactatcagcattttggccaaagccactcaacaagtctctaggaagttctaaactttcccacatattcttgttttctgaaccctcctggtctcaaggaagttccaaactttctacattttcctatcttcttctgaaacctctaaactgttgcaacctctggctgttacccagttccaaagtcacttccatagcaccccactacctggtaccaatttactgtattagtctgtcctcatgctgctaataaagacatacctgagaccgggtaatttataaaggaaagaggtttaattggctcacagttccatatggctgaagaggcctcacaatcatggtggaaggcaaaggaggagcaaagtcacatcttacatggaaacaggcaagagagcttg

SEQ ID NO: 941209 - DNA, 623 bp, Homo sapiens
accttgtctgctggtttttaagaccattggaaaagcacagtatttgggtggaagtgccccgtttttccaggtgcagtctgtcatggcttcccttggctaggaaagggaaatcccctgaccccttgtgcttcccaggtgaggtgacgtccagccctgcttcagctcaccctctgtgggctgcacccactgtccaaccagtcccaatgagatgagccaggtacctcagttgggaatgcagaaatcactcgtcttctgyattgatcacgctgggagctgcagactggagctgttcctatttggccatcttctcaaaacccttttttctctaatcttgtcttcactctttatttcattaagttgatcttaatctctgatatcatttcttctgcttgatctatttggctattgatacttgtgtatgtttcatgaagttctcatgctgtgtttttcaattccatcaggtcatttatgttcttctctaacctggttattctagttagcaattcctctaaccttttttcaaggttcttagcttccttgcattgggttagaacatcctcctttagcttggaggagtgatgagtttgttattacccaccttctgaagcctacttctgtcaatt

SEQ ID NO: 941210 - DNA, 452 bp, Homo sapiens
ggaaactgcatggactcttcagagtgggtgcctggatgggaggctggccttttcatttcttgaatcccatgttggtgtatataggttttctttctctggggctggtttttcaagagaagactcccttgtctttgcctgaggagtggagggtggtgtggtgtttgtctgctgccctcctgtgaggagcagcagaagtggggggcctgaagcttctgaggtttgccactcaggttctctcttcacttttttggggggtctyctttccccaccccttccccctctgaccctggtgttctcaagtctagacttctcttgtttaatgtatccagtgggggagggaaggggccgtaggtgtctagctgttgcacttgcagccttcagccagtccccccacatctgagttcccaccttcccctttcatgcaaggtgcctgccacctcctacgacctcct

SEQ ID NO: 941211 - DNA, 762 bp, Homo sapiens
gacatacaatgccctcggtcgactgtttatttataaatccacccagtgctcactgcggcctttacactcagctctttcccaaaatgcaaattggcttcttcctgtaagtcaaaccgacttgctcgagctgataaaaatcatcccaaacgggctcttttatctccccaatacacaaagtcctctgcacccacacctcctagaaagaggaagactgtctgtctgcagagtgcctgcggcagggatggcccagagagaggccctgaagaggcacgcaagggcatgggagggtgtgcatagagtagtgggagccaggatctaaactcacaggcctgcattcaaatcctgcctaaaacgccttctggctctgtggccctaatcactctgagcacatcacgtacgcatgtgtgtaaaactgggatacaggmcaggcgtggtggctcacacctctcatcctagcactttgggaggccaaagtgggtggatcacttgaggtcaggagttcaagaccagcctggccaacatggtgaaaccccatctctactaaaaatacaaaaattagccaggcatggtggcaggcgcctgtaatcccagttactcgggaggctgaggccggagaatcgcttgaacccaggaggcaggattgcagtgagctgagatcacgctactgcactccagcctgggcaacagagtgagactctgtctcaaaataaataaataaataaataaataaataaataaataaataaaataaaactggggtac

SEQ ID NO: 941212 - DNA, 621 bp, Homo sapiens
ccttccctgaccacaccatctaaagaagccccatcacccactcatgtccctatatcaccttatcctggtttatttttcttcaaagcactgattataactcaggcatgatgtcatgcattaagttgttgacctgctgactgtctcgcctactagaatgtaagcaggkcccctgtcaaattcaccaatgtatccccagggcctggaagagtgcctggcacatggaaggtgcttgataaacttgacaaaggaatacatgaatccaccttccttgggtagctgggcgaggggaggcacaaaaggaccccagactctgccctccccagggccagagtgctggggactcaagcccagccaggaagccttgttctcaggctggcacgaggccccaccagcaggaccctcccagcccattcagtgcatgggctccccagaactggaagcgacgcagggcctggcagaggtctagaggagccctgagggaaaagtagcagttgctactctgcccattgtcccccatcgtccttcactccacacaaagcctgggaaggccaaggacagcctcgggcgcaaagggtggaagtagggggagaccaagccagtgaggctgggaggacatgggat

SEQ ID NO: 941213 - DNA, 790 bp, Homo sapiens
aaatgcaatcagatatcattttttgattggaaggtagcagcggatatgtgcaggggcgtgggtgggagttgtgattagaaaggtcaataaaagcttctaaagacccacaggagagacccaaagtcttcaagcctggagttcctgcttggttcttcctgaggactgagcaccttctagactacatccagatctggtaagccactaatttctgtaaggacactcccatctgacctacagtcagtcggtctgggatggtgacagtgcagcctacgatggcacagagctatatcctgccctgttttttttcatatgaacaatttgaagcttgaatgttttcctctaaatgcagttctgtctttatttcaaaaaagttgattgtgctttggttgatgccattttaaaattcgtgaagggagcaataactcatgcctttaaccccaacactttgggaggccaaagtgggaggatcatttcagcccaggggtttgagaccaacctggrcaacatgacaaaagccctcctctacacaacgtttttttttttttgagggtggggatggagtctcactgtgttgcccagactggagtgcagtggcacgatctcaaatcactgcaacctttacctcccgggttcaagcaattctcatgcctcagtctccatcctcagaagctggtgtcacagacatctgaaaccatgcctggctaatttttgtatttttagtagaggtggggtttcaccatgctggccaggttggtctcgaacacctgacctcaagtgatccacctgcctt

SEQ ID NO: 941214 - DNA, 601 bp, Homo sapiens
gaggcccaagggggatggtggtggtgaggaagccgagaggacttggccattcaccagctcctcagggaaagcactgctcaccacgcaaggtccatggaggtaacaggaacctctcctctaatggcactgaaaggcaccatgaaaagtgagaactgggccgggcacggtggctcacaatgtaatcccagcacattgggaggctgaggccaagagttggaggccagcctgtccaacatggtaaaccccaactctactaaaaatacwaaaattagctgggcatggtggtgggttcctgtaatcccagctacttgtgaggttgaggcaggagaatcatttgaacccgggaagcagaggttgcagtgaggtgacatcacaccactgcactccagcctgggtgacagagggagacttggtctcaaaagaaaaacaaaaaaatgtggaagtgggcaggatccaaggggaaaacagggtgaagaaaagtcagagagagggacaagaagcagggaggggaggagctgctctccaggatgtggagtttaagttcagaaatgagttctgaaattctcagtctcacctctattttcccacaggaggtggaaac

SEQ ID NO: 941215 - DNA, 670 bp, Homo sapiens
atcagatgatacatgatagtctgtggcccattcagtgtaggctttgttttcccctgaatttctacttcaaacatgcttatctggccgctgttcatgcaactactttaaaaaaggaaccataagggaaaaatgaagtcatacaggagaaaaacagaaatgtaattgtagccactgatayaaccaagctcctgtttccactttctctggtctttttgggattttctcctttttgccgttaccctgccctttgatcctatgtccttgcttatgcttgttttcatcaagaagagtctcaatgatatgcagtagaaagaaaccatggtctgctgttttgtgaagagtagtgtgccttgacttgggggtacaggaggaagaggaatgcagaggagtgaggatcatgggaaaatgttgaacttttctgttggagtttcttcgccactatgaaggaaaacattttcccattaaaatagaaatactagaatcatatacataacatttttggaatttaatccaaaacttcatctgttccgttaaaacatacataaagaaaaggagtaataaaataggttgggactaataagcagcagattatattactaagatttttcactattactgtaattagttaggtctggctgattatggcttttagagcaaagaataggatgag

SEQ ID NO: 941216 - DNA, 622 bp, Homo sapiens
tttgagtctaacaagttaattgcctactttaaaaaatcaacaatctttgaggcaatgtaagaatccatgcaacataacatttaaaatgtccaggatgcaatccaaagttagcatatgaagaacaaggaaaaagataagcaacagatgccaaccttgcaatgatgcagatgctagaaatataagataaggatgttaaagagcctattacaaatatgctcgccaaaatgaaggatcatacactgataacacacttagaataactgaaaagataacaaatctctgcaaaaaaaataggtaatataaaaaataacatattggacattctaaatctgtaaaatacaatacytagaataatattttcaacagatggttttaataacagtgtagcaatgggaagaaagaaacaagtaaacccaaaaaaatagatcaatataaatcatacaatctaaagaaaagtagaaaaaaataaagaatagtaagttaaagagaatgtgtgtgtcatgggcacagcttccaaaggtccagaaaattagagtcccagaaaagaagaatagagaaagggagagaaaaatgtttaaaaaataatatccaaaaacctcccaaatttgttcaaaaacacaga

SEQ ID NO: 941217 - DNA, 720 bp, Homo sapiens; identical to SEQ ID NO: 941018

SEQ ID NO: 941218 - DNA, 615 bp, Homo sapiens
aacctgaagccagcaagtctcagaggctcacccaaggccctagatgtagtacctgggtatcgctgctgattattcagtgcccaagggctcttcagttagcaggtgatgaatgctgccaggaatgggttcttcccttcaaggcagtaggttcccttctggcccagggtgtgcctagaagtgttgcccaggagctagggcctggaacagaggcattatgactctgaccctatcatgctgtggctgagccggtatccaagatgcaagacaaagtcctccccactcttctttctcctctcctcaagcagaaggaagggatcttttttggagccactagttgtgcagcctggggttagrggagaggtgatgtcaccactcctttagccaccctggtagtttggtagattgcatgcccctctagtccactgtttctgggcccagttcagcactaggactcgcctagagttgcagtccttgtggcctaaattgcctttcaaattcacttagacacccagagcactttagcctgcagtggtgaagtttgtgggaactcaagttccaaccacaaggacctgtgattcccctctggctagggctggtttaaatgttccctccgtg

SEQ ID NO: 941219 - DNA, 615 bp, Homo sapiens
aacctgaagccagcaagtctcagaggctcacccaaggccctagatgtagtacctgggtatcgctgctgattattcagtgcccaagggctcttcagttagcaggtgatgaatgctgccaggaatgggttcttcccttcaaggcagtaggttcccttctggcccagggtgtgcctagaagtgttgcccaggagctagggcctggaacagaggcattatgactctgaccctatcatgctgtggctgagccggtatccaagatgcaagacaaagtcctccccactcttctttctcctctcctcaagcagaaggaagggatcttttttggagccactagttgtgcagcctggggttaggggagaggtgatgtcaccactcctttakccaccctggtagtttggtagattgcatgcccctctagtccactgtttctgggcccagttcagcactaggactcgcctagagttgcagtccttgtggcctaaattgcctttcaaattcacttagacacccagagcactttagcctgcagtggtgaagtttgtgggaactcaagttccaaccacaaggacctgtgattcccctctggctagggctggtttaaatgttccctccgtg

SEQ ID NO: 941220 - DNA, 627 bp, Homo sapiens
cagataggtactgaacacctaatacatgtcagatgctattctaggggttgtaaatacagcagtgaaaaaaaaataggcaaagtccctgcccttttggagcttacattctagtctgggtggtacgaggtagacatgcctacatacraatgtaagtatataatgtgtgggaaggggaaagagaggggaacaggaactaaaggacgaagggggagaaggagaactggggatgacatttggcttctattttatatgagatggttggggaacctgacttatccagtaaggtgacattgagtagagacctgaatcacacacaggaacaagccagggagatttctagggagggcaaaggctcagagatatgagaggccctgacttgtctgagaaacagtggggcaggcatggagtggaatgaagggaggtgtgggcagcagatgaggccagagagaagtaggacccgatcaggtccccttggggactgtgaggtcttgtagggactttggctcttattctgagtgagatgggggacactgaccggtgttgagtagaggaacgacacgagatgatttatgctttggcacgctgtgtggcaaaggctgtccagagacaaaagtgaaggcaggaaac

SEQ ID NO: 941221 - DNA, 714 bp, Homo sapiens
agcagagtaagactgcaggggtgcagccctccctcccatgcccttctgttcagacacccaaggggcccatgtgcacccctgggatcacacgaccagaaaacaggaccccagaggtttcttgagtctctgcttaccagggaggctgggtacagccctgccagcccatccctgagcagggcacccccagatggggcagagcagggtatggctgggcagggcagggctgggcggggcagatgggctctggmaggggctgatggtagcagatagggtgttgcctcctgcctgcaggtggggagcaccctgattgagtgggctgagaaaggttggtcaccaggcctggaccccccagctcctttggttataggctgacatcagagtagtggctcatgggaagcggttagctggaaggtctgaggcctggcccatggggtcagggaggagctgggggaaggggacagtaccgtgaaggcagataaaggggcagcagcctcaggtttctgccccccatccccctggggttttccaagccaaagcctgcaacttactttaaaaaagaaaaggaaaaaaagcacttaggaaagttacagacaactacccccaaaaaataccctcccacacacaaaatccaaaccgtttcctcatctccctcccgcctcccccgacacaatacagtttcctgttttctttctttttaaaaacgttgcctgctac

SEQ ID NO: 941222 - DNA, 844 bp, Homo sapiens
catcattttccccttcccattggcatgtaaaactcactcttgtacgtagtcctaaattttctattaggccctgggggacatggcagctttaattattttaaattcagactctgctgagacatcttcttcacttcctgacaagaaatcactgcttctgagcaagcaagaaaaaaatgtccccgaaaagcctcaagccagttgttcctggaggtccctgctggcctctgcttcctgcccctgtggctggcaattgtggatctgaccgatgcacttgagctgcacacaagcatcctgccccataccccacagaccccttctcttggcctatgagtggctttgctgcctcagcacaaacccaggatcagggatcttcatggcctccagagagcctgctccagagtgactggattctagccccctcggtgactcaggagttgggcaagagctggcttcctggagaatgaatcaatatgaaatcagacaacaaaaagggcaagagcttaaatgtcagccagagcctactgaaatcccagatttcacactcttatcggctgtgtgattgcctgcaagtggctttccytctctgaacctcatttctcatttggaaagtgggtacgtgggttgattatctctaaggaccttcctgcactgatgcttgaggataatttttagtccacatggcggacattggctcttggttcactttgtcctagcaaatttactttccatcatacagggattggggacaaattattccaggtcagtcctagtgtctattttgaggtttttactccagccttcttctgcctcctgtgtcctctctgttttaatttctaggctcagc

SEQ ID NO: 941223 - DNA, 639 bp, Homo sapiens
attaatcctgaatatcaaggagaaatataggttattactataaaatggaaataagtaagaagatgccttgaatggaagatatcccaacaggcacctgttagtatatgcatgccctgtgataacatcaatgaaaactacaaccacccataagactcaggacagcyaacagcctagatccttaaacagggaaggtttgagtcactcaatcatgcaaggaaccataataggccaaggttcttgctgagagcaaatgggataagaaatgggcagcagaagaaggaaattataaataccaactacaactacatgaccagttgaagaaaagaggacagtaatagacagtgagtatttcttccttattttgatatgaaaatatttgtgcatatgttaattacttcttctcctcctctctcattcccctaccatctaacataggatttgttaacaatagctaaccttatcattcagaatttaaataagaggtctaagaaggaatttgactcagctaggaaaggaatgaacctcacccaaagaggaggtacaaaagagactttgtgtcatattttgaaaagaaggttagtgtagcgtgttttcagttttacaagggacagttgcattatgttaggaggaagcatgctt

SEQ ID NO: 941224 - DNA, 623 bp, Homo sapiens
aaaagtcccttataaaaccatcagatctcgtgagaactcactatcatgagaacagcatgggggaaaccaccccccacaattcaattacctcccactgggtccctctcattatgtggggattatgggaactacaattcaaaatgtgatttgggtggggacacagcaaaaccatatcattctgccctggcccctcccaaatctcatgtcctcacattttaaaacacaatcataccttcccaaaagtcccccaaaattttaactcatcccataattagctcaaaagtccaagtccaaaatctcatccaaaggcaagtcccttctgtctatgagcctgtaaaatcaaaagcaagttagttacttccttgatacaatgagagtacaggcattgggtaaatacagccactgcaaatgggagarattggccaaaacaaaggagctacaggccccaggcaagtccaaaattcaatagggcagtaattaaatccttaagctccaaaataatatcctttgactccatgtctcaaatccagatcacactgatgcaagaggtggactcccatgatgttgggcagctctgaccctgtgactttgcagggtacagccctcttcctggcagctttcac

SEQ ID NO: 941225 - DNA, 631 bp, Homo sapiens
tctagatgaccttgggtttggtgatgactttttatttattttatttattgatctaaagattcaatgcaataccaattttaatttagagacagagtctctaaataaattaattattttatttacttgttggagggcatgatcatggctcactgaagcattccttgggcrtgatcatggtgtgattatggctcactgcagccaaactcttgggctcaagtgatcctcttgcctcagccttccaaagtgctgggattacaggtgtgagccaccgagcccagctatatgattatttttcagatataacacaaaaggcatgatccacaaaagaaataattgataatctggacttcattaaaattaaaaacttctgctctgcaaaaggcacatcaagagaatgagaagacaacacactgggagaaaatatttgcaaaagatatatctggtaaaggactattaagccaaatacacaaagaactcttaaactcaacaataagaaaatgaaccacacaataaaaaatgggcaaaaaaccctgaacagacacctcaccaaagatgatggcaaataagaatatgaaaagatgctcaacatcatatgtcattagggaattgcaaattaaaacaacaagatacc

SEQ ID NO: 941226 - DNA, 631 bp, Homo sapiens
tctagatgaccttgggtttggtgatgactttttatttattttatttattgatctaaagattcaatgcaataccaattttaatttagagacagagtctctaaataaattaattattttatttacttgttggagggcatgatcatggctcactgaagcattccttgggcatgatcatggtgtgattatggctcactgcagccaaactcttgggctcaagtgatcctcttgcctcagccttccaaagtgctgggattacaggtgtgagccaccragcccagctatatgattatttttcagatataacacaaaaggcatgatccacaaaagaaataattgataatctggacttcattaaaattaaaaacttctgctctgcaaaaggcacatcaagagaatgagaagacaacacactgggagaaaatatttgcaaaagatatatctggtaaaggactattaagccaaatacacaaagaactcttaaactcaacaataagaaaatgaaccacacaataaaaaatgggcaaaaaaccctgaacagacacctcaccaaagatgatggcaaataagaatatgaaaagatgctcaacatcatatgtcattagggaattgcaaattaaaacaacaagatacc

SEQ ID NO: 941227 - DNA, 631 bp, Homo sapiens
tctagatgaccttgggtttggtgatgactttttatttattttatttattgatctaaagattcaatgcaataccaattttaatttagagacagagtctctaaataaattaattattttatttacttgttggagggcatgatcatggctcactgaagcattccttgggcatgatcatggtgtgattatggctcactgcagccaaactcttgggctcaagtgatcctcttgcctcagccttccaaagtgctgggattacaggtgtgagccaccgagcccagctatatgattayttttcagatataacacaaaaggcatgatccacaaaagaaataattgataatctggacttcattaaaattaaaaacttctgctctgcaaaaggcacatcaagagaatgagaagacaacacactgggagaaaatatttgcaaaagatatatctggtaaaggactattaagccaaatacacaaagaactcttaaactcaacaataagaaaatgaaccacacaataaaaaatgggcaaaaaaccctgaacagacacctcaccaaagatgatggcaaataagaatatgaaaagatgctcaacatcatatgtcattagggaattgcaaattaaaacaacaagatacc

SEQ ID NO: 941228 - DNA, 505 bp, Homo sapiens
gcgcagagggaagcaggatcacatttaaggaagtgtgtggggtccctggatgacaccagcacccagtacggctctgtctggcaactgctcccaaggtggcaggagtggttgtcccctgtgtgtcagtgggcagctcctgctgagcccgcagctyactggggagcctgacagcagggatatgtacctgacactcctctctgcttgtggacctgatgaggcagggagcagaaaacagagccacttgaaggctttctgtctgcgtcttgtgcagtgtggatttagttgtgcttttttcttgctgggagagcacagccaccatttacaagcagtgtcaccctcatgggtggtgaggacagaacaggagcctctgctctctgtacctatctgggcccagtgggctcccctgtcctggcttccatctctgtctcagtgaccattcagccctgtgcaggaacacatgttgcttagaaaagccaaatccagcccttgtctctgcctcctctgg

SEQ ID NO: 941229 - DNA, 630 bp, Homo sapiens
agggaagcaggatcacatttaaggaagtgtgtggggtccctggatgacaccagcacccagtacggctctgtctggcaactgctcccaaggtggcaggagtggttgtcccctgtgtgtcagtgggcagctcctgctgagcccgcagcttactggggagcctgacagcagggatatgtrcctgacactcctctctgcttgtggacctgatgaggcagggagcagaaaacagagccacttgaaggctttctgtctgcgtcttgtgcagtgtggatttagttgtgcttttttcttgctgggagagcacagccaccatttacaagcagtgtcaccctcatgggtggtgaggacagaacaggagcctctgctctctgtacctatctgggcccagtgggctcccctgtcctggcttccatctctgtctcagtgaccattcagccctgtgcaggaacacatgttgcttagaaaagccaaatccagcccttgtctctgcctcctctggtctcatgatgtgcatctattaccttcaaactggaaaccagtctatcaatgtctgtgccagttttttattccctccccaacctccttccccatacgactttttatttatgtaggatgtgtgctgtctaatga

SEQ ID NO: 941230 - DNA, 630 bp, Homo sapiens
agggaagcaggatcacatttaaggaagtgtgtggggtccctggatgacaccagcacccagtacggctctgtctggcaactgctcccaaggtggcaggagtggttgtcccctgtgtgtcagtgggcagctcctgctgagcccgcagcttactggggagcctgacagcagggatatgtacctgacactcctctctgcttgtggacctgatgaggcagggagcagaaaacagagccacttgaaggctttctgtctgcgtcttgtgcagtgtggatttagttgtgcttttttcttgctgggagagcacagccaccatttacaagcagtgtcaccctcatgggtggygaggacagaacaggagcctctgctctctgtacctatctgggcccagtgggctcccctgtcctggcttccatctctgtctcagtgaccattcagccctgtgcaggaacacatgttgcttagaaaagccaaatccagcccttgtctctgcctcctctggtctcatgatgtgcatctattaccttcaaactggaaaccagtctatcaatgtctgtgccagttttttattccctccccaacctccttccccatacgactttttatttatgtaggatgtgtgctgtctaatga

SEQ ID NO: 941231 - DNA, 627 bp, Homo sapiens
gaagcaggatcacatttaaggaagtgtgtggggtccctggatgacaccagcacccagtacggctctgtctggcaactgctcccaaggtggcaggagtggttgtcccctgtgtgtcagtgggcagctcctgctgagcccgcagcttactggggagcctgacagcagggatatgtacctgacactcctctctgcttgtggacctgatgaggcagggagcagaaaacagagccacttgaaggctttctgtctgcgtcttgtgcagtgtggatttagttgtgcttttttcttgctgggagagcacagccaccatttacaagcagtgtcaccctcatgggtggtgaggacagaacaggagcctctgctctctgtacctatctgggcccrgtgggctcccctgtcctggcttccatctctgtctcagtgaccattcagccctgtgcaggaacacatgttgcttagaaaagccaaatccagcccttgtctctgcctcctctggtctcatgatgtgcatctattaccttcaaactggaaaccagtctatcaatgtctgtgccagttttttattccctccccaacctccttccccatacgactttttatttatgtaggatgtgtgctgtctaatga

SEQ ID NO: 941232 - DNA, 757 bp, Homo sapiens
aggcagggagcagaaaacagagccacttgaaggctttctgtctgcgtcttgtgcagtgtggatttagttgtgcttttttcttgctgggagagcacagccaccatttacaagcagtgtcaccctcatgggtggtgaggacagaacaggagcctctgctctctgtacctatctgggcccagtgggctcccctgtcctggcttccatctctgtctcagtgaccattcagccctgtgcaggaacacatgttgcttagaaaagccaaatccagcccttgtctctgcctcctctggtctcatgatgtgcatctrttaccttcaaactggaaaccagtctatcaatgtctgtgccagttttttattccctccccaacctccttccccatacgactttttatttatgtaggatgtgtgctgtctaatgatgggatgaccacacttttccatgttctaaaagtgcttctctcccgcagggtcccagggctggtggttgctttgggtctacagctacgtcttacccgcctcctgcctcaacagcctgtgtggtggcaaagccggtgtggggctggggaacgcagcgttctccaggagggggacccggctctccttctgcagtgcaggcgaaggcctagatgccagtgtgacctcccacaaggcgtggcttccagactccccggccggaagtgatgcttttttgccgcgggccctgggtttgaagcagcctggctttctcttggtaagtggctggtgtctcagcagct

SEQ ID NO: 941233 - DNA, 757 bp, Homo sapiens
aggcagggagcagaaaacagagccacttgaaggctttctgtctgcgtcttgtgcagtgtggatttagttgtgcttttttcttgctgggagagcacagccaccatttacaagcagtgtcaccctcatgggtggtgaggacagaacaggagcctctgctctctgtacctatctgggcccagtgggctcccctgtcctggcttccatctctgtctcagtgaccattcagccctgtgcaggaacacatgttgcttagaaaagccaaatccagcccttgtctctgcctcctctggtctcatgatgtgcatctattaccttsaaactggaaaccagtctatcaatgtctgtgccagttttttattccctccccaacctccttccccatacgactttttatttatgtaggatgtgtgctgtctaatgatgggatgaccacacttttccatgttctaaaagtgcttctctcccgcagggtcccagggctggtggttgctttgggtctacagctacgtcttacccgcctcctgcctcaacagcctgtgtggtggcaaagccggtgtggggctggggaacgcagcgttctccaggagggggacccggctctccttctgcagtgcaggcgaaggcctagatgccagtgtgacctcccacaaggcgtggcttccagactccccggccggaagtgatgcttttttgccgcgggccctgggtttgaagcagcctggctttctcttggtaagtggctggtgtctcagcagct

SEQ ID NO: 941234 - DNA, 497 bp, Homo sapiens
aaaagccaaatccagcccttgtctctgcctcctctggtctcatgatgtgcatctattaccttcaaactggaaaccagtctatcaatgtctgtgccarttttttattccctccccaacctccttccccatacgactttttatttatgtaggatgtgtgctgtctaatgatgggatgaccacacttttccatgttctaaaagtgcttctctcccgcagggtcccagggctggtggttgctttgggtctacagctacgtcttacccgcctcctgcctcaacagcctgtgtggtggcaaagccggtgtggggctggggaacgcagcgttctccaggagggggacccggctctccttctgcagtgcaggcgaaggcctagatgccagtgtgacctcccacaaggcgtggcttccagactccccggccggaagtgatgcttttttgccgcgggccctgggtttgaagcagcctggctttctcttggtaagtggctggtgtctc

SEQ ID NO: 941235 - DNA, 673 bp, Homo sapiens
gaagtctttcctaattgtgctggaatgcaggcattgcagcagggaatcccctgttccaaagcctttgctggattttttttttttgaggcggagtctcgctttgtcgcccaggctggagtgcagtggcgccatctcggctcactgcgagctccgcctcctgggttctcgccattctcctgcctcagcctcctgagtagctgagcctacaggcgcccgccaccacgcccggctaatttttttgtatttttagtagagacggggttttaccgtgttagccaggatggtctcratctcctgacctcgtgatccgcccaccttggcctcccaaagtgctgggattacaggcgtgagccaccgtgcccggccactggatcttataaatcacaggatttcagaggagatgcggccctggatcagatactaacatcttatgtcttcccttgagtgctgggaaaggggaggttggagactggggaacattttgccatttgcagtcttaggagatctttgtaaagatttctccctctggctggttttgaccaggatattgccaaattccacgtcttggtttctggatcctcccgagcctttgagtttcccgtgaggccacagctgtagggaggctgagccaagtggccataacaaccaggcagagtagcaggaagaagcaggg

SEQ ID NO: 941236 - DNA, 615 bp, Homo sapiens
gctcactgcaacctccgcctcccaggttcaagtgattctcctgcctcagcctcccgaatagctgggattacaggcatgcgccaccatgcccagctaatttttgtatttttagtagagatggggtttcaccatgttagtcaggctggtttcaaattcctgacctcatgttagccacccacctcagcctcccaaagtgctgggcttacaggtgtgagccagcgcgcccggccagtgctttgtatttttatgtaaactcagaatacaggcattttagrgcctgtgaccaaaaaccaaaccaagcttgtaactccaccagggatctgaataaacctgcccttgcttttgagttttccaccgcctaggctcagtatccaggcggttcacccatacagggtccctgaccacgtgggggctgtggaaacaactgctgggcaccctgttggcccctcaccccagtgtccacgggcctggccctctggtttcctttgctttccttgcccaggggcacagtagactcggcagcagcaaaaccaaggcgcatattaacactgaagtgcctgagacagaaaggggctgggccggagccatgtgaattttgccttctactcaatatca

SEQ ID NO: 941237 - DNA, 615 bp, Homo sapiens
gctcactgcaacctccgcctcccaggttcaagtgattctcctgcctcagcctcccgaatagctgggattacaggcatgcgccaccatgcccagctaatttttgtatttttagtagagatggggtttcaccatgttagtcaggctggtttcaaattcctgacctcatgttagccacccacctcagcctcccaaagtgctgggcttacaggtgtgagccagcgcgcccggccagtgctttgtatttttatgtaaactcagaatacaggcattttagagcctgtgaccaaaaaccaaaccaagcttgtaactccaccagggatctgaataaacctgcccttgcttttgagttttccrccgcctaggctcagtatccaggcggttcacccatacagggtccctgaccacgtgggggctgtggaaacaactgctgggcaccctgttggcccctcaccccagtgtccacgggcctggccctctggtttcctttgctttccttgcccaggggcacagtagactcggcagcagcaaaaccaaggcgcatattaacactgaagtgcctgagacagaaaggggctgggccggagccatgtgaattttgccttctactcaatatca

SEQ ID NO: 941238 - DNA, 746 bp, Homo sapiens
catttctctgggatagatgagtcagaatgtaattgctaggtcatacggtagttccatgttcagtcgtataagaaactgccaaacatcaacagtagcatgtgcctttagtcccagctactctggaggctgaggcgagaggatcactttagcccaggaatttgagtccagcctgggcaatatagggagaccctgtctctaaagagaaaaaagagactgccacacttttgcagtggctgtggtattttatatgcccaccagcaatatatgagtgattcacacttatatcttcagcagagttttgtcttgtcactattttttattttagccactctgatgtgtgtaaattatatttcattgtggttttaatttgcatttcccaaatggctagtgaagttgaagatcttttcatgggcttatttgtccattgtgtatcatctctggtgaaatgtctgctcgtgtcttttgcccatcttctaattggattgtttgattttttgtgtggagtttgcaagttccttatatacycaagataacagtgctttgttcatatatgttgtttgaaaatattttctcctagtctgtaacttgtcatctttttaacaaggtgttttgcagaacaaatttttaaattttgatgaaacttagcttagcaatttttccttttgtagactatgtttttggtgtcaagtctaagaaaattttgcctagtcctagctcctgaagatcttctcctacattttatccta

SEQ ID NO: 941239 - DNA, 648 bp, Homo sapiens
cagtagggaggcttccactccagggtgtccctctattcgcttttctccctccctcaactccttccagtttcctttcttgcagctaacaagcatgaacaaacctgctttaaaaacacagtacaaggctgggcgcagtggttcacacctgtaatctcaacagttttggagaccgaggcrggcggatcacctaaggttaggagttcaagaccagcctggccaacatggtgaaaccccatctctactaaaaatacaaaaattagccagatgtggtggcaggcgcctgtagtcccagctactcgagaggctgaggcaggagaatcgcttgaagctgggaggtggaggttgcagtgagccaagagtgcgccattgcactcctgcctgggggacaagtgcgagactctgtctcaaaaaaagaaaaacaaacagtaacaatgacaacaaaataacagaacaaaaccagaaccttgtcccagttctgtgccttccttcctctttccataaatcctgtggcttttgtctactgccgggacgaggaatactttctaaatgctgccgcgtttgtcctcagtgaacaaccccaaaggttcaggggtgtgcctctcactgccagtgcgaatgggcggggcctggtgattaaatctgtgtgca

SEQ ID NO: 941240 - DNA, 648 bp, Homo sapiens
cagtagggaggcttccactccagggtgtccctctattcgcttttctccctccctcaactccttccagtttcctttcttgcagctaacaagcatgaacaaacctgctttaaaaacacagtacaaggctgggcgcagtggttcacacctgtaatctcaacagttttggagaccgaggcgggcggatcacctaaggttaggagttcaagaccagcctggccaacatggtgaaaccccatctctactaaaaatacaaaaattagccagatgtggtggcaggcgcctgtagtcccagctactcgagaggctgaggcaggagaatcgcttgaagctgggaggtggaggttgcagtgagccaagagtgcgccattgcactcctgcctgggggacaagtgcgagmctctgtctcaaaaaaagaaaaacaaacagtaacaatgacaacaaaataacagaacaaaaccagaaccttgtcccagttctgtgccttccttcctctttccataaatcctgtggcttttgtctactgccgggacgaggaatactttctaaatgctgccgcgtttgtcctcagtgaacaaccccaaaggttcaggggtgtgcctctcactgccagtgcgaatgggcggggcctggtgattaaatctgtgtgca

SEQ ID NO: 941241 - DNA, 799 bp, Homo sapiens
cctgcaccagctgaaaacactggctgctccatggctattcactttccaaataccaagaaatggaaagaaaaggaaagttcggctgggcacagtggctcacgcctgtaatcccaacacttagggaggctgaggcaggtggatcacttgaagtcaggagcttaagaccagcctggcccatctctactaaaaatacaagaggaaaaaaaaattagctggatatagyggcgcatgcctgtagtcccagctacttgggagcaaaggcaggacaatcacttgaacctgggagacagaggttgcagtgagccaagattgcaccactgcactccagccactctagcctaggtgagagagcaagactctgtcaaaaaaaaaaaaaaaaaagaaagaaagaaagaaagaaaagaaaagagaaaaaagagaagagaagagaagttctaggctgggtgcgatggctcatgcctataatcccagcactttgggaggctgaggcgggtgaatcacttgaggtcaggagttcgaaccagcctggccaacatggtgaaaccctatctctactaaaaatacaaaaattagccaggtgtggtggtgtgcaactgtagtcccagctacttgggaggctgaggcacaagaatcgcctgaacccaggaggcagaagttgcagtgagccgagatcgcaaaactgcaatccagcctggatgacagagtcagactctgtctcaaaaaaaaaaaaaaaagacagaaagaaataaagaaaagagcagttctcactttcctgctgggcttgacctgcggtacagaa

SEQ ID NO: 941242 - DNA, 800 bp, Homo sapiens
cctggccaacatggtgaaaccctatctctactaaaaatacaaaaattagccaggtgtggtggtgtgcaactgtagtcccagctacttgggaggctgaggcacaagaatcgcctgaacccaggaggcagaagttgcagtgagccgagatcgcaaaactgcaatccagcctggatgacagagtcagactctgtctcaaaaaaaaaaaaaaaagacagaaagaaataaagaaaagagcagttctcactttcctgctgggcttgacctgcggtacagaagtttccagccgggckcattggctcatgcctgtaatctcagcactttgggaggccaaggccggcagatcacgaggtcaagagatggagaccatcctggccaacatgatgaaaccatgtctctactaaaaatacaaaaattagccaggtgtgatggcacgcgcctgtagttccagctactcgggaacctgaggcaggagaatcacttgaacccaggaggcagaggttgcagtgagccaagatcgtgccactgtactccagcctggcaacagagcaagactccatctcaaaaaataaaaaaagtttccaggaagtgaggtcctgaacagaggatcgatggtccaaagaggcaaaggtagcagcttccactgggtgggcagtcactatgtgccaccactaagctgactctgaacacaccacgtccttcctctgcatgagaccaggacaagggagcccccccacgaggcctgaggacatgccgagacacacagggaggtggcagagacctccaacctcatcacacgaagt

SEQ ID NO: 941243 - DNA, 800 bp, Homo sapiens
cctggccaacatggtgaaaccctatctctactaaaaatacaaaaattagccaggtgtggtggtgtgcaactgtagtcccagctacttgggaggctgaggcacaagaatcgcctgaacccaggaggcagaagttgcagtgagccgagatcgcaaaactgcaatccagcctggatgacagagtcagactctgtctcaaaaaaaaaaaaaaaagacagaaagaaataaagaaaagagcagttctcactttcctgctgggcttgacctgcggtacagaagtttccagccgggcgcattggctcatgcctgtaatctcagcactttgggaggccaaggccggcagatcacgaggtcaagagatggagaccatcctggccaacatgatgaaaccatgtctctactaaaaatacaaaaattagccaggtgtgatggcacgcgcctgtagttccagctactcgggaacctgaggcaggagaatcacttgaacccaggaggcagaggttgcagtgagccaakatcgtgccactgtactccagcctggcaacagagcaagactccatctcaaaaaataaaaaaagtttccaggaagtgaggtcctgaacagaggatcgatggtccaaagaggcaaaggtagcagcttccactgggtgggcagtcactatgtgccaccactaagctgactctgaacacaccacgtccttcctctgcatgagaccaggacaagggagcccccccacgaggcctgaggacatgccgagacacacagggaggtggcagagacctccaacctcatcacacgaagt

SEQ ID NO: 941244 - DNA, 666 bp, Homo sapiens
actaacactgagcccagaacccaagacacagaggtaaacaggaggcacatgtgtcctcagccaaaatggcccacaatggctcaagtagtcccaagcctcagagtgttcgtctcacttcttgcttcagctcactcttgtttgaatccctcgcagcccctgaactacacaggaggcccaccgccagatgcccaagcccaaatggaagggctcgatcacagaaccttcctagtgagtcagggcctgtttctcctgcctgtcccagacttttgtyttccttttttatttttattttttttgagacagagtctcgctgctgcccaggctggagcgcagcggcgcgatctcggctcactgcaacctccgcctcccaggttctagcgattctcctgcctcagcctcccaaatagctgggattataggtgtacgccaccatgtccagctaattttttgtatttttagtagagatggggtttcaccatgctggccaggctggtcttgaactcctgatgatccgcctgccttggcctcccaaagtgctgggattacaggcatgagccactgggcccggccttgtcccagactttttgagaagcccatggaaaagggcaggcacacgtgtcaagagaaccctcggctggctccgggcactgcacccagcattgtggc

SEQ ID NO: 941245 - DNA, 666 bp, Homo sapiens
actaacactgagcccagaacccaagacacagaggtaaacaggaggcacatgtgtcctcagccaaaatggcccacaatggctcaagtagtcccaagcctcagagtgttcgtctcacttcttgcttcagctcactcttgtttgaatccctcgcagcccctgaactacacaggaggcccaccgccagatgcccaagcccaaatggaagggctcgatcacagaaccttcctagtgagtcagggcctgtttctcctgcctgtcccagacttttgtcttccttttttatttttattttttttgagacrgagtctcgctgctgcccaggctggagcgcagcggcgcgatctcggctcactgcaacctccgcctcccaggttctagcgattctcctgcctcagcctcccaaatagctgggattataggtgtacgccaccatgtccagctaattttttgtatttttagtagagatggggtttcaccatgctggccaggctggtcttgaactcctgatgatccgcctgccttggcctcccaaagtgctgggattacaggcatgagccactgggcccggccttgtcccagactttttgagaagcccatggaaaagggcaggcacacgtgtcaagagaaccctcggctggctccgggcactgcacccagcattgtggc

SEQ ID NO: 941246 - DNA, 666 bp, Homo sapiens
actaacactgagcccagaacccaagacacagaggtaaacaggaggcacatgtgtcctcagccaaaatggcccacaatggctcaagtagtcccaagcctcagagtgttcgtctcacttcttgcttcagctcactcttgtttgaatccctcgcagcccctgaactacacaggaggcccaccgccagatgcccaagcccaaatggaagggctcgatcacagaaccttcctagtgagtcagggcctgtttctcctgcctgtcccagacttttgtcttccttttttatttttattttttttgagacagagtctcrctgctgcccaggctggagcgcagcggcgcgatctcggctcactgcaacctccgcctcccaggttctagcgattctcctgcctcagcctcccaaatagctgggattataggtgtacgccaccatgtccagctaattttttgtatttttagtagagatggggtttcaccatgctggccaggctggtcttgaactcctgatgatccgcctgccttggcctcccaaagtgctgggattacaggcatgagccactgggcccggccttgtcccagactttttgagaagcccatggaaaagggcaggcacacgtgtcaagagaaccctcggctggctccgggcactgcacccagcattgtggc

SEQ ID NO: 941247 - DNA, 666 bp, Homo sapiens
actaacactgagcccagaacccaagacacagaggtaaacaggaggcacatgtgtcctcagccaaaatggcccacaatggctcaagtagtcccaagcctcagagtgttcgtctcacttcttgcttcagctcactcttgtttgaatccctcgcagcccctgaactacacaggaggcccaccgccagatgcccaagcccaaatggaagggctcgatcacagaaccttcctagtgagtcagggcctgtttctcctgcctgtcccagacttttgtcttccttttttatttttattttttttgagacagagtctcgctgctgcccaggctggagcgcagcggcgcgatctcggctcactgcaacctccgcctcccaggttctagcgattctcctgcctcagcctcycaaatagctgggattataggtgtacgccaccatgtccagctaattttttgtatttttagtagagatggggtttcaccatgctggccaggctggtcttgaactcctgatgatccgcctgccttggcctcccaaagtgctgggattacaggcatgagccactgggcccggccttgtcccagactttttgagaagcccatggaaaagggcaggcacacgtgtcaagagaaccctcggctggctccgggcactgcacccagcattgtggc

SEQ ID NO: 941248 - DNA, 686 bp, Homo sapiens
gtagtatattttgaaatcagtgtgatgcctccagcttttttctttttattcaacattcttttgtttatctgaagatattttgcatttccatgtgaattttaggctggtttttttttgtatttctatgaagaacatcttttgtaatttaacatggattgcactgactctgtaagtcatatattgggtgacacagatattttaacaatattctttctagtgcatggacataggatagctttctatttacttgcatttgctttaatatctttcatcaatgtgttttatagttttcattgtgggatcttttgcctttttggttaagtttatccctaggtatctttttttggtgagtactgttaatgaaatagctttcctgatttttcttaggtgtttcactattggctcattggtgcgctactcatttttgtatattgatattgtgtcttgcaattatactaaatttattatttctagtaaratttttagtggaatctttagggttctctattatatgatcatgttacctgaagacagagaaaatttgactcctttttttccagtttggatgccttttattcatttgtctaattgcattctcttgcctaattgctgtagtgaggacttccagtactataatgaacaaaagtggtaaaagtagccacgtttgttccagattttagaggaag

SEQ ID NO: 941249 - DNA, 769 bp, Homo sapiens
ctcttaaatttgctcttctgatactatcccatagatttcctaagctgccttcattcttttttttcttttcttttttctcctattgtgtatttcaaatggcctgtgtgagctcactgattctttctctgttggatcagttctgctgttgaggccctctcatgcatttttcagtgcatccattatatttttcagctttgaggtttttgtggtcttttaaaattatttcaatctctttgttaaatttctttgatamatttctgaattacttatattttttaaattgcattgattttcctcaaaacagctattttttacctccctctctgaatagtttaacatctttatctctcctaggttagtcactggtgacttgtttattgtttggtgaggtcatacttccctgaatgttcttaatgcttttgggcctatgttcatgcctgggaattgaataagtcagtatttattccagtctttgtagtctggtcttgtttgtacctgtcctcctctagatggtcttccagaaattccaagggtactgactattgagttccctaaggctggggtcactgaagctgtttcagcaccagggtgccctaagctcaggttcactgtgactcttgcaggactgaggtcccagagggccctgatggacttggagaagataagggaggggttccctgggttcccaggcaaagtgcttcattcacttccctcttcttcccattggaaggagtctgggtactaagctttgtggatctgggagaagggt

SEQ ID NO: 941250 - DNA, 769 bp, Homo sapiens
ctcttaaatttgctcttctgatactatcccatagatttcctaagctgccttcattcttttttttcttttcttttttctcctattgtgtatttcaaatggcctgtgtgagctcactgattctttctctgttggatcagttctgctgttgaggccctctcatgcatttttcagtgcatccattatatttttcagctttgaggtttttgtggtcttttaaaattatttcaatctctttgttaaatttctttgataaatttcygaattacttatattttttaaattgcattgattttcctcaaaacagctattttttacctccctctctgaatagtttaacatctttatctctcctaggttagtcactggtgacttgtttattgtttggtgaggtcatacttccctgaatgttcttaatgcttttgggcctatgttcatgcctgggaattgaataagtcagtatttattccagtctttgtagtctggtcttgtttgtacctgtcctcctctagatggtcttccagaaattccaagggtactgactattgagttccctaaggctggggtcactgaagctgtttcagcaccagggtgccctaagctcaggttcactgtgactcttgcaggactgaggtcccagagggccctgatggacttggagaagataagggaggggttccctgggttcccaggcaaagtgcttcattcacttccctcttcttcccattggaaggagtctgggtactaagctttgtggatctgggagaagggt

SEQ ID NO: 941251 - DNA, 769 bp, Homo sapiens
ctcttaaatttgctcttctgatactatcccatagatttcctaagctgccttcattcttttttttcttttcttttttctcctattgtgtatttcaaatggcctgtgtgagctcactgattctttctctgttggatcagttctgctgttgaggccctctcatgcatttttcagtgcatccattatatttttcagctttgaggtttttgtggtcttttaaaattatttcaatctctttgttaaatttctttgataaatttctgaattacttatatttttwaaattgcattgattttcctcaaaacagctattttttacctccctctctgaatagtttaacatctttatctctcctaggttagtcactggtgacttgtttattgtttggtgaggtcatacttccctgaatgttcttaatgcttttgggcctatgttcatgcctgggaattgaataagtcagtatttattccagtctttgtagtctggtcttgtttgtacctgtcctcctctagatggtcttccagaaattccaagggtactgactattgagttccctaaggctggggtcactgaagctgtttcagcaccagggtgccctaagctcaggttcactgtgactcttgcaggactgaggtcccagagggccctgatggacttggagaagataagggaggggttccctgggttcccaggcaaagtgcttcattcacttccctcttcttcccattggaaggagtctgggtactaagctttgtggatctgggagaagggt

SEQ ID NO: 941252 - DNA, 769 bp, Homo sapiens
ctcttaaatttgctcttctgatactatcccatagatttcctaagctgccttcattcttttttttcttttcttttttctcctattgtgtatttcaaatggcctgtgtgagctcactgattctttctctgttggatcagttctgctgttgaggccctctcatgcatttttcagtgcatccattatatttttcagctttgaggtttttgtggtcttttaaaattatttcaatctctttgttaaatttctttgataaatttctgaattacttatattttttaaattgcattgattttcctcaaaacagctattttttacctccctctctgaatagtttaacatctttatctctcctaggttagtcactggtgacttgtttattgtttggtgaggtcatacttccctgaatgttcttaatgcwtttgggcctatgttcatgcctgggaattgaataagtcagtatttattccagtctttgtagtctggtcttgtttgtacctgtcctcctctagatggtcttccagaaattccaagggtactgactattgagttccctaaggctggggtcactgaagctgtttcagcaccagggtgccctaagctcaggttcactgtgactcttgcaggactgaggtcccagagggccctgatggacttggagaagataagggaggggttccctgggttcccaggcaaagtgcttcattcacttccctcttcttcccattggaaggagtctgggtactaagctttgtggatctgggagaagggt

SEQ ID NO: 941253 - DNA, 773 bp, Homo sapiens
cagcctccaggcccaacgcaggctccaggccagctcctgtagccccaggattcagactgaaacccaaagactcagcctccgggcccagtccagccccatgtcagccgctacaactctaggttccaggctcactagaatgccaggtcagtcctcacagccctagactccaggccagcacccatggacccacgctccagcaaacccaggacccatgcccactctatagactcagagtccaggcctgcctcagtaaactcagcatccacagccttaggcaccaggctagcacctgtgaacccaggctccagaccaagccccgtggacccagkctcaccccagcaccaggccaatcccaggctctaggctggtccctgtgaccccagactctaatagacccaggatccaagctcattccagcagacccagggtccaagtccaccctggtcaaccctagtgccaggttgccccacagatccaggctctaggattgcccctgtggacccaagatccagacaggtccccacaggcccaagaaccaggtctctttctgcatactcaagctccaggctcaccccagcaccaggctaacccccatggactcaaactcaaggcccatccacatggacccaggcacccagacaatcctagtgccaggctggcccccacagactcaggctcaaggcccactccagggccaggctggccagacttcaggccagcccctacagacacatgctccaggctcgcacccatgagctcagtcaacagactca

SEQ ID NO: 941254 - DNA, 641 bp, Homo sapiens
caggccagctcctgtagccccaggattcagactgaaacccaaagactcagcctccgggcccagtccagccccatgtcagccgctacaactctaggttccaggctcactagaatgccaggtcagtcctcacagccctagactccaggccagcacccatggacccacgctccagcaaacccaggacccatgcccactctatagactcagagtccaggcctgcctcagtaaactcagcatccacagccttaggcaccaggctagcacctgtgaacccaggctccagaccaagccccgtggacccaggctcaccccagcaccaggccaatcccaggctctaggctggtccctgtgaycccagactctaatagacccaggatccaagctcattccagcagacccagggtccaagtccaccctggtcaaccctagtgccaggttgccccacagatccaggctctaggattgcccctgtggacccaagatccagacaggtccccacaggcccaagaaccaggtctctttctgcatactcaagctccaggctcaccccagcaccaggctaacccccatggactcaaactcaaggcccatccacatggacccaggcacccagacaatcctagtgccaggctggcccccac

SEQ ID NO: 941255 - DNA, 441 bp, Homo sapiens
aaagaatcaactgctggctggagaccaaccagcaaacttatcaaaaatacagccaaggaccctcacagagtccacttcactcccctgctccctccaccacagcatgtgctggtatccatggctgagagacctgaagacagatcataccacaagactctttgcagacactctccggtaccagccagtaccagagcacagtagcttcgctgggtggttagatgtggaagagaaataacaatctctgcactttgtttctcaggaacccccatccctagaagaaggggtagagcaccacatcaagggagcamcccatgggacaaaagaatctcaacagcagccctttagccccagaacttccctctcacatagtctacccaaatgagaaaaatccaggaaaaccattctgaaaattgacaaaacaaggttttctgacacccccaa

SEQ ID NO: 941256 - DNA, 615 bp, Homo sapiens
atatatggcctttgttatggtgagatacattccttgtatacctaatttgttgagagttttggaattttgtcaaatgcttctctccacctaaataatcataaaattgtatcattcattctgttactgtgctatgtgatgtttattaattggcatctgttgaagcatccttgcatccctgggatgaatcccattttatcatgatgaatgctttttgaaatgtgcttttaaattcagtttkctagcattttttgaggaattttacatccatgttcccaaatgatattgacctgtagttcctttttcattcccatgtccttctctggctttggtattaggataattctggccttgtataatgaatttgaaagtattcccacttcttcaattttttggaagtgtttgagaataattggtattagttctttaaatttttgatagaattttgcaatgagtccatattgtcctgggcttttttttttttttttctggtgggagacttttattactacttcactgcattattcattattggtttgctaagatttactatcgtaggatttatgtatcagtcaattcatgtcttccagcttatctaatttttgacatgcaattatt

SEQ ID NO: 941257 - DNA, 615 bp, Homo sapiens
atatatggcctttgttatggtgagatacattccttgtatacctaatttgttgagagttttggaattttgtcaaatgcttctctccacctaaataatcataaaattgtatcattcattctgttactgtgctatgtgatgtttattaattggcatctgttgaagcatccttgcatccctgggatgaatcccattttatcatgatgaatgctttttgaaatgtgcttttaaattcagttttctagcattttttkaggaattttacatccatgttcccaaatgatattgacctgtagttcctttttcattcccatgtccttctctggctttggtattaggataattctggccttgtataatgaatttgaaagtattcccacttcttcaattttttggaagtgtttgagaataattggtattagttctttaaatttttgatagaattttgcaatgagtccatattgtcctgggcttttttttttttttttctggtgggagacttttattactacttcactgcattattcattattggtttgctaagatttactatcgtaggatttatgtatcagtcaattcatgtcttccagcttatctaatttttgacatgcaattatt

SEQ ID NO: 941258 - DNA, 615 bp, Homo sapiens
atatatggcctttgttatggtgagatacattccttgtatacctaatttgttgagagttttggaattttgtcaaatgcttctctccacctaaataatcataaaattgtatcattcattctgttactgtgctatgtgatgtttattaattggcatctgttgaagcatccttgcatccctgggatgaatcccattttatcatgatgaatgctttttgaaatgtgcttttaaattcagttttctagcattttttgaggaattttacatccatgttcccaaatgatattgacctgtagttcctttttcattcccatgtccttctctggctttggtattaggataattctggccttgtataatgaatttgraagtattcccacttcttcaattttttggaagtgtttgagaataattggtattagttctttaaatttttgatagaattttgcaatgagtccatattgtcctgggcttttttttttttttttctggtgggagacttttattactacttcactgcattattcattattggtttgctaagatttactatcgtaggatttatgtatcagtcaattcatgtcttccagcttatctaatttttgacatgcaattatt

SEQ ID NO: 941259 - DNA, 578 bp, Homo sapiens
gcaatttacctatatgacacctacccaagtacccccctgaacctaaaataaaagttcataaaatacatgaatataaaactgacgaattggttagaacaaatatattttcttaaagtattgatttacttttgatgaaattacaaaaagctttacatttttaattctataatctctttttgaaatttctctgaggccaggcatggtggctcacgcctgtaatcccagtgttttggaaggccgaggtgggtggatcatgaggtcaggagattgagaccatcctggctagcacggcgaaaccctgtctctactaaaaatacaaaaaattagctgggtgtggtggcgggtacttgtagtcccagctacttgggaggctggggcaggagaatggcgtgaacccaggaggtggaggttggagtgagctgagatygcgccactgcactgcagcctgggtgacagaccgagactccatctcaaaaaaaaaaaaaaaaaaaagaaagaaatctctcagattgatatttcagaagcttaactcctgatataccccactgttttcagcttttctccctttgagaaggcct

SEQ ID NO: 941260 - DNA, 680 bp, Homo sapiens
ccttcattttgggatattgttttctgagctctaacataggtttaaaagtgctcagtatacccaggcaacatcccatgctgttgctaagagtcacatattcccctgctcaaggtctctataacagtgttcactcatgacatggaacacactcttcctgtgtctgattaattcacattatcttttcatgaggcttgactttcaggttatccaaatgggcttccaatgactcaaaacaatcactctgcataaggtttttctttactttttgacagctagcctaggaaatacagatttyaagataattactgtgttgttataaaacccttaaccattttaaaacctaaaagtataggtttaaaaccaggtagggttttatattcatgtaactttctatattgcttttgaagtcttttgattaccattctggttaaatgaataactattattttacaatgacttttgattcattttaatcaaatgttttgagcctttcaatatcttttgacaaacatcctcaaaaatcaaattctaagttaagtctctgacttagacttattgccgggggttcatcaaaactatacaaattaattacccagtgctataccatctttttacagttttcaattaagtcataaactccactatcaccacctccagcctgatgattagatctcacctaa

SEQ ID NO: 941261 - DNA, 614 bp, Homo sapiens
tctccctccaaagacaaggcaactggtgtccgagtcatactctgaggataaacctatttcctaagcaaaagcctctccatcatggaaaagcatccaccagccacggtcctccccaggctacctgtggggcccaggaaggcctgcatgaagtcgggagcggagcttgttgggcgcctggtatttatcaactcctgtgctccagcctgggcgacagagtgagactctgtctcaaaaataaataagtaaaaaagtaaataacctgatcctgtctttatctaggtttaaacaaatctcttgctcatgatgacttgtttgcattaatttgtatttttaaaaacactgcactaaaatattatttatgttgaatagtttttttttgacacccctcytttaattttgcacccacagcctcaccctagtccctggcctgagccacatccgctttccccaggtctcccattttattttgagacaggggctcactgtcacccaggctggggttcaatggcatgatcatggcttactgcagcctcaacccactgggctcaagtgatcctcctgcctcggcttcccaaagtgctgggattacaggctggagccatcgctcccggccc

SEQ ID NO: 941262 - DNA, 623 bp, Homo sapiens
gcaggtctgttggaataccctgccgtgtgaggtgtcagtgtgcccctgctggggggtgcctcccagttaggctgctcagtggtcaggggtcagggacccacttaaggaggcagtctccccgttctctctgctgggagaaccactgctctcttcaaagctgtcagacaggaacatttaagtctgcagaggttactgctgtctttttgtttgtctgtgccctgcccccagaggtggagcctacagaggcaggcaggcctccttgagctgtggtgggctccgcccagttggagcttccaggctgctttgtttacctaatcaagcctgggcaatggcgggcgcccctcccccagcctggcttctgccttgcagtttgatctcagattgctgtgctagcartcagcgagactccttgggcgtaggaccctccaagccaggtgccggatataatctcgtggtgtgccgttttttaagcccgtcggaaaagcgcagtattcgggtgggagtgacccgattttccaggtgcagtctgtcacccctttctttgactcggaaagggaactccctgaccccttgcgcttcccaagtgaggcaatgcctcgccctgctttggctggcgcacggtg

SEQ ID NO: 941263 - DNA, 763 bp, Homo sapiens
atctcctggtgctatccccaaactgccactctaaactcttgaagtaaataaataatctttgctggcaggactatgctgaatctccttaggcactctctaattagatgtcctaggtcctcccaattcttagtccttttatacctatttttctccttctcttattccatttagtttttcaattcatacaaaaccgtatccaggccatcaccaatcattctatacgacaaatgtttcttctaacaaccccayaatatcaccccttaccacaagatctcccttcagcttaatctctcccactctaggttcccacaccgcccctaatcatgctcgaagcagccctgagaaacatcgcccattctccctccataccaccccccaaaaattttcaccgccccaacacttcaacactattttgttttatttttcttattaatataagaaggcaggaatgtcaggcctctgagcccaagccaagctattgcatcccctgtgacttgcacgtatatgcccagatgtcctgaagaaactgaagaatcacaaaagaagtgaaaagaccctgtcccgccttaactgataacattccacctttgtgatttgttcctgccccaccttaactgagtgattaaccctgtgaatttccttctcctggctcagaagctcccccactgagcaccttgtgaccccctgcccctgcccaccagagaacaaccccttttgactgtaattttcccttaccttcccaaatcctataaaatggcccccc

SEQ ID NO: 941264 - DNA, 763 bp, Homo sapiens
atctcctggtgctatccccaaactgccactctaaactcttgaagtaaataaataatctttgctggcaggactatgctgaatctccttaggcactctctaattagatgtcctaggtcctcccaattcttagtccttttatacctatttttctccttctcttattccatttagtttttcaattcatacaaaaccgtatccaggccatcaccaatcattctatacgacaaatgtttcttctaacaaccccataatatcaccccttaccacaagatctcccttcagcttaatctctcccactctaggttcccacaccgcccctaatcatgctcgaagcagccctgagaaacatcgcccattctccctccataccaccccccaaaaattttcaccgccccaacacttcaacactattttgttttatttttcttattaatataagaaggcaggaatgtcaggcctctgagcccaagccaagctattgcatcccctgtgacttgcacgtatatgcccagatgycctgaagaaactgaagaatcacaaaagaagtgaaaagaccctgtcccgccttaactgataacattccacctttgtgatttgttcctgccccaccttaactgagtgattaaccctgtgaatttccttctcctggctcagaagctcccccactgagcaccttgtgaccccctgcccctgcccaccagagaacaaccccttttgactgtaattttcccttaccttcccaaatcctataaaatggcccccc

SEQ ID NO: 941265 - DNA, 643 bp, Homo sapiens
ggaagaaagggaagaaggaagagaggaagaaaggggaagaaggaagggagggagggaggaagggaggcaagaagcagttctacatctgcaaggaaattaattctgccaaaacctaggaagtttggaagaagctcccaagtctcagatgaccctaccctggctgacatgttgggttttgtttcgtttgagatggaatctcactctgttacccaggttggagtgcagtggtgcgatttcatctcactgcaacctctgcctcctgggtttaagcaattctcctgcctgtctcccaagtagctgggactaaaggtgcatgccaccacacctggctaacttttgtatttttagtacagatgaggtttcaccatgttggccaggctggtctcaaactcctgacctcaagtgatccacccaccttggccttccaaactgytgggattacaggcgtgagccaccgtgcctggacctggctgacactttgactgcagctttgtgagaccctgagcaaaggacccaggtaacccaggcctggactcccaacccacagagactgtgcgctaataaatgtgcgttgctttaaatgctaaagtaacacacatttgtaatttgtttcagcagcaataaaaaacaaatgtatgtgagc

SEQ ID NO: 941266 - DNA, 631 bp, Homo sapiens
acatatatatgtgtgtgtatatatatataaaatatatataaataataagacgtggagcaaccacaaaactatataaagtaatacactcaaaagcactagagaatgaaattctaaaaaaaagtttaacccacagaaaggcaggaaaaagaaagaaaaagagagcaaacagaaaacaaaaaattaaatggcagatttaaaccctgatgtattaataataacattgtaaattatgtcagtagtctatgtaaaagatgtaaattgcctaaatataccaattaaaagacagagattagtagawcagatttttaacaaatgactcaagcatatgttgtctgtaagaattctttttaaatagaatgatacaaataggttgaaagcaaaatgatggaaaaagatacattataaaaacacaatcaaaagaaagctggagtagctatatcaatattaagtaaagtagacttcagagcaaagaaaatgttatgagagacagagagggacattgtataatgaaaaaaaggtcagtctaccaaaaagacatagtagtactaaatatgtatgcaccaaacaacacagttgcaaaacatgagaaacaaaaactgatagaactgaaaggagaaatgagcaaatagac

SEQ ID NO: 941267 - DNA, 569 bp, Homo sapiens
gatgccccaagtcccgaggctgcacactgcaggggggccctggaccctgcccataaaaccattttttacctcctaggcctctgggcctgtgatgggaggggctgctgtgaaagtctctgagatgccctagagacattttccccrctgtcttggtgattaacatttggctccttgtttcttatgcaaatttctgtagccagcttgaatttctccccagaatatgggtttttcttttctaccacatcgtcaggctgcaaatgttgactccatgtctcacatccaggtcatgtggggattatgggaagtacatcttgaattgtaatccccataattctcacaggtcaagggaagaacctggtgggaggtgattggatcatgggggctgttttcctgagacgggggtgagttctcatgagatctcatggttttataaggtgctcttcctgctttgctcttcgttttctctctcatctgccaccatgtaagacatgcctcttcctcttcactatgattttaagtttcctgaggcctccctaaccatgtggaactgtgagacaattaaaactctc

SEQ ID NO: 941268 - DNA, 732 bp, Homo sapiens
actcccagcacctgctaacccaaatcttctttctgtcactaccattttaccttttccacaatatcatatacattaaccagccatttcatttggcttcttttgcttagccatgttatttgtacacacatttataatatataacctcaatagttggttcatttttattgccaagtagtattccattacatggctatttcatagtttgtttttctaagtgaaggatatttgagttgttttctagttttggtggttgtcaaagccactgtgaacattcacatacaggttattgtgcaaatataagttttcattttatttggacaaatacctaggagtggggttgctgggctctatggtaaatatatgtttaactttataagaaattgctgcactttttttcaaagcagcccctattgttttgaattcccaccagcaatgactcagagttccagttaccccaaatcctcaccagcacttgtttttgtcagattttctttttgtttttcatcctcctaatacatttagtgtggtaacattgcattgtggttttaatttgcagtactgtaatgtgttttctcacgtgtttgtgtgcyacatgtacatcttaattgttgatatatctgttcaaatcttttgcctattttaaaaattgggtgttttcttactgagttttgagagttctttatcctgtacacaggtcttttgttggacatatgttttatacatgtttttttc

SEQ ID NO: 941269 - DNA, 569 bp, Homo sapiens
ccccttctgctgtctctgaacattgtatacataactctgttaaatgctgttgtcatcttgaatccacagagaagaataagcctgatgacacactgacacacaacaaaggacactggcaagagaatcacagagaagaggaccagctccttgatcgygccacacatggcccagtcctgtgctggagcttcctgtttgtgaaatcacatactcctctctggctcaatgagccagggattcagttacttgtagtcaaaaacatcttgatgttgacttctgcatattctgaggagagcattagaaaataaggattaagaaactgagagtacatatagatcttgggtcattattactcccactgcattttacaaccctcataactaagagctatggttgtcaaagtattccattttttccaaatgatgttcaatttttaaaaacctaatacttgagttaatattagtgagataaatcactaattctttactctaacaactctaaataagaatgaaaccaaaaaaaatcttactttatcaacatatgagtccctttcttcatatgttggagacagg

SEQ ID NO: 941270 - DNA, 744 bp, Homo sapiens
tcttgtgaatagggtagtatggatgaagcagaagttttaagttgagatataagggagaataaattcagaaagataaactagtgatagctggtctggaatacatggctaagggatttaattctatttaggaattggaggtagacttaagacttctgagaaaatgaatgacataaatatagaatmcttaagtgacagagcttagaagatcccttagcagacataatctggactcctactttcacaaacagggaaagagagacccagaatagtgacagagttaattatttgcagaactaggactagaatccaggtattaaacctcctttagactcagtcattccactagaataagtccaaagggttattcaacatttgtcaagtgcttagaaaataggagttttcagcaggtttggaaaaaaaggaaacaactgttcagagtttggtttgtgttaagtaaaatcaaagaattgtctttccattggtactttcagccaaacgagttaagattttctttcagtactaatcaaaatgttctcttgatcactagtaacaacctcagaaatgtttgttcgaggaggtaaaaaataaatgggtatttctagaattctttcattggtatttataattgtactgctagtgagtttgaagggtaaagtttttgcttaaataaaatggaagatcataagttgtctagtaacttttaaagtagctgttttccaagaattttaaatatgaaaatataaa

SEQ ID NO: 941271 - DNA, 606 bp, Homo sapiens
atgtcagaggtagatcacaggtggcaagacaaagaggcccaatgcagtttcatgattattttgaaccctggagaaaactggcttttgatgtgaagtcttttatagagaagtcacatcccaggatattcttataattcagccattctccatctggctaatcttaaccataggaagggagttcaatagtgtccacttttgtgggcttagcaaattgtgctatgtatgtcatatacattatctcatttaacccttaccaaaaccagtgaacccmccaatagataccattatccccatttatgtctagtgatatgaaggggcttgccaaagtcactaagcaagttagcaccagcacggcaatttgaatcgttcccccgattccaaatctagtgtccgtctcctacaccagtggttttcaagtgtggttcttggaccagtagcattgacatcacctgagagcttattagaaatgcacatgctcaggctccttctagatttcctaaattggacactctttgtcggacccaaatctgtggttaagcacactctccaggtgattctggagcacatgaatgtttgcgggtaccgagctcgaattcgtaagcgtgt

SEQ ID NO: 941272 - DNA, 606 bp, Homo sapiens
atgtcagaggtagatcacaggtggcaagacaaagaggcccaatgcagtttcatgattattttgaaccctggagaaaactggcttttgatgtgaagtcttttatagagaagtcacatcccaggatattcttataattcagccattctccatctggctaatcttaaccataggaagggagttcaatagtgtccacttttgtgggcttagcaaattgtgctatgtatgtcatatacattatctcatttaacccttaccaaaaccagtgaacccaccaatagataccattatccccatttatgtctagtgatatgaaggggcttgccaaagtcactaagcaagttagcaccagcmcggcaatttgaatcgttcccccgattccaaatctagtgtccgtctcctacaccagtggttttcaagtgtggttcttggaccagtagcattgacatcacctgagagcttattagaaatgcacatgctcaggctccttctagatttcctaaattggacactctttgtcggacccaaatctgtggttaagcacactctccaggtgattctggagcacatgaatgtttgcgggtaccgagctcgaattcgtaagcgtgt

SEQ ID NO: 941273 - DNA, 753 bp, Homo sapiens
aatgaactgaaatcaaaacagtttctcagaccacagtacaataaaattagaactcaagattaagaaactcactcaaaaacacaaaactacatggaaactgaaaaacccactcctgaatgactgctgggagataatgaaattaaggcagaaatcaagaagttctttggaaccaatgagagcaaagagacaacatgacagaatctctgacactcacctaaggcagtgttaagagggaaatttakagcactaaatgcccacatcaaaaagctagaaagatctcaaattgacacctaatatcacaacaaaaagaactagagagccaagagcaaacaactcccaaagctagcagaagaatagaaatcaccaagatcagaccagaactgaaggaggcagagacacaaaaaacccttcaaaaaatcaatgaactcaggagctaggttttagaaaaaaataaaatagatggaccattagctaaactaaaagagagaagaatcaaatagaaacaataaaaaatgataaagggtatatcatcactgattccacagaaatacaaacaaccatcagagaatactatgaacaactctatgcaaataaactaaaaaatctagaagaaatggataaattcctggacacatacaccctccctagattgaacaaggaagaagttgaatccctgaatagaccaataacaagttctaaaatttaggcagtaataaatagcctaccaaccaaaaaaagcccagaaccagatgg

SEQ ID NO: 941274 - DNA, 818 bp, Homo sapiens
ctacatggattgcaaatattttctaccattgtgtagcttgcctgtttactcttttgatagtttattttgctgtgcagaaagtctttagtttaattaggtcccacttgtcaatttttgcttttgctgcaattgtttttgaggactcagtgataaattgtttcccaagactagtatccagaatggtgtctcctaggttttcctccaggattcttatagtttgaagttgtaattttaaatctttgatccaccttgagttaatttctgtatatggttaaatttcagtcttctgcatatggctagccagcaatcccagaaccatttattgcatagggagtgctttccccattgcttatttgtgttaactttgtggaagatcagatggctgtagtcatgtggatttattwctgtgttctgtattctgttccattggtctatgtgtgtattttgtagcagcaccatgctcttttggttactgtagccttatagtatagtctatagtataggtaatgtgaagcctctgatttccttctttttcttagaatagttttggttatttgggctctttttggttccacatgaattttataatagttttttttctagttctgagaaaaatgatgttggtagcttgatagaaatagtgtgaaatttttagcttgctttggtcactatggccattttaataatattgattctttcaatccatgaaaatggaacatttttcatttgtttgtataatctgtgacttttttcagcagtagtttgtagttctccttgtagaaatctttcacctccttggttagatgtattcctatatt

SEQ ID NO: 941275 - DNA, 514 bp, Homo sapiens
cccagcagtggcagtggaccagggcatctctgtactcttggggacccaggaagcacctctgccccctcaggttcaaaagtgcctgctcccgttgcctggcctctccctgcttctgacgaccccaccgattttggagcaaagttgtggctgagcccaggtgctgtcacaatctggcttggtgtgcacgcattcgaggcagtgctgacaagccagcccctgccacctcagccccctctggacattgaaccctgacgagcacaggacggaggctgaagggggctgtgaatggcttggtgtgagcctgcagacacccctcggcacaaamagcctgggtgccatgggcaccatggacggcaggttaatgttggcaggaagcagacaggctcctgggaagaaagggataggtcctcagtgaaaccccaccttcaggccagggacggcctgagacctgggggctgggctgccagttccatggactggagttagaaattatggtgctctttctaggcccacc

SEQ ID NO: 941276 - DNA, 587 bp, Homo sapiens
ttatggtgctctttctaggcccacccatggctgcccatggaccaatcagcatgtacttcctcccctctgaagcccttgaaaacatcatagtcagccagactcaggcaaatgaagggatgaaatgcttacagagaggaaatatgtattgtgggtctccgctccactgagagctggacacttggggatgacctacctgtggagaggagtgatccactttgggtctcctctgagctgttcttttgctcgacataaagcacctctttgccttgctcaccctcctcttgttcaggtacctcatttctcctggatgcaggacaagaactctaggcctgctgaatggcaggactgaaagagcrataacacaaacagggctgagacataccccttgcttgccacattatgggccatgagaaggagaaaagagtgaaggagagaagagctgcagctcttctgggagcccagatgtaggagctccccaggccaagtctgtgacacactctttggggctttgtggttcctggcatctccaagctttcgggtgccactgcatttcccaatgccagctgtggaagctgcttgcagtatgc

SEQ ID NO: 941277 - DNA, 760 bp, Homo sapiens
tgccaagggttatttagcaacatacattagtttgtttatttgttttctgatataaaaatctttgttaaacatcttatggtgtgctgctataaagacacatgcacacgtatgtttattgtggcactattcacaatagcaaagacttggaaccaacccaaatgtccatcaatgatagactggattaagaaaatgtggcacatatacaccatggaatactatgcagccataaaaaaggatgagttcatgtcctttgtagggacatggatgaagctggaaaccatcattctcagcaaactatcgcaaggacagaaaaccaaacatcacgtgttctcactcataggtgggaattgaacaatgagaacacttggacacaggatggggaacatcacatgctggggcctgtcatggggtagggggagggggagggatagcattaggagatatacataatgtaaatgacgagttaatgggtgcagcccaccagcatggcacatgtatacatatgtaacaagcctgcacrttgtgcacatgtaccctagaacttaaagtataataataataaaaaataaaactaaaaataaaaaaaatcttatggtgaaggaagcttccaaaaaaagatgcaaggtaatatggccatgagcttgaattatatttactcttgtcttattcattcatcacattacatctatgcactagacattgagctgggcattgtatggctggcatttgtcagaccaaattgtgctgtgatatcatgata

SEQ ID NO: 941278 - DNA, 760 bp, Homo sapiens
tgccaagggttatttagcaacatacattagtttgtttatttgttttctgatataaaaatctttgttaaacatcttatggtgtgctgctataaagacacatgcacacgtatgtttattgtggcactattcacaatagcaaagacttggaaccaacccaaatgtccatcaatgatagactggattaagaaaatgtggcacatatacaccatggaatactatgcagccataaaaaaggatgagttcatgtcctttgtagggacatggatgaagctggaaaccatcattctcagcaaactatcgcaaggacagaaaaccaaacatcacgtgttctcactcataggtgggaattgaacaatgagaacacttggacacaggatggggaacatcacatgctggggcctgtcatggggtagggggagggggagggatagcattaggagatatacataatgtaaatgacgagttaatgggtgcagcccaccagcatggcacatgtatacatatgtaacaagcctgcacgttgtgcacatgtaccctagaacttaaagtataataataawaaaaaataaaactaaaaataaaaaaaatcttatggtgaaggaagcttccaaaaaaagatgcaaggtaatatggccatgagcttgaattatatttactcttgtcttattcattcatcacattacatctatgcactagacattgagctgggcattgtatggctggcatttgtcagaccaaattgtgctgtgatatcatgata

SEQ ID NO: 941279 - DNA, 656 bp, Homo sapiens
attagagagttacttgaaaacaaaagtggctgtctgctgaggtggagcatgccctgctgctgacaatgttgaagcagggtctggacaaccccttgttgagggcatttggtggccagatcttcttttcagtgtcttcagaccttgggctctgatgaaggtgacggtgtggctctgccactgacatggcacagtgcctggcctgtgcagcttatttctgcttcttccgtggyccttacctttattgacaatttcttagcaatccataactgtccatggaaactaaacttcagaagattattgaagcatttctcctttcttgcttgttctggaaaattactctcactaaacagtgtgtgttattatatacatcctctgctaccctaacccaaccctagtgttgtttaaaggcaatgagacaacatcatatagtgatcaatatggtcaacagagctcaaatccttgctccagcagttgccaagttgggcgattttcctaatctcgctaccctccttttcccaaactatacaatagggtcaatgatattatcgatctcagcaatacgattgaggattaaatggcataatgcatgtagagtgtttaagtacagtgcctgaaatacagtagatgctcattgatagcaactatatttcattgtt

SEQ ID NO: 941280 - DNA, 654 bp, Homo sapiens
gagggtggaggaattgatagaaaaggggaaggatcagtattatatgttaaatgtttagaactagctggggcggtgggtgggtgaaagttttgatttgtagcatttgttgatttttatgctgtgaatacttccaatctcaagatatctagctgccaatgtgatatgactgaactaggagttaggaatgcatgtgagcagttgactcccacagccccagagagctggctccagcatgccactgggaggagatgaagaaacattygttggtaatagaaacattctaattcttcttctgggatgtggttatatgggtatataaaattgtcaaaagtcaacctgggtgtggagccaagatggccgaacaggaacagctccggtctacagctcccagcgtgagcgatgcagaagacaggtgatttctgcatttccatctaaggtaccaggttcatctccctagggagtgccagacagtgggcgcaggacagtgggtgcagcgcaccgtgcgtgagccgaagcagggcgaggcattgcctcacttgggaagtgcaaggggtcagggagttccctttcctagtcaaagaaaggggtgacagacgccacctggtatatcgggtcactcccaccctaatacggcacttttccaacgggcttaaa

SEQ ID NO: 941281 - DNA, 655 bp, Homo sapiens
tgaacttttaacaaatggctaaaatcagagtgtgagctagtgtgagagcatagagccatagatatgagggagtttctaactatttgaagtttctttgtttttatttaatttttttgagatggagtctcatcctgtcgcccaggctggagttcagtggtgtgaacacagctcactgcaacctccacctcctgggttcaagcaattctgctgcctcagccccccgggtagttgggattacaggcgtgcgccaccatacccggctaatttttgtatttttagtagagacagggtttcaccatgttggtcaggctggtcttgaactcctgacctcgtgatccaccyaccttggactcccaaagtgctgggattacatgaaatctctttattaacctcatggggggttcattagaaagattgggagcagggcaactgatctcaaaaaaaaaaaaaaactattgtattgcaggcttggggaaggggagcagccattgctgcaggaaagaggaaagacaacagagctctgcccaggtccttctcccccatggaaaagtaagcttatgtcactaggggatggctggcaaatactatcattctcaagtgaagacctattgaggctagaagaaaacagaaaaactgcctacccttagaggaaaga

SEQ ID NO: 941282 - DNA, 655 bp, Homo sapiens
tgaacttttaacaaatggctaaaatcagagtgtgagctagtgtgagagcatagagccatagatatgagggagtttctaactatttgaagtttctttgtttttatttaatttttttgagatggagtctcatcctgtcgcccaggctggagttcagtggtgtgaacacagctcactgcaacctccacctcctgggttcaagcaattctgctgcctcagccccccgggtagttgggattacaggcgtgcgccaccatacccggctaatttttgtatttttagtagagacagggtttcaccatgttggtcaggctggtcttgaactcctgacctcgtgatccacccrccttggactcccaaagtgctgggattacatgaaatctctttattaacctcatggggggttcattagaaagattgggagcagggcaactgatctcaaaaaaaaaaaaaaactattgtattgcaggcttggggaaggggagcagccattgctgcaggaaagaggaaagacaacagagctctgcccaggtccttctcccccatggaaaagtaagcttatgtcactaggggatggctggcaaatactatcattctcaagtgaagacctattgaggctagaagaaaacagaaaaactgcctacccttagaggaaaga

SEQ ID NO: 941283 - DNA, 555 bp, Homo sapiens
atctgatcctgggctttttttgttttttttggttggaaggttatacattactgcttcaatttcagaccttattattggcctattcagagattcaacttcttcctggttcagtcctgggagggtgtatgtgtccaggaatttatccatttcttcttgattttttagtttatttacatagagatgtttatagtgttctctgatggttgtttgtattttcttgggatyagtggtgatattccctttattattttttgttgtgtctacttgatttttctctcttttcttctttattagtctagttaatggtctattttattttattttttcaaaaaaaccagctcctggattcgctgattttttgaacgggttttcatgtccttatctccttcagttcatctctgcttttgattatttcttggcctctgctatctttggggtttgtttgctcatggctctctagttcttttagttgtgatgttagggtatcactttgagatctttctagctttttgatgtgggcatttagtgctatcaatttccctcttaacactgctt

SEQ ID NO: 941284 - DNA, 727 bp, Homo sapiens
tgctggatcccatctgaagccagcaggtctcagagtctcacccaaggcccatggtatgtactacctggttaccactgctgattattcagggtccaggggctctttcgtcagcaggtgatgattcctgccattactgggtccttcccttcagggcagtaggctcccttctggcccagggtgtctagaaatgtcatctaagatctagggcatggaatgggggcctcatgactctgcctggtgccttatcctaccgtgactgagctggtacccaagttgcatgacaaagtcctctttactctcctctcctctaacagaaggagggggtctcttttsgagctgtgagctgcgctgcctgggtttgggggataggggatgcaagtgctccctgagccaccctggctggtgtctcattaggtcatgtaacccccaagtccactggctctgagcccagcacagcactaggactcacctgggtgttgcagtccttgtggcctggtttatttagaacccagaacactttaacctatggtaacaaggcttgctggaactcaagttctgactgctgagatgggtgattctcctctgtctaggctggtctaaatgctccctccgtgggcatcggctgagttctacccactgctggcagcaatgagttccaatgcaaagtcccacaactgctgcactctcctttccccgtcacacaggttctctctgagcaccatgtggc

SEQ ID NO: 941285 - DNA, 727 bp, Homo sapiens
tgctggatcccatctgaagccagcaggtctcagagtctcacccaaggcccatggtatgtactacctggttaccactgctgattattcagggtccaggggctctttcgtcagcaggtgatgattcctgccattactgggtccttcccttcagggcagtaggctcccttctggcccagggtgtctagaaatgtcatctaagatctagggcatggaatgggggcctcatgactctgcctggtgccttatcctaccgtgactgagctggtacccaagttgcatgacaaagtcctctttactctcctctcctctaacagaaggagggggtctcttttggagctgtgagctgcgctgcctgggtttgggggataggggatgcaagtgctccctgagccaccctggctggtgtctcattaggtcatgtaacccccaagtccactggctctgagcccagcacagcactaggactcacctgggtgttgcagtccttgtggcctggtttatttagaacccagaacactttaacytatggtaacaaggcttgctggaactcaagttctgactgctgagatgggtgattctcctctgtctaggctggtctaaatgctccctccgtgggcatcggctgagttctacccactgctggcagcaatgagttccaatgcaaagtcccacaactgctgcactctcctttccccgtcacacaggttctctctgagcaccatgtggc

SEQ ID NO: 941286 - DNA, 594 bp, Homo sapiens
tcttctccgaccacaatggaataaaactggaaataatgaggaattttggaaactatataaacacatggaaattaaacaatatgctcctgaatgaccagtgggtgaatgaatagattaggaaagaaactgggctgggcacagtggctcaggcctataatccccacattttgaaaggccaagacaggcagatcacttgaggccaggagtttgagaccagcctggccaacatggtgaaaccctgtctctactaaacaatacaaaaattagccaggtgtaatggcatgcacctgtaatctcagctactcaggaggctgaggcatgaaaatcacttgaacccaggaggcagaggttgcagtgagcagagattgtgccactgcaatccagtctgggtgacagagcaagactctgtctcaaaaaaaaaaaraaaagaaactaaaaaatttattgaagcaaatgataatggaaacacaacaaaccgaagcctatgtatgggatatagtaaaagcagtattaagaggaaagtttatagctaagagtgcctacatcaaaaacaaaataccttcaaataaacaacctaatgatgcatcttaaaga

SEQ ID NO: 941287 - DNA, 584 bp, Homo sapiens
tctgtcaattcatcaaactcattctccatccaattttgttcccttgctgtagaggagttctgatcctttggaggagaagaggctttcttgtttttggaattttcagcctttttgtgctggattttccttatcttcatggatttatctacctttggtctttgatgttggtgacttttggatgggtttgtctgtggatgtcctttgttgatgctattcctttctgtttgttagttttccatctaacagtcaggaccctctgctgcaggtctgctggagtttgctgggggtccactccagaccctctttgcctgggtatcaccagcagaggctgcaaaacagcaaagattgctgcctggtccttcctttggaagctttgttccagaggggcacctgccagatgccagccagagctctcctgtatgrggtgtctattgatccctgctggtaggtgtcttccagtcaggagacatgggcaccagggacccacttgaggaggcagtctgtcccttagcagaggtctagtgctgtgctgggagatccactgttctcttcagagttggcaggctggaacgtttaagtctgct

SEQ ID NO: 941288 - DNA, 599 bp, Homo sapiens
tttttgctttacgtgttttgaagctcagttactatatgtattcacatttaggagtgttatatcttgatgagttgaccttttgtctccttgtgaaatatacatttttatctcagtaatagttcctatcttgaagtgtactttgtctaatgttaatgtagccattccagctttcttatgattggtatttgtgtggtatacatttgtccctcttgtccttgggagattggtccagtacttcccaaggaccccaaaatttgtggatgcagaggctgaagtcttttatataaagagagcagtatttgcatataacttatagcacatcctgctgtatactttaaatcacctctagattamttagaatgcctaatacagtgcttacacataacctcatttgcgtggattcatttaaggtagtatttggcacatggcaaattcaacttttgctttttgtaactttgtggaactttttttcccaaatgttttccgtcgtcagttggttcatccatggatgaattcatcggtatggagagctgactgtatttttttcctattccttttccttttcttttaatctatctatgtttaagataggttaaaga

SEQ ID NO: 941289 - DNA, 636 bp, Homo sapiens
aaacagtgtcttgctgtcacccagtctggagtgcagtggcacaatttcagctcactgcagccttgacctcctgagctcaagcagtcttcccacttcagcctcctgaatagctgggaatacaggcatgcaccaccatacctggctaatttttgtgtattttgtagaaacagggtttcgccatgttgcctgggctggtctccaactcctggactcaagtgatgtgcccaccttggcctcccaaagttctgggattacatgcatgagccactgtgcccggcctgctttttaacagtttattttttcttagtgtactaatgtggtgaatttcattgatttattattattttttaaaattttattttaatataaagttacagaaagattataagaagagtacaaagaactygtatatcctttacccagttcatatttgcaccatttttcatttatcatttccccgattgtcttaccatttccccttccatatatagtctttctatagatgtaaacgcacacacacacgtccttttttttttttttaaaaaaaaaaaacaaaaaaaaaaacaaggtctcgttcattcagtggtatgaacacagatcacagcagccttgatctcctgggctcaagtgatcctc

SEQ ID NO: 941290 - DNA, 714 bp, Homo sapiens
tgcccttaactcacgcctgttcacgcaactctgggaggtgatggatgtagaacacacacatcttctcttacacacagaagtgagatggctttctaaaggtagatccctggccagagtttttgagttataagaaccactccagagatttctcttagaaaaacagtcaccagtggcagcatatttcagtgacacacaatgggtcacaaaacttgctcacttggccaggcatggtggctcacgcctggaatcccagcactttgggaggccaaggtgggtggatcacctgaggtcaggagttcgagaccaacctggccaacatggtgaaaccctgtctctactaaaaatacaaaaattagctgggtgtggtggcgggtgcctgtaatcccagctacttgggaggctgagacagaagaaccacttgaacctgggaggcagaggttgcagtgagccaagatcacaccactgcactgcagcctgggcaacaagagcgaaactccatctcaaaaaacaaacaaacaaamaaaaaaaacctgctcaattgtgtgacatattcaacctgctcaacaaactcaatctgtcatttcgggagagaatgacaactgtgttcaagtcagcagataaagtggctgcattcaaagccaaactggaactatgagggcgatgagtgaacattgggatttctgaaatgtttcaaacattagcagagattttgaa

SEQ ID NO: 941291 - DNA, 804 bp, Homo sapiens
gggagtacggagtcttgctctgtcgcccaggctgaagtgcagtggcgtgatctcggctcgcagcaacctccacctcccaagatcaagcgattcttgtgcctcagcctccccagtagctgggataacaggcatgtacgaccattcccggctaatttttgtatttttagtagaggaggtttcaccatgttggccaggctggtctcgaactcctgaccttgtgatccacccacctcagcctcccatagtgttgggattacaggtataagccactgcgcctagccagttttttgtatttttagtagagatggggtttcaccatgttggccaggctggtctcgaagtcgtgaccactcctgaagtgctaggattacaggtgtgagccactgcgcccagctagggtgcaagttttattggtttcatcaaaaagtatcaggggccagacatggcggctcatgcctgtaatcctagtgctttgggaggcaaaggcagaaggatcgcttgagcccaggagttcaagaccagcctgggcaacgtagggagactccatccctacaaaaaatttttaaagtagctgggagtggtggtgcaccactcccaagtcrcagctacttgggaggctgaggtgggagtatcacttgagcccaggagttcaaggctacagggagctgtgattgtactgctgcattccagcctgggtaacagagcaagaccctgtctctttaaaaaaaaaaaaaaaaaaagaaagaaagaaagaaagaaaaaggctgggctcatggctcacacctgtaatcccagaactttggg

SEQ ID NO: 941292 - DNA, 621 bp, Homo sapiens
tctcggcctggggaatacagtctagattccgactggcctgggttctgatcctggtactgccacttcttgggcaagaaactccaactcccttggcatcagtttcctcatctgaaaagtgggaatcatgacaactcatctaaaagatgtgttatgaggattaagcaagatagtgtcagtaaaagtagttgcacatagtaggctctctctccctctctccctaacacatatatactgagcccctagtatatgttgagcactgttctcagtatgtgggatattcagcatgcaacaggcccaaattcctgctctcctggatctcacaaggtattggatgtgatagggtaagayggacagtaaacaaaaaacatagcaagtaaattatgtaacatgttagatgacaggaagtgttatgggaaaggagaaagtggagcaggaacaggggacaggtgcactaggctgaagttttaaatggagcagtcattgagaaggtgacatttgaataaagacacataagagatgagggacagcaaagaccctgagacaggatcatgcttggcatgtcccagaaacagcaaggaagacaacgtggctggaggggaggtaggagacgatcagagagga

SEQ ID NO: 941293 - DNA, 640 bp, Homo sapiens
tacaagagactaaccaaaaagctttaaaggaaaagctaggaaataagatgtccacatgggctctgagaagctccaacatattcctgagaatctagaaggctgcatgcaagcatagggctgtgtaaatgcccagagctatgtacatgctcaggaaagacctgagaaggctctaagctctcacctctgctaaccttgaggctttaaaacaggaagtgcaggctaaggcagagttgtaaactgcatggatgggtgttaaggatgtgctccaacacacacacacacgcrcacacacacacacacacacacacagagcccttcagcaaagactgagggacttactggttccagacgtttaagtaaatctctgtctaatcattagctgatcacaaagctaactgagcagagacttcaatggctttacagactttacagaattagttcagaaaagtcattaattaaatagtgacaacaaacagcaaaggcaacaacaaatcctgagaagggaagagaatctgatttccagatttgccacattatattcttttaagtgtcaaattttcaacaaaaatattactagaaatacatagaaacaagaaactatgagccataaataggagaaaaaagcagttaataaggagta

SEQ ID NO: 941294 - DNA, 610 bp, Homo sapiens
tcatacaagagactaaccaaaaagctttaaaggaaaagctaggaaataagatgtccacatgggctctgagaagctccaacatattcctgagaatctagaaggctgcatgcaagcatagggctgtgtaaatgcccagagctatgtacatgctcaggaaagacctgagaaggctctaagctctcacctctgctaaccttgaggctttaaaacaggaagtgcaggctaaggcagagttgtaaactgcatggatgggtgttaaggatgtgctccaacacacacacacacgcgcacacacacayacacacacacacagagcccttcagcaaagactgagggacttactggttccagacgtttaagtaaatctctgtctaatcattagctgatcacaaagctaactgagcagagacttcaatggctttacagactttacagaattagttcagaaaagtcattaattaaatagtgacaacaaacagcaaaggcaacaacaaatcctgagaagggaagagaatctgatttccagatttgccacattatattcttttaagtgtcaaattttcaacaaaaatattactagaaatacatagaaacaagaaactatgagcca

SEQ ID NO: 941295 - DNA, 598 bp, Homo sapiens
tgtccagaaagagagtgaactgtgcacctaaaagaaggagattaattgaaaggttgtggccaggcatggtggctcacgcctgtaatcccagcactttgggaggccgaggcaggtggatcacgaggtcaggagatcgagaccatcctggctaatgctatgaaacctcatctctaccaaaaaaaaaaatacaaaaaattagctgggcgtggtggcacacgcctgtagtcccagctacttgggaggctgaggcaggagaatcacttraacccaggaggcggaggttgcaaggagccaagatcatgccactgcactccagcctgggcaacagagcaagactctgtcaaaaaaaaaaaaaaaaaggaaagaaagaaaggaaggaaggaaggaaggaaggaaggaaggcaggaaggcaggcaggcaggcaggcaggctgtatgtggaagcactggctccgatctccaccttcaactacagaattcaactacagaacaccctacagctagtctttacccgacaagaccaaaatataaaagccaaaacaaaatccaatcaagcaaaaagtggagtgttctttgtcaaacacatacaatgaactctc

SEQ ID NO: 941296 - DNA, 571 bp, Homo sapiens
cactgatccatcagccctctgcgcccctcgtccttggaaagagcagtggcctgccccgcttctaaaagccctggggctccggaaagctgacggctctttacaggactcgagcaaacaggaacaggggcgaatccgagggggagaccatgtgaccacacgcggcactggcrtatcccacagcggatggtgtgaacgtgtgtcaccggaggcatacagggccaccgtgaaacaaacggtggtgtccaggcatgtgccggtggaaggggggatcgagggaactttccctcaatgccaaggaaaatcaaagaacacctgggacctggggggtaggagtcctgttcctgacccaagccacgttttccagtgcctaccagggagcaaagaggtttctgcaaaattcgccccacccccaaccctccaccgccccggtagccctgacgcaacttcggctgcacccagccccagcccagtccctttggttccctgatattcgtttcggccagaagatcaagggagtcagtgcaccctggagcggaggagaggatgtcccacaagaatgagacaggaagtg

SEQ ID NO: 941297 - DNA, 571 bp, Homo sapiens
cactgatccatcagccctctgcgcccctcgtccttggaaagagcagtggcctgccccgcttctaaaagccctggggctccggaaagctgacggctctttacaggactcgagcaaacaggaacaggggcgaatccgagggggagaccatgtgaccacacgcggcactggcatatcccacagcggatggtgtgaacgtgtgtcaccggaggcatacagggccaccgtgaaacaaacggtggtgtccaggcatgtgccggtggaaggggggatcgaggraactttccctcaatgccaaggaaaatcaaagaacacctgggacctggggggtaggagtcctgttcctgacccaagccacgttttccagtgcctaccagggagcaaagaggtttctgcaaaattcgccccacccccaaccctccaccgccccggtagccctgacgcaacttcggctgcacccagccccagcccagtccctttggttccctgatattcgtttcggccagaagatcaagggagtcagtgcaccctggagcggaggagaggatgtcccacaagaatgagacaggaagtg

SEQ ID NO: 941298 - DNA, 698 bp, Homo sapiens
gtaacttcactgatccatcagccctctgcgcccctcgtccttggaaagagcagtggcctgccccgcttctaaaagccctggggctccggaaagctgacggctctttacaggactcgagcaaacaggaacaggggcgaatccgagggggagaccatgtgaccacacgcggcactggcatatcccacagcggatggtgtgaacgtgtgtcaccggaggcatacagggccaccgtgaaacaaacggtggtgtccaggcatgtgccggtggaaggggggatcgagggaactttccctcaatgccaaggaaaatcaaagaacacctgggacctggggggtaggagtcctgttcctgacccaagccacgttttccagtgcctaccagggagcaaagaggtttctgcaaaattcgccccayccccaaccctccaccgccccggtagccctgacgcaacttcggctgcacccagccccagcccagtccctttggttccctgatattcgtttcggccagaagatcaagggagtcagtgcaccctggagcggaggagaggatgtcccacaagaatgagacaggaagtgctgaggaaatgcgacaccacctgtcctgtaagacaaggccagtcacggtcgcccagcgctcattgtaggcaatccacccacccatgaggggaaacgtggagaagaaggaagcttccctgc

SEQ ID NO: 941299 - DNA, 713 bp, Homo sapiens
ttacaagggctgcgggagttatgagtactgttctgtagacaagtccgatcaatacaggtcattataatctgatcaggctgtacagtgaacttctgtccggaggctttgtaaagcccttagggctaggaagaaattgcttttatgtgtgaagtattatatcagtgctattttctttaagattgccatgtttgttaatattcctagcctgccaggaaatgcagggtttttttcttcttttaaaattgtcctgatgatatattagtttataatctatattaagatttcccatgggattttttttccttttgaaatttgaaagttcaagtgggactaagtgacatttaaggagtgcgcccatgtgctgtacgtataaaaaccaacactggatttgaagacataggttggaaaaaaraaaggttagctatctcattaataatttatagattgactacatgttgaaatgttaatattgtgggtatattgggtcaaataaaatatattattaaaatctttttaaaaagagtgccttactccagtatgtgtaggtataatatgttaaattgaaaatgagagatagagtaagcagatttttttctgatattaattaaaatataatatcgatcataatgaaaccaacacttatttcacttagtcctaggtaattcatttttgttttgttggtcttgggttaggtagaccaaactttcttctat

SEQ ID NO: 941300 - DNA, 613 bp, Homo sapiens
actctctatgcaactactcaacatggcccttgtagcaggaaagcagccgtgagaatactgacccaaggagcatgactgtgttccaataaaactttatttaaggccgggcgcggtggctcaagcctgtaattccagcactttgggaggccsagacaggcggatcacgaggtcaggagatcaagaccatcctggctaacacggtgaaaccccgtctctactaaaaatacaaaaaattagccgggcgtggtggcgggcgcctgtagtccccgctactcgcgaggctgagggaggagaatggcgcgaacccggggggcggagcttgcagtgagctgagatcacgccactgcgctccagcctgggcgacagagcaagactccatctcaaaaacaaaaaacaaacaaacaaacaaacaaaaaaacaactttattaaaaaaataaaataaaaacaaaacctgacagccagttttctgacccttattctagagtctagaccaaaaccactctagagaatctgagtcagtcccttggttcagtcgaacaggtccaatgccagcttatagagggaagtccgtatccatgggtgtttatgtcctgtgatatcaatagtcctgat

SEQ ID NO: 941301 - DNA, 718 bp, Homo sapiens
caaggctgcagtgagctgtgatcgtgcctctgcactccagcctgggtgacagagagagaccttgtctcaagcaaacaacagcaaccccgtctctactaaaaatacaaaaattagcctggtgtggtggcaggtgcctgtagtcccagctcctcgggaggctgaagcaggagaatcgcttgagcccaggaggtggaggttgtagtaagccgagatcacgccactgcactccaacctgggcaacagagcgagactctgtctcaaaaaaaaagaaaaaaaccaaaacccaaaaaacaaaaaccaaacaaacaaacaaaaaacaaaacaaaacaaaaacaaacaaaaagagataatctgaacacaaatrgcttttcgagaactctcattgtttctgtcctagacaggattcattcagaaaatggcgtgggcctgagctagccgggtgacagagggctgtgggagtcccacatgaggagctggcatgatggttgaggttaatgctgacatcaggggtacccagcaactgaactggggtggggacggcaggagaagtgaccggagaagacacgagggcctgataaagtgtctcaaccctgtgctgatgggtggggactttctcctttgggcaggggaagcctgtcacttcccttgcttagtttttaagcaggggaactgacaggcttagatctctattttagaaagattaaactggttgcgatgt

SEQ ID NO: 941302 - DNA, 610 bp, Homo sapiens
gatgagggcactgaaatccatgtcctctaaacttgtagttctagtaaaagaacgacagcagtaaagggtctttaggaagaggaggtggaagacctgatttgggttgggggctccaagaagaatgtctgccttgctgtgcagaagcctctgcayaacctccctggtccccttgctcagtctcctggccagacccctgtgagccctggaagtgcacagtcagcttagccaaggcatctccagccaggactcatccctgggcatttctgtggccttgggttccctggcctccaggccctgtcttgcaggcaatcgtcctgctagggaagggggaaaggaggctacttgacagttaactctgagcggttccacaaggtcctgacttagctcctagtcacttgcaaacctatatacccccatctcatcccccaaatgatgaaaagaaactttgcaggactcatgccagacaaatagggtgggaccattctgtagagccaagttctcaggacatcaataagagatggaaaccacctgctggaaggtgccacagtgggaactttggggtcagggagcagtcactgaactgtcagggtgaatcctggctcctggccct

SEQ ID NO: 941303 - DNA, 571 bp, Homo sapiens
aacagtgtctactcttggcccttttataataacctctcttgagacgaaggagcacaaaatacaaataatagctcgctgaattttcttgccataaacatgagctgctgaatgggctttggagctcagagttaacaattacagtctagaggaggaaagggtatctggcytatgagatagttgagcagctctgggggacttctgggaggaagctgggtactttccatttcttggaaataggggtgacttcattttaatgcaaaataatgtaatcttcattactattttccttccctctgggtctgaggcttctgggcatcccatctggacttgcaagcccatgcagaatatggagcagaaacaatttatgatagagaatgtgtctttttggacagtaatgggaaattactgcttagggaaaaacaaaggtagtctggtggctttttttgttctgttttgtttttgttttttggggacagggtctcactttgtcacccaggctggagtgccgtggtgccatcctggctcactgcagccttgacctcccaggttcaagcaattttcccaccttagc

SEQ ID NO: 941304 - DNA, 599 bp, Homo sapiens
aactctaacacgagaatagcagcaaagggacagtgccaaaccattcatgaaggctctatcccactgatccaatcacctcccaccaggccccacctccaaaattgggcattacaattgaacatgagatttgggtggggacacagatccaaagcatattatatcaccctgacccctcccaaatctcatgtcctcaaacattgcaaaatacaatcatcccatctcaacagtctccaaagtcttaactcattccagcattaactcaaaagtccaaagtctraagattcatctgagacaaggctagtgcttccacctatatgagcctgtaaaatcaaaaaacaagttaattactgctaagatacaatggaggtacagacattgggtaaacattcccattccaaaagggagaaattggccaaaataaagggactataggtcctatgcaagccccaaccccccctagggcagtcattaaatcttaaagctcccaaataatctcctttaactccttgtttcacatccaggccacactggtgcaagaggtgggctcctaaggccttgggcagctctgcttctgaggctttgtggggtgcagccctggc

SEQ ID NO: 941305 - DNA, 731 bp, Homo sapiens
gaagggcagcattctgctttctgagcactgtgacttccttgtcaaagcctaacttctaaagagccatttacctaccaaaagattttgctgctgtaaagaaagccattgcctggtacatgaccatagcaagggttagcaaactgygacccaccaccagtatggcccataagccatacaaatagtcaaaaaagaaatcaaaagaagaataatattttacgacatatgaacacgaacattatatggaatttaaatttcaatgtccaaaataaaagttttattggaactgaaccaaactcatttgtttacatattattgttatgtctatgggtgcttttgtgctacaacagcagagctgaggagtagcaacagagactgtttgacctgcaaaccctaagatacttattgtctggcattttacagaaaaagcttgccgattcttgccagaaggaaggatgagataactaagccaaactggcagtgcagtcgagagattttactctacctttttttttttttaatagttccctggaaaaatcatcttatctcagcatgtagagcaaaccacttaccaacaaaataccagaggggactcccttcccactttccttgtagttaaaagcaagacagctcatgcaagactcatcctgagtccctctcaacctacagctagccttgctctaggtctctgaagctttaggacccctgtagccccttcctctttaacacattcc

SEQ ID NO: 941306 - DNA, 601 bp, Homo sapiens
tgggggcagacttcccccttgctgttctcatgatagagttctcatgagatccgattgtttgaaagagtgtagcacttccacctttgttctctctctctcctgctctggccatgtgaatacagtacctgcttctccttcactttctgccacgattgtagatttcctgaggcctcccagccatgcctactgtacagcctgtggaactgtgagttgatkaaatctctcttcttcataagttacccagtctcaggtagttctttacagcagtgtgagaacagacaaatacaggttttaaatacatatgtggcagattctcatctcccatcccacatgttcttctgataatgtgactttgatgttgagagagagggtctgtgtaccctctccttgaaattgatggattttgttactgctttgaccagtaaattatggcagaagtgacgctacatgactaaggctaggtaatgaaaatgtaatgcacttccaccttgttctcttaggcacttattcttggagaccagccaccatgctgtgaggaagctcaagaagtccatggagggatccatatggagaagaacagaaagccctggcccacagtccc

SEQ ID NO: 941307 - DNA, 654 bp, Homo sapiens
taatccccacatgttgaaggagaggcctggtgggaggtgactgaatcatgggggcagacttcccccttgctgttctcatgatagagttctcatgagatccgattgtttgaaagagtgtagcacttccacctttgttctctctctctcctgctctggccatgtgaatacagtacctgcttctccttcactttctgccacgattgtagatttcctgaggcctcccagccatgcctactgtacagcctgtggaactgtgagttgatgaaatctctctycttcataagttacccagtctcaggtagttctttacagcagtgtgagaacagacaaatacaggttttaaatacatatgtggcagattctcatctcccatcccacatgttcttctgataatgtgactttgatgttgagagagagggtctgtgtaccctctccttgaaattgatggattttgttactgctttgaccagtaaattatggcagaagtgacgctacatgactaaggctaggtaatgaaaatgtaatgcacttccaccttgttctcttaggcacttattcttggagaccagccaccatgctgtgaggaagctcaagaagtccatggagggatccatatggagaagaacagaaagccctggcccacagtccccactg

SEQ ID NO: 941308 - DNA, 606 bp, Homo sapiens
tccagtcttttctcaaactttacccaaggctgtgaggtcataatgaagaaaatagtataacacacttgcagatcttttcattaaactattgatagatatttgatacaaatcactaagcagcatgataaataaaaacgtttatcatttagaaaagaggaaaagaggccgggcgcggtggctcacacctgtaatcccagcactttgggaggccgaggcgggcggatcacaaggtcaggagatcgagaccatcctgrctaacacggtgaaacccccgtctctactaaaaaatatataaaaaattagccaggcatggtggcgggcgcctgtagtcccagctactcaggaggctgaggcaggagaatggcgtgaacctgggaggcggagcttgcagtgagccgagatcgcgccactacactccagcttgggtgacagagcgagactccgtctcaaaaaaaagaaggaaaagaagtctcagattgatgctcaaattttgcagtaataatattaagtaatcttgatattcacctggatagcatgtctcttgattgcctccaaagtaaaatccccattctggttggcttctttgaatgcagtgctgctcctaac

SEQ ID NO: 941309 - DNA, 606 bp, Homo sapiens
tccagtcttttctcaaactttacccaaggctgtgaggtcataatgaagaaaatagtataacacacttgcagatcttttcattaaactattgatagatatttgatacaaatcactaagcagcatgataaataaaaacgtttatcatttagaaaagaggaaaagaggccgggcgcggtggctcacacctgtaatcccagcactttgggaggccgaggcgggcggatcacaaggtcaggagatcgagaccatcctggctaacacggtgaaacccccgtctctactaaaaaatatataaaaaattagccaggcatggtggcgggcgcctgtagtcccagctactcaggaggctgaggcaggagaatggcgtgaacctgggaggyggagcttgcagtgagccgagatcgcgccactacactccagcttgggtgacagagcgagactccgtctcaaaaaaaagaaggaaaagaagtctcagattgatgctcaaattttgcagtaataatattaagtaatcttgatattcacctggatagcatgtctcttgattgcctccaaagtaaaatccccattctggttggcttctttgaatgcagtgctgctcctaac

SEQ ID NO: 941310 - DNA, 597 bp, Homo sapiens
tccatgacgaggactgtacaagggatagggtggtgcagagaatggaatatttgtttcctttgacttttctaacaaataagccacaaatttagtggtgcttattaaatctattaaaaagatgcaaatctattactttatagttctggagcccagaagtctaaaatgggtgggcaagccacgtgtggtggctcgcasctgtaatcccagcacttttggaggctgaggccagtggatcacctgaggtcaggagttcgagcccagcctggccaacatggagaaacccctgtctctactaaaaatacaaaaaattagccaggcgttgtggcaggcacctgtaatcccagctaatggggaggctgacgcaggagaatcgcttgaacccaggaggcagaggttgcagtgagtcaagattgcgccattgcactccagcctgggcaacaagagcgaaactccgtctcaaaataaataaataaataaataaataaatagtaaaaaatataaaaataaaaataggccaggtgcagtggcttatacctataatcccagcactttgggaggccaaggcaggcagatcacctgaggtcaggagttcaagac

SEQ ID NO: 941311 - DNA, 599 bp, Homo sapiens
tgggtggagtggggacttggggaactttctgtcttacaagaggactgtaaaacgcaccaatcaggaacttttctgtcttacaagaggattgtaaaacgcaccaatcagcactctgtaaaacgcaccaatcagcactctgtaaaatgcaccgatcagcaggattctaaaagtagccaattgcggggaggattgaacaaagggcactctgataggacagaaagggaacatgggtggggacaataaggggaataaacgctggccaccccagccagcaggcaacaaccttctggggtccgcttccatgctgtggaagctttgtcctttcactcttcacaataaaacttgctaccattcattctttgggtctgtgccatctttaagagctgtaacactcaccacgaargtccacagctcaattcttgaagtcagcgagaccacgaacccaccgacaggaaccaactccagacaccccagtatggaagatcccccaaaacctaaaaatagaacatgatccagcaattccactactgggtacatatccaaaggaattaaaatcagtctgttgaagagatacctgcactctcatattcatggcagca

SEQ ID NO: 941312 - DNA, 611 bp, Homo sapiens
tgttccttctgtagccattcttctacttttgtttctctagcagctctatcaacgggctttgcccctccaaagacaaaataagctcgaccggactgggaggtactagcagaagaatcatctcccttaggagtattatgaggctttagattcagtttgggtctttgagggggacgggggacgtctatcattatacctayaatcatcccgagagaaatcatctctggagctgcacgacccatcatcccatctgttgtatcggtcttcatagcggtccctgcctcctctgtagtcattgtccctgggtacccactgccaaatgcccttctgccactgcctatccaggaatgatagcctctagcatagtctctgctgcctcggtcatcatagcgatccctaccgccagccatatcgatccatatcccggcatgggccatcccgatactcataccaatacccacggccagactggtctgaatcataacgatctcgatacttgtctccaaacctatcatcaccccttctaggcgggtagtcatcaaagctgtctgtggcagaacgagccctccagtctgtatctgttttgtcagaatcccgatttctatcacggccaa

SEQ ID NO: 941313 - DNA, 862 bp, Homo sapiens
gactggggctttctagatatagagtcgtgttatctgtaaacagagatagtttgacttctactctttctgtttgaatgctctttcttactcttgcctaattgctctggctaggacttccaatactatttttaataggagtggtgagagagggcatccttgtgttgtgccggtttttacagggaatgcttctagcttttgaccgttgagtataatgttggctgtgggtttgtcatagatggcttattattttattccttcagtacatagtttactgagaatttttaacatgaaggggtgttgaattttaccagaggccttgatatggtttagctctgtgtccccatccacatctcatattgaattgtaatccccagtgttaggggagggacctggtgggaggtgattggatcctgggggcggatgtctcccttgctsttctcatggtagtgagtgagttctcacaagatctggttgttctcacgagatgtggagtgtagtacttcccccttcactctctctctctttcctgctcctccatggtaagatgtgcttctttgcccttcgccttctgctatgattgttaagttttctgaggcctaccagccatgctttctgtacagcctgtggaactgtgagtcagtgaaatctcctttcttcataaattacccagtcatgggtagttctttatagcaatgtgagaatggactaataaaggccttttctgcttctcttgagataatcacgtggtttttgtctttagttctgtttttgtgatgagtcacatttattgatttgtgtatgtttaaccaacttcacatcctggagatgaaggctgcttgattgtggtggattagctttttga

SEQ ID NO: 941314 - DNA, 700 bp, Homo sapiens
gtgcctgcatatcatgtagaaccttctgtgaaccaggctctagtcttctcttcctctttcaactaattatggggaactctctatgtggccatcagtgcaggctggggaagagaaagcaaggtgacaggaatggagaccatgggcatttgagctacttcttcatgtaasttacttgtgccttcaggacctgttcgagcctgatcaggtatataccacctccatttgatgatggaatgctgctgtgcatgacccactttatggctagatcgtcagaaagcacccagttccttataggccgttcaggtcatctggtgacttgatgacccatagtcaaatgttcagtttccaccgaagcccagtaacaggccaagagctgtctctcaaaaggagagtaattatctgcagaagatggcagaagatagacagtagttatctgcagaagaggccttgctccaaaatccttgaggccttcgttgtgattcacctctgggagcctgccagaggctccaaacagcacccttatctgccactgacatctcaagcaccattggatctgttggtcatatggcccaagtggtagagcagcttgcacagcagcctggacctgttgccaagccttctcctgttctggacctcactcaaaactggcagccttttgggtcagtcaataaatgggctggagtaacacacccagatgaag

SEQ ID NO: 941315 - DNA, 700 bp, Homo sapiens
gtgcctgcatatcatgtagaaccttctgtgaaccaggctctagtcttctcttcctctttcaactaattatggggaactctctatgtggccatcagtgcaggctggggaagagaaagcaaggtgacaggaatggagaccatgggcatttgagctacttcttcatgtaacttacttgtgccttcaggacctgttcgagcctgatcaggtatataccacctccatttgatgatggaatgctgctgtgcatgacccactttatggctagatcgtcagaaagcacccagttccttataggccgttcaggtcatctggtgacttgatgacccatagtcaaatgttcagtttccaccgaagcccagtaacaggccaagagctgtctctcaaaaggagagtaattatctgcagaagatggcagaagatagacagtagttatctgcagaagaggccttgctccaaaatccttgaggccttcgytgtgattcacctctgggagcctgccagaggctccaaacagcacccttatctgccactgacatctcaagcaccattggatctgttggtcatatggcccaagtggtagagcagcttgcacagcagcctggacctgttgccaagccttctcctgttctggacctcactcaaaactggcagccttttgggtcagtcaataaatgggctggagtaacacacccagatgaag

SEQ ID NO: 941316 - DNA, 634 bp, Homo sapiens
cctgggacacaagagggaatgggaggagccttgagaaatacttgagctctaagggaaggaggcacctgtgaccgtgaaccgtcctcctcctggggtgcagggactggccacagctctattcagttccacggctgtgttctgagcacctactgtttgcactgtgtgtgacctactgcacccagctctgagggaatggaggaaataactcattctcaagaagctcagagcctggcaggggagaaagacacatgcaggatttcctatactgcagggtgaatagagtggtaatgaaagatgggcgcggctccagggatgtccatcggaagaaaagatgaattgggcctgaggggacaggagaaacccagccagaagggtcagcatttgatctgggctgtgaagaccaagaagtagttttaaactaggtgagcaggaagaaaggcgtcctgctggagggcatagtctgagcaaagstatggcagccaggagccttcccctctgccctcctttcctggccttccagcagccagctcagagtgccagctccagagcccacggaggagggtaggagaggcctgggcatttgcttctcgcttggcccctggacagcaggtggtggggagcaaagcagccctgg

SEQ ID NO: 941317 - DNA, 720 bp, Homo sapiens
ttattgcggcactatttgcaatagccaagatatggaatcaacctaagtgtccgtcaatgataaatggataaagaaatgtggtatatatacacaatggaatactattcagctataaaaaggaaatcctatcatttgcagccacatagatggaattgaagatcatcatgttaagtgaaataagccaggcacagaaagacaaatgtygcatgttctcagtcacgtgtgggagcttaaaaagtggatctcatggaagtagagtgtggaatgatggttaccagtggctggggagagagtgaaagagggaataggttgatgagtaaaaaaatatagttagctcacacctataatcccagcactttgggaggctgaggcaggcagatcacctgaggtcaggagttcaagatcaacctgaccaacatggcaaaaccctatctctactaaaaatacaaaaattagccacgcatagtggcacatgcttgtaatccgagctacttgggaggctgaggcaagagaactgcttgaacccatgaggtggaggttgcagtgagctgatatcatgccattgcactccagcctaggcaacaagagtgaaattccagccaggtgccgtggctcacgcctgtaatcccagcactttgggaggcggaggcaggtggatcacttgaggtagggagtttgagatcagcctgaccaacatggagaaacctcgtctctactaaa

SEQ ID NO: 941318 - DNA, 720 bp, Homo sapiens
ttattgcggcactatttgcaatagccaagatatggaatcaacctaagtgtccgtcaatgataaatggataaagaaatgtggtatatatacacaatggaatactattcagctataaaaaggaaatcctatcatttgcagccacatagatggaattgaagatcatcatgttaagtgaaataagccaggcacagaaagacaaatgtckcatgttctcagtcacgtgtgggagcttaaaaagtggatctcatggaagtagagtgtggaatgatggttaccagtggctggggagagagtgaaagagggaataggttgatgagtaaaaaaatatagttagctcacacctataatcccagcactttgggaggctgaggcaggcagatcacctgaggtcaggagttcaagatcaacctgaccaacatggcaaaaccctatctctactaaaaatacaaaaattagccacgcatagtggcacatgcttgtaatccgagctacttgggaggctgaggcaagagaactgcttgaacccatgaggtggaggttgcagtgagctgatatcatgccattgcactccagcctaggcaacaagagtgaaattccagccaggtgccgtggctcacgcctgtaatcccagcactttgggaggcggaggcaggtggatcacttgaggtagggagtttgagatcagcctgaccaacatggagaaacctcgtctctactaaa

SEQ ID NO: 941319 - DNA, 720 bp, Homo sapiens
ttattgcggcactatttgcaatagccaagatatggaatcaacctaagtgtccgtcaatgataaatggataaagaaatgtggtatatatacacaatggaatactattcagctataaaaaggaaatcctatcatttgcagccacatagatggaattgaagatcatcatgttaagtgaaataagccaggcacagaaagacaaatgtcgcatgttctcagtcacgtgtgggagcttaaaaagtggatctcatggaagtagagtgtggaatgatggttaccagtggctggggagagagtgaaagagggaataggttgatgagtaaaaaaatatagttagctcacacctataatcccagcactttgggaggctgaggcaggcagatcacctgaggtcaggagttcaagatcaacctgaccaacatggcaaaaccctatctctactaaaaatacaaaaattagccacgcatagtggcacatgcttgtaatccgagctacttgggaggctgaggcaagagaactgcttgaacccatgaggtggaggttgcagtgagctgatatcaygccattgcactccagcctaggcaacaagagtgaaattccagccaggtgccgtggctcacgcctgtaatcccagcactttgggaggcggaggcaggtggatcacttgaggtagggagtttgagatcagcctgaccaacatggagaaacctcgtctctactaaa

SEQ ID NO: 941320 - DNA, 530 bp, Homo sapiens
cattcctgtaatcccagctctgttgggaggctgaggcacaagaattgcttgaacccagaagatggagattgcaatgagctgagatcatgccactgaactccaccctgggccacagagtgagactgtatctcaaacaaaacaaaacaaaaacacttaagccatccgtggatggcaaagctaaaagaacacaggtaacacaagccctctggggctctggggattgtgagtatccacccygccccccagaaactgctgcagggacacatggagttctgctcctgccagtgcccaaaaacactcatctggaccctgcacctgctcacctgcatgtcccccctcctgtgagggtttcagagctttggggtgagtaaatgagcccaccccttcccaagtcctgtgaaggggtcaaggaaactatcccatttcaggatgattgcttaaagtcaggagtttgaggttccagtataccatgatcacacctgtgaatagcctctacattcccgcctgggaaattgagtgagacccccatc

SEQ ID NO: 941321 - DNA, 530 bp, Homo sapiens
cattcctgtaatcccagctctgttgggaggctgaggcacaagaattgcttgaacccagaagatggagattgcaatgagctgagatcatgccactgaactccaccctgggccacagagtgagactgtatctcaaacaaaacaaaacaaaaacacttaagccatccgtggatggcaaagctaaaagaacacaggtaacacaagccctctggggctctggggattgtgagtatccaccctgccccccagaaactgctgcagggacacrtggagttctgctcctgccagtgcccaaaaacactcatctggaccctgcacctgctcacctgcatgtcccccctcctgtgagggtttcagagctttggggtgagtaaatgagcccaccccttcccaagtcctgtgaaggggtcaaggaaactatcccatttcaggatgattgcttaaagtcaggagtttgaggttccagtataccatgatcacacctgtgaatagcctctacattcccgcctgggaaattgagtgagacccccatc

SEQ ID NO: 941322 - DNA, 644 bp, Homo sapiens
tttggtgggcgtgaactaaggaggaggctctatttcagagtagaatgctggatgatgtgttggatgatgctggatcagccattgtgagtcctcttcattcttatcttttttttttttttttaataagacagggtcatgctctgttgctcaggctggagtgcagtggcccaacaatagctcactgcagcctcgacctcctgggctcaagggatcctcccacctcagcatcctgagtagctaggactacagacatgcrccaccacacctggctaactttttttttctttctttttagagacagggtctcactttgtcacccagactggaggggagtgatgcgatcacagctcactgcaaccttgacctcccaggttcaagtggtcttcccacctcagcctccggagtagctgggactacaggcatacaccactatgtctggctactttttttattttttgtagagacaggggtcttactatgttgcccaggctggtctcaaactcctgggctgaagcaatgctgcatcagcttcctaaaacattgggattacaggcatgagccatcatgcctggctatacgtattcttttaggataaaaaagagttccaggagactccctttttgcaggagactccctggaggtgg

SEQ ID NO: 941323 - DNA, 663 bp, Homo sapiens
agaatggcggcttcccaaaaaattaaaaacagaattaccatatgatccagcaattctacttctgggcatatactcaaaagacctgaaagcaggatcttgaagagatatttgtagagtcatgttcacagcagcattattcacagtcgctataatgtgaacgtatccattgatggatgaatgcccattgatggacaatgaaataaatggatatgcaaaaygtggtataaacatacaacagaatattattccaccttaaaaaggaaggaaattctgatacatgctacaacatgaatgaacctggaggacattatgctaaatgaaataagccagtcacaaaaaagacaaacattgtatgagtctatttatacaacatacttacagagtaatctaaatcacagagacagaaagaatggtggttgccaggggctggggagagagagaaatggcgagttattttttaatgggtgtagagtttcagttttgcaagatgaaagagttttgcagccggatggtgatgatggttgcacaagaatatgaatctacttaatacaactgatctgtacacttaaaaatggttaagatggtacatcttacatgtattttaccagttactaaaattgaagaaaagtattaaaacattgataatatatgttgaagaaaaat

SEQ ID NO: 941324 - DNA, 588 bp, Homo sapiens
gtgcctctatcccagttctggcctttctcctgactgtttctgtgtctgactatgtgcttgacattgtatgtgcatagaacaagctctagaaggaaactgcaaatcggtaacagtgggtacgttctggagagggggaggttcacttttcaatttacagacttgtgtgttggcattttttaagaaaaataatttaaaaatagctacaatttttytttttttttttttttttttttttttttttgcgacggagtcttgctctattgcccaggctggagtgcagtggcgcgatctcggctcactgcaagctctgcctcctgggttcacgccattctcccatctcagtctcccgagtagctgggactacaggcgcccgccaccacgcccggctaattttttgtattttttagtagagacagggtttcactgtattagccaggatggtctcgatctcctgacttcatgatcagcccgcctcagcctcccaaagtgctgggattacaggcgtgagccaccgcacccggccaaaaatagctacaatattaataaataaaagttctcatcttgtgtgcccctgctctgtatagtgct

SEQ ID NO: 941325 - DNA, 587 bp, Homo sapiens
gtgacaacacatattggcaggttctgtgatgccccttgagctgcaaaacaagcaagtttttattagggatttgaaaaggggaggagggtacaaacagggagtaagtcacaaagatcacatgcttgaaagggcaataaaagattacaagggcagagaggcagaacaagatcacaaggccagggtgaaattagaattactgaggaggttccatgtcccactgggcacgcattgtcattgataaacatcttaataggaaacagggtttgagagtagacaaccggtttgactagaattggccaggctggaatttcctaatcctagcaagcctgagggtgctgcaggagaccagggaatatttcatcccttattttcaactgcataagacagacactcccagagtggccatttggagacctccccctgggaaygcattcctttcccagggttattccttgctgggaaaagaattcagcgatatttctcctacttgcagaagagaacagaagagaaatatgactctgttctgcccagccccgcaggcagtcagactttatggttatctcccttgttccctgcaaattgctgtt

SEQ ID NO: 941326 - DNA, 572 bp, Homo sapiens
aggatctggtaccattttttcagaagctattccagacaactgaaaaggagggacttctccctaactcattttatgaggccaatatcaccctgataccaaaatctggcagagatgcaacaaaaaaggaaaactttargccaatatctctgatgagcatcgatgaaaaaatcctcaataatatactggcaaagcaaatccagaagcacattgaaaagcttatccatcatgatctagtcggcttcatctctggtctgcagggttggttcaacatacacaaatcaataagtgtaattcatcatgtaaacagaactaaagacaaaaaccacatgattatctcaaagatgcagaaaagggcatcggtaaaagtcaacatcccttcatgttaaaaactctcaataaattaggcattgatggagcatatctcaaaataataagagccatttatggcaaactcacagccaatatcatactgaatgggcaaaaactggaagcattccccattaaaaccggcacaagacaaggatgccctttctcaccactcctattcaacatagtattggaagttctggcca

SEQ ID NO: 941327 - DNA, 630 bp, Homo sapiens
tctaccaattttaaaataatttaaatgagtatcatgcctatcgttgaatatcattactttttaaattttttaaataaattctttttatgatgattattttagctgaacctgggaatatgatttacactgtcagagcatgtataaaacatgatagttacaccttattttaaatacatgctttattttaaatgttggctattcattttaartgcacaatacaaagaaatcaagcaaaagataaacaattgtattcatagtagtctatgttttgtttcaactttttaatccatctagtttggagctctcaattctggaatatgaagcttcatccttaactggatactgtcccagaacatcttggaacatattcttgatatgaagaagctgacactatccagataagtttcctgtacccaagaattacacaactatgcaacttttatatccttcgttcattaaattggctaatattcaccatactatttacaaaagcaaatataacacattgacattccagcttacctcaaagaaatacagatatccacaaaaatatatttatttatgtggtcttcacactagattttaaaacaaataaagaaggatttttaaagacatagattttatagaact

SEQ ID NO: 941328 - DNA, 632 bp, Homo sapiens
aggaagtgtagagattttttttggtaggattatgtgctttgtcttttttttattattatactttaagttctagggtacatgtgcacaatgtgcaggtttgttacatatgtatacatgtgccatgctggtgtgctgcacccattaactcgtcatttacattagatatatctcccaatgctatccctcccccttccccccaccccacgacaggccccagtaygtgatgttccctttttgtgtccaagtgttctcattgttcaattcccacctatgagtgagaacatgcggtgtttggtttttcgtccttgcaatagtttgctgagaatgatggtttccagcttcatccaggtgcctacaaaggacatgaactcatcattttttatggctgcatagtattccatggtgtatatgtgccacattttcttaatccagtctatcattgttggacatttgggttggttccaagtctttgctattgtgaatagtgccgcaataaacatacatgtgcatgtgtctttatagcagcatgatttataatcctttgggtatatacccagtaatgggatggctgggtcaaatggtatttctagttctagatccctgaggaatcgctacaccgtcttccacaatgg

SEQ ID NO: 941329 - DNA, 632 bp, Homo sapiens
aggaagtgtagagattttttttggtaggattatgtgctttgtcttttttttattattatactttaagttctagggtacatgtgcacaatgtgcaggtttgttacatatgtatacatgtgccatgctggtgtgctgcacccattaactcgtcatttacattagatatatctcccaatgctatccctcccccttccccccaccccacgacaggccccagtacgtgatgttccctttttgtgtccaagtgttctcattgttcaattcccacctatgagtgagaacatgcrgtgtttggtttttcgtccttgcaatagtttgctgagaatgatggtttccagcttcatccaggtgcctacaaaggacatgaactcatcattttttatggctgcatagtattccatggtgtatatgtgccacattttcttaatccagtctatcattgttggacatttgggttggttccaagtctttgctattgtgaatagtgccgcaataaacatacatgtgcatgtgtctttatagcagcatgatttataatcctttgggtatatacccagtaatgggatggctgggtcaaatggtatttctagttctagatccctgaggaatcgctacaccgtcttccacaatgg

SEQ ID NO: 941330 - DNA, 639 bp, Homo sapiens
caacgtgcaggtttgttacatggatatacatgtgccaggttggattgctgcacccattaactcatcatttaaattagtatttctcctaatgctatccttcccccctcccccaacaccatgacaggcccctgtgtgtgatgttccctgccctgtgtccaggtattctcattcttcaattcccacctatgagtgagaatatgcggtgtttggttttctatccttgtgatactttgctcagaataatggtttccagcttcatccatgaccccacaaaggacatgaactcatccttttttatggttgcatagtattccatggtgtatatgtgccacattttcttaatccactctatcgttgatgacatttgagttggatccaagtctttgctattgtgaatagtgcccaataaacatacgtgtgcatgtgtgtttataatctttgggtatataccccrtaatgggatcactgggtcaaatgctatttctagttctagatccttgaggaatcacaacactgtcttccacagtggttgaactactttacactcccaccaacaatgtaaaagtgttcctatttctccacatcttatccagcttctgttgtttcctgactttgtttttcttccttttcttcaacttc

SEQ ID NO: 941331 - DNA, 624 bp, Homo sapiens
tactaatcaaacgtagatttggtcttttcacatagtcccatatttcttggaggctttgtttgtttctttttactcttttttctctaaacttcttttctcgctttatttcattaatttgatcttcaatcactaatacgctttcttccacttgatcgaatcggctatttaagtttgtgcatgcctcacatagttctcgtgscatggttttcagctccatcaggtcatttaaggtcttctctacactgtttattttagttagtcatttgtctaatcttttttcaaggtttttagcttccttctgatgggttcaaacatcctcttttagttcagagaagtttgttattcccaaccttctgaagcctacttctgtcagcttgtgaaagtcattctccatccaactttgttctgttgctggcaaggagctgtgatccttcagaaaagagacgctctgatttttagaattttcagattttctgctctggtttctccccatctttgtggttttatctacctttggtctttgatgttggtgacctacagatggggttttggtgtgtatgtcctttttgttgatgttgatgctattcctttctgtttgttagttttccttctaacagtcaggtc

SEQ ID NO: 941332 - DNA, 772 bp, Homo sapiens
tatgatggggttttctaaataaacaatcatgacatgtgcaaacagggacaatttgacttcctcttttcctaactgaataccctttatttccttctcttgcctgactgccctggccagagcttccaacactatgttgaagaggagtggtgagtgatggcatccctgtcttgtgccagttttcaaagggaattcttccagattttgcccattcagtatgatattggctgtgggtttgtcataaatagctattattttgagatacattccatcaatacctagtttattgagtttttagcatgaagmactgttgaattttgctgaaggccttttctgcatctattgagataatcataagtttttgtcgttggttctgtatgtgatggattacatttattgattcaaggtatgttgaatcagccttgcatcccagggagaaagctgacttgatcgtggtggataagctttttgatgtgctgctggattcagtttgccagtatcctcctttagctcggagaagtttgttattaccaatcatctgaagccttcttctctcaactcgtcattctccatccagctttcttccgttgctggcgaggagctgcattcctttggaggagaagaggcactcttgatttgtagaattttcagcttttctgctctggtttctccccatctttgtgggtttatctacctttggtctttggtgatggtgacgtacagatgcggttttggtgtgaatgtcctttctgtttgttagttttccttctatcag

SEQ ID NO: 941333 - DNA, 647 bp, Homo sapiens
tgtcacctctcactgacaccaggccagatcctacattcccaggctccaggtctgctccccagtctcaatctccaagccaaccctaacatccctatgctccagtctgacccaacctctagctggcccccatgcctcaggctttgagctcactatagtgccaggccagccctcacagatcaggctccaggcctaccctgaagattccatcttcaggtttactccagggtcagaccagtcccagtggtctcaggctctggatgccccccaacccagcatcaggctgggccccatagcatcaggcttcatgcctatctcagaactaggccaacccctacagccytaatcatcaggccagcactcagccttcaggctggcctgcagatataggttccaggcctgcccaggataaggctagctcctgcagctccaagctacaggcccgcgctagtttaaggtcagcccaaagccacatcagcccacacagcctgatgccttaggcccatctcagtgccaggtcagtacatctcaggcacaaggctgataccacagacacaggtttcagtcctgcctagtgccaggctgatccctgtggccccacactccaggctggcccctgcagtcccatgttccagcagatgtaagggcca

SEQ ID NO: 941334 - DNA, 614 bp, Homo sapiens
aaagtttctgctaaggtgtgaatcttgtcttttttttctgcaatagataatgtgataacagagagggaaggaaaaaacaattgttcttagtgggtttggatcttaggcagataaaggaacttaagttcctttaggagagacagtggggactggtagtggggcggggggaatggtcagtggttaagggagaccctgaggcttctctagtttagcatgtcaaaatgccagattttggggtactgatttcrgagccccaaaagcaaaagtagcaaatcctgaaagacaggaatacgtatttgtaaaggtgctgatatgcaattcacactgaaaagcaaaagtgtattgctgacatcctagaattgacagtgaccaaacatgagttgtggtgcttgtcttagttatttaaggcttctataacaaaatatcattaagtctgtggcttataaacaacagaaattggtcgggcatggtggctgacacctgtaatcacagcactttgggaggctgaggtgggtggatcacttgaagtcaggagtttgagaccagcctggccaacatggtgaaaccctgtctctactaaaaatgtaaaaattagccatgtgtggtggcatgcg

SEQ ID NO: 941335 - DNA, 614 bp, Homo sapiens
aaagtttctgctaaggtgtgaatcttgtcttttttttctgcaatagataatgtgataacagagagggaaggaaaaaacaattgttcttagtgggtttggatcttaggcagataaaggaacttaagttcctttaggagagacagtggggactggtagtggggcggggggaatggtcagtggttaagggagaccctgaggcttctctagtttagcatgtcaaaatgccagattttggggtactgatttcggagccccaaaagcaaaagtagcaaatcctgaaagacaggaatacgtatttgtaaaggtgctgatatgcaattcacactgaaaagcaaaagtgtattgctgacatcctagaattgacagtgaccaaacatgagytgtggtgcttgtcttagttatttaaggcttctataacaaaatatcattaagtctgtggcttataaacaacagaaattggtcgggcatggtggctgacacctgtaatcacagcactttgggaggctgaggtgggtggatcacttgaagtcaggagtttgagaccagcctggccaacatggtgaaaccctgtctctactaaaaatgtaaaaattagccatgtgtggtggcatgcg

SEQ ID NO: 941336 - DNA, 614 bp, Homo sapiens
aaagtttctgctaaggtgtgaatcttgtcttttttttctgcaatagataatgtgataacagagagggaaggaaaaaacaattgttcttagtgggtttggatcttaggcagataaaggaacttaagttcctttaggagagacagtggggactggtagtggggcggggggaatggtcagtggttaagggagaccctgaggcttctctagtttagcatgtcaaaatgccagattttggggtactgatttcggagccccaaaagcaaaagtagcaaatcctgaaagacaggaatacgtatttgtaaaggtgctgatatgcaattcacactgaaaagcaaaagtgtattgctgacatcctagaattgacagtgaccaaacatgagttgtggtgcttgtcttagttatttaaggctwctataacaaaatatcattaagtctgtggcttataaacaacagaaattggtcgggcatggtggctgacacctgtaatcacagcactttgggaggctgaggtgggtggatcacttgaagtcaggagtttgagaccagcctggccaacatggtgaaaccctgtctctactaaaaatgtaaaaattagccatgtgtggtggcatgcg

SEQ ID NO: 941337 - DNA, 633 bp, Homo sapiens
ggcaggaagtgtttggatcatggggcagatcactcatggcttggtgctgtcttcatgataatgagttctcacgagatctggtgatttcaatgtgtgtggcacctcccctcccactgtctctcttttgctcctgcttcagccgtgtgagacactggctttcctcttcatcttctgccattgaaagttccctgagacttcatcagaaatcrggcagatggcagcaccatacttcctgcaaagcctgcagaaccatgagccaattaagcctcttttcattttaaattacctagtcccaggtataccttgataacaatgcaaaaaaggactaatgcagataacatgatgaaaatgtgtgatgggcttattgaagacaagtacaagaaattatgccaggttataaaatcaaagagggacttctaagacaaaacctattgttaattagtcagataactctggggaaaatattttaaaaatcacccagaagaatgcctcctaaacgaaccacctcctggtccctcaactgcttctgatgtttcttctcaaaaaaaaaaaaaggcattctaccataaccttttaattaaaacacagaattgtaactagagactgaaagcctgccattgtttgttattgctt

SEQ ID NO: 941338 - DNA, 633 bp, Homo sapiens
ggcaggaagtgtttggatcatggggcagatcactcatggcttggtgctgtcttcatgataatgagttctcacgagatctggtgatttcaatgtgtgtggcacctcccctcccactgtctctcttttgctcctgcttcagccgtgtgagacactggctttcctcttcatcttctgccattgaaagttccctgagacttcatcagaaatcaggcagatggcagcaccatacttcctgcaaagcctgcagaaccatgagccaattaagcctcttttcattttaaattacctagtcccaggtataccttkataacaatgcaaaaaaggactaatgcagataacatgatgaaaatgtgtgatgggcttattgaagacaagtacaagaaattatgccaggttataaaatcaaagagggacttctaagacaaaacctattgttaattagtcagataactctggggaaaatattttaaaaatcacccagaagaatgcctcctaaacgaaccacctcctggtccctcaactgcttctgatgtttcttctcaaaaaaaaaaaaaggcattctaccataaccttttaattaaaacacagaattgtaactagagactgaaagcctgccattgtttgttattgctt

SEQ ID NO: 941339 - DNA, 529 bp, Homo sapiens
actcgaagtaagggcaagaagactggaaatggggagggggcttccaggtcataggtagataagagacaaatggttgcattcttttgagtttctgattagcctctccaaaggaggcaatcagatatgcatttatttcagtgagcagaggggtgactttaaacagaatgggaggcaggttgtccctaagcagttcccagcttgactttttcctttagcttagtgattttggggccccaagatttattttcctttcacattagagacatattgaatggctttgaccaacatgctgayagtgatacggacaatgaaagccaggctgaggtggtctcagatagagattaggaattttttgggaggtggaataaaggtgactcctgctatgctttagcaaagagactggtggcacttcatccttgccctagagatctgcgaaacattgaactagagagagattatttaaggtatctggctgaagaaatttctaagcagcaagatgttcaagaaaaagcagagcataaaagtttgg

SEQ ID NO: 941340 - DNA, 503 bp, Homo sapiens
aagcagctgggaggaagtctgtaccctgcaaagccacaggggcagagctacccaagaccacggaagcccacctattgcatcagcatgacctggatgtgagacatggagtcaaaggagatgattttgaaactttaaggtttaatgactgcactattggattttggrctttcatggggcctgtagcccctttgtgtcggccaatttctcccattttgaatgggtttgtttacccaatgcctgtacccccattgtatctaggaagtaactaacttgcttttgattttacaggctcataggtaaaaggaatttgctttgtctcagatgagactttggacttggcctttctagttaatgctggaatgagctaagactttgggagactgttagaaagtcatgactggttttgaaatgtaaaaaggacctgagatttgggaggggccaggggcagaatgatattgtttggctgtgtccctacccaaatctcatcttgaattatagttccc

SEQ ID NO: 941341 - DNA, 644 bp, Homo sapiens
cccttccccaacaggcttacagtggggaggagaggtgggcatgggtagctgcaggaggaccatctctttagagagaggaggccaaaaataataaaagagaccatacatgggtattggttgctgacacattgtcccctgcttgatagaggaagggtctgctcatagatttaattgcttttcttccttaggaagaatgaatgaaaggaggaaagaaggataaaaagtttctttctatcggggctggacgcggtggcttacccctgtaatcccagcactttgggaggctgaggtgggcggatcacgaggtcaggagatcgagaccatcctggytaacacgatgaaatcccatttctactaaaaatagaaaaaattagccggggcctggtggcaggtgcctgtagtcccagctactctggaggctgaggcaggagaatggcgtgaacccgggaggcggacttgtagtgagccgagatcgcgccactgcactccagcctgggtgacagagcgagactctgtctcaaaaaaaaaaaaaaaaaaaaaaaaaagtttctttccatcaacaccaacttaatagaagtgtctcttttatcttctgagacaagaacttagagaaaagagaaaaatacttcctcctttatgataca

SEQ ID NO: 941342 - DNA, 584 bp, Homo sapiens
aggcttacagtggggaggagaggtgggcatgggtagctgcaggaggaccatctctttagagagaggaggccaaaaataataaaagagaccatacatgggtattggttgctgacacattgtcccctgcttgatagaggaagggtctgctcatagatttaattgcttttcttccttaggaagaatgaatgaaaggaggaaagaaggataaaaagtttctttctatcggggctggacgcggtggcttacccctgtaatcccagcactttgggaggctgaggtgggcggatcacgaggtcaggagatcgagaccatcctggttaacacgatgaaaycccatttctactaaaaatagaaaaaattagccggggcctggtggcaggtgcctgtagtcccagctactctggaggctgaggcaggagaatggcgtgaacccgggaggcggacttgtagtgagccgagatcgcgccactgcactccagcctgggtgacagagcgagactctgtctcaaaaaaaaaaaaaaaaaaaaaaaaaagtttctttccatcaacaccaacttaatagaagtgtctcttttatcttctga

SEQ ID NO: 941343 - DNA, 758 bp, Homo sapiens
ttgaacatcagcagagggaaatgtgtgctctcagctcctctctgctctcagcctggttctgcaccatggagaataggcctggaagtcacatcacctgcacttcctcatggagtctcactgattataaaaaagaacaagcacccctctgggttttgtctcagccagtttaaccaaaggaaatgattaatgccgattagtcgaaaaaggctgtgtctttcttaagacccttcccagctattcatgagcacacgtttagcttgatagcgtaaagattagtaagggcsgtaacagcagagatgttactggcaggtaaagtacctaaaaactacatcaaaagagaagaaagggctgggtgcagtggctcacacctgtaatcccagcactttgggaggccaaggcaggtggatcacctgaggttagcagttcaagaccagcctggccaacatggtgaaaccccatctctactaaaaatacaaaaactagctgggcgttgtggtgtgcacctgtaatcccagctactccaggaggctgaggcaggagaattgcttgaaccagggaggtggagcttgcagtgagccaaaatcgtgccattgcactccatcctgggcaacacagcaagactccatctcaaaccaaaaacaaaaaaaaaaagagcgagagagaagaaaggagtacttaaatcgtgctaggtggaaggaactgagcagcctagacactcagcctcttaaggcaagtagggagtggggtgtgggtacatg

SEQ ID NO: 941344 - DNA, 517 bp, Homo sapiens
gacttgaacagagagaggcagcaagtcagtcagatatgtgtgggcagcatatcccaagcagagggaacagtcatacaatcttggaggctacaaggtgcttggtatgttctgcaaagagttaagaggtcagtgtgcctggagaaggtgcagcaaatgggacagtgatggccataaggccagggcggtggcagacagccagatggtgtggagtcttgcaggccacggtaagaatgtgtgggttttgcattttacttagagtgaaaagagaagagattacagattgttgtgcagagaggcaacatgatctgatttatattttttaaaaatttctctgtggagtatatattgggggaggggagcaaggrtagaagcagggagaactattaggaggctattatactagtccagtgagggatgatgatggctggaattaccatggcagcagtggaagtggcagaagtgagaattctgattatattgtaaagatgctgtccgcagggtttgctagtggactggg

SEQ ID NO: 941345 - DNA, 572 bp, Homo sapiens
ggtccagggctttttctgtttggtaggtttttttattactgattctatttctgaatccattaatggtctgttcaggatttcaatttcttcctagttcaatcttaggatgttgtatgtttccaggcatttatccatttcttctaggttttctagtttgtgtgtatagaagtgtttgtaatagtctcaggggcattttgtatttctgtggggtcagtkgtaatgtcccctttattatttctgattgtatctatttggcttttctcctttttcctttatttttctagctagttgtctatcaatcaattttatttattctttcaaaaaagacacttctggttttgtttctcttttgggtgttttttctcatttccatttcattcatttcagctctgattttcattgtgtttttctgctagctttgaggttggtttgcttttgtttttctagctcctctaggtgtgaggttaggttgctaatttgagatctttctaactaactttttaatgtgtgcatttagtgctataaatttttctcttaacactcctttagctgtgtcccagagattctggtat

SEQ ID NO: 941346 - DNA, 637 bp, Homo sapiens
ggatacttacctctcgaggggttgtgaggattaaatgaaatgatattatatgagatatgacttagtacggtgagtaatctcttctaatgtattggttacataaatccagatttctatggatcagatgttattaaagcaaaatataattatactcctgggactcatgcagcacagttctgttcaagtcagtaagcacttttgagggcctactatacgggaagtcctgtgctaggtgtagttgctacgaaagtgagaggcagtacctgcccttacattgctcactgcctagtgacaatatacacagcagaacgccagttctacacagaaagtggagggagaaaaggaagaaaaagttgtccaaatgcgtaatttagtattggtaggttactcttgccccagttattctttcctgagactttcaactcccggatcatgagtgatataatarttcttttcaatctgagctaagaaattattttaaaaatgcaaactataaaaactatactgtattttaattttgaataattaaatttaacagtggccattgtcttttcatttctgtaacatgctcctcttatataattaaggtcatacttgaaaatatacgtcccatgaagaaaaccattgctgagatagt

SEQ ID NO: 941347 - DNA, 819 bp, Homo sapiens; identical to SEQ ID NO: 940101

SEQ ID NO: 941348 - DNA, 819 bp, Homo sapiens; identical to SEQ ID NO: 940102

SEQ ID NO: 941349 - DNA, 588 bp, Homo sapiens
aagtacttattctaaagctttacaaaggtggaggaaacaagacataccttggttagctacattttggtttttataaaattcacaaaggcgacgatatgtttctgtgctgccttttgtgtgctgtcttatgtgaatgttctccttttctctacaatcctgtcttacatgtggccctcgtcaggtgccccaggcataccacttctcttaggataatgcagtcccagccctgcagtcccttcttttatttatttatttatttatttatttatttatttgagatggagtcttgctctgtcgcccaggctggagtgcagtggcacgatctcggctcagtgcaagctccgcctcccaggttcaygccattctcttgcctcagcctcctgagtagctggaactacaggcgcccgccaccaggcccggctaattttttgtatttttagtagagacggggtttcaccgtgttagccaggatggtctcgatctcctgacctcatgatccgcccgccttggcctcccaaagtgctgggattacaggcgtgagccactgcgcccggcctgtcccttcttgagcctcacaaattctgtctc

SEQ ID NO: 941350 - DNA, 588 bp, Homo sapiens
aagtacttattctaaagctttacaaaggtggaggaaacaagacataccttggttagctacattttggtttttataaaattcacaaaggcgacgatatgtttctgtgctgccttttgtgtgctgtcttatgtgaatgttctccttttctctacaatcctgtcttacatgtggccctcgtcaggtgccccaggcataccacttctcttaggataatgcagtcccagccctgcagtcccttcttttatttatttatttatttatttatttatttatttgagatggagtcttgctctgtcgcccaggctggagtgcagtggcacgatctcggctcagtgcaagctccgcctcccaggttcacgccattctcytgcctcagcctcctgagtagctggaactacaggcgcccgccaccaggcccggctaattttttgtatttttagtagagacggggtttcaccgtgttagccaggatggtctcgatctcctgacctcatgatccgcccgccttggcctcccaaagtgctgggattacaggcgtgagccactgcgcccggcctgtcccttcttgagcctcacaaattctgtctc

SEQ ID NO: 941351 - DNA, 650 bp, Homo sapiens
cccttacatagcttctctctcttattttctctctctcctctaatttttgttagttatttttcaaataatttttcaaacatgttttcaattttttttcaaatatattctctctcattttctctactctggtgactacaattacatgtatgttagataacttgaagtagtcccattgctaactgakgcccttctaattttactgaatttttgctttgcactttagtttgagttgctactttcaacatgtcttcaagctcactaatactgattttgcaatgataaattcgtaatcccatcattgtatttctatttcagatttttaaattttaattcacctggattttctacaatttttatttgtgtctttgttgtatcatccatgtttctactttcatgatataataatttaagtgtatcataacaactgtattaattccttgtctgctaattctaacatgtgacagttatggatcagttttaattggtttatatttctcactatgaatcaaatttttcttcttctttggatatttttgtcatctttcataaatgccagataattttgaatttatcttgctgggagctgggtattttggtattgctacaatatcctgagtcacattttctttaaaacagtgtgttcctttcag

SEQ ID NO: 941352 - DNA, 650 bp, Homo sapiens
cccttacatagcttctctctcttattttctctctctcctctaatttttgttagttatttttcaaataatttttcaaacatgttttcaattttttttcaaatatattctctctcattttctctactctggtgactacaattacatgtatgttagataacttgaagtagtcccattgctaactgatgcccttctaattttactgaatttttgctttgcactttagtttgagttgctactttcaacatgtcttcaagctcactaatactgattttgcaatgataaattcgtaatcccatcattgtatttctatttcagatttttaaattttaattcacctggattttctacaatttttatttgtgtctttgttgtatcatycatgtttctactttcatgatataataatttaagtgtatcataacaactgtattaattccttgtctgctaattctaacatgtgacagttatggatcagttttaattggtttatatttctcactatgaatcaaatttttcttcttctttggatatttttgtcatctttcataaatgccagataattttgaatttatcttgctgggagctgggtattttggtattgctacaatatcctgagtcacattttctttaaaacagtgtgttcctttcag

SEQ ID NO: 941353 - DNA, 576 bp, Homo sapiens
ctaggctaataaagaagaaaagagaagaatcaaatacacacaataaaaacggatatggaatgtcaccactgaccccatagaaatacaatcaaccatcagagaatactataaacacctctatgcaaataaactaaaaatctrgaagaaatggataaattcctggacacatacgcctcccaagactgaactaggaagatgttaaatccctgaatacaacaataacaagtactgaaattgaggaagtcataaatagcctaccaacaaaagaaagctcaggacctgatggatttgcagttgaattccaccagaggtacaaagaggagcttgtcctatttcttctgaaactattctaaacaattgaaaaacagcaacttctccctaactcattttgggagggcagcatcatcctgataccaaaatcttgcagagatactacaccaaaaacaaactgcaggccaatatcccccatgaatatcaatgaaaaaatcctcaataaaatactggcaagctgaattcagtagcacatcaaaaagcttatccattacgatcaagtaagttcatccccaggttgcaagg

SEQ ID NO: 941354 - DNA, 576 bp, Homo sapiens
ctaggctaataaagaagaaaagagaagaatcaaatacacacaataaaaacggatatggaatgtcaccactgaccccatagaaatacaatcaaccatcagagaatactataaacacctctatgcaaataaactaaaaatctagaagaaatggataaattcctggacacatacgcctcccaagactgaactaggragatgttaaatccctgaatacaacaataacaagtactgaaattgaggaagtcataaatagcctaccaacaaaagaaagctcaggacctgatggatttgcagttgaattccaccagaggtacaaagaggagcttgtcctatttcttctgaaactattctaaacaattgaaaaacagcaacttctccctaactcattttgggagggcagcatcatcctgataccaaaatcttgcagagatactacaccaaaaacaaactgcaggccaatatcccccatgaatatcaatgaaaaaatcctcaataaaatactggcaagctgaattcagtagcacatcaaaaagcttatccattacgatcaagtaagttcatccccaggttgcaagg

SEQ ID NO: 941355 - DNA, 576 bp, Homo sapiens
ctaggctaataaagaagaaaagagaagaatcaaatacacacaataaaaacggatatggaatgtcaccactgaccccatagaaatacaatcaaccatcagagaatactataaacacctctatgcaaataaactaaaaatctagaagaaatggataaattcctggacacatacgcctcccaagactgaactaggaagatgttaaatccctgaatacaacaataacaagtactgaaattgaggaagtcataaatagcctaccaacaaaagaaagctcaggacctgatggatttgcagttgaattccaccagaggtacaaagaggagcttgtcctatttcttcygaaactattctaaacaattgaaaaacagcaacttctccctaactcattttgggagggcagcatcatcctgataccaaaatcttgcagagatactacaccaaaaacaaactgcaggccaatatcccccatgaatatcaatgaaaaaatcctcaataaaatactggcaagctgaattcagtagcacatcaaaaagcttatccattacgatcaagtaagttcatccccaggttgcaagg

SEQ ID NO: 941356 - DNA, 576 bp, Homo sapiens
ctaggctaataaagaagaaaagagaagaatcaaatacacacaataaaaacggatatggaatgtcaccactgaccccatagaaatacaatcaaccatcagagaatactataaacacctctatgcaaataaactaaaaatctagaagaaatggataaattcctggacacatacgcctcccaagactgaactaggaagatgttaaatccctgaatacaacaataacaagtactgaaattgaggaagtcataaatagcctaccaacaaaagaaagctcaggacctgatggatttgcagttgaattccaccagaggtacaaagaggagcttgtcctatttcttctgaaactattctaaacaattgaaaaacagcaacttctccctaactcattttgggagggcagcatcatcctgataccaaaatcttgcagagatacwacaccaaaaacaaactgcaggccaatatcccccatgaatatcaatgaaaaaatcctcaataaaatactggcaagctgaattcagtagcacatcaaaaagcttatccattacgatcaagtaagttcatccccaggttgcaagg

SEQ ID NO: 941357 - DNA, 620 bp, Homo sapiens
ttgcacacctaactcatactttttataaccatccatatataaatatagataaatttagtagaaagttgaacttgctctgattgatgagacagcaggagagaaagacccatgtaagggttctgagttgatttgctaactttctttaaagatgtgagtctgtggttatgacctaaagaacaggtgggctgcagtatgagagagacggagatggcttaacttgtccttcacaccctgaacagggttctgamggaaggaaagaaagctgagtagaagtgggggtgtcaaaaaagcatcctgcctgtaatgccagcactttgggaggttcaggcgggcggatcacctgaggtcgggagtttgagaccagcctgaccaacatggagaaaccccatctctactaaaaatacaaacttagctgggtgtggtggtgcatgcctgttatcccagctacttgggaggctgaggcagaagaatcgtttgaacccaggaggcggaggttgtggtgagccaagatcgtgccattgcactccagcctgggcaacgagagtgaaactctgtctcaaaaaaaaaaaaaaaaaaaaaaagcatcccaggctaccttgggagatttaaataatctattt

SEQ ID NO: 941358 - DNA, 697 bp, Homo sapiens
aatagaagaaacattgctaccaagggttagtttagttcatgcttttaagcatttgtgtgtgtgtgtgtgtgtgtgtgtgtgtgtgtgcgcgtgtgcacgtgcacgcacattgtggaatttttttaatggctagtaatcttgattttaatcctgtggagtaaraggtcatagcccgatttgcagagatccctgtgccagggggtagataaaggtcaatgggtgggatgcagacaggcattcagtggactctttgaaattatattcaaagttgggcatatacgtagatttctgggaacgccatcatcaaatcccctgagatcgtttggtccgaaaaggattatgagccactgctgtcaagagaatagaagagcagcaataaataaatcattttaattttatgaacagattctaaattaacctgctctcatacctctctcttggaaattagggaaatgtacttttattagctctcaaaatggtaaatattattcccttaagcattcacttagctgatagtctgaaatattatattgaaatgtctagttttgaaaggcttataaataaaatacctctgattataaataatcaattttaaagtaccctgtaagccataaaaaatgcaaaagaccagtgatatatcctctgccttcatgcctaactcatgccttaggcatggagatcaatgtgtggtgcgtca

SEQ ID NO: 941359 - DNA, 762 bp, Homo sapiens
gtggcatagcagctcccagaggtcctggaccaagtcactttcccctgtgcagcctttctgttagggagaaactttccagcttcaatagagaaatgctcgttcaccaacagaagacactgattgttgtttaaagatgcaattctcctatgctctaatatagttatgctcctacgtatgaggagtgcaaaaggagcagaatagttaggacagaaaatcccccaaaggagttggatttggaattgtatgctcccagtgagtaaaacactcactgcacatcacaatctaacaatgataatgtttattcactttcaactttgcaagcaacatagacacagaggcaaatggctaaggtaacattcaagttcccaatgatgtaaataatttacttcgggcaacagaatattctctgttgccagtttgaaagcttgtaaaaactttaagccatcacaaaacttctctgatttttctaatcaattctgaaaaatccccagaggtcaccaggggtccttaacatattagaaaggaaagaaagactgytgcaaaagctacaatcatcgtttctacaaaatatgtaacctcaaacccttgagacgacttcatcaaaccaatccatttataaatcttgcaagctatacaaactgaaatcagaactgctttccaaaaagaaactctgggccaatttatgatggcccacatcaaaataaacttcctaggcaaataaggacacaggagaaagcagctttctctatgtgttggtacagc

SEQ ID NO: 941360 - DNA, 746 bp, Homo sapiens
agccagcaggcaggaacatttaagtctgctgaagctgctcccacagccacctgttcctccaggtgctctgtcccagggagatgggagttttatctataagcccctgactggggcttctgcctttctttcagagatgccctgcctagagaggaggaatctagggaggcagtctggctacagtggctttgaagagctatggtggactctgcccattcaaacttcctgttggctttgtttacactgtgaggggaaaaccgcctactcaagcctcagtaatggtggacacccctccccccaccaaactccagcatcccaggttgacttcagactgccatgctagcagsgagaatttcaagccagtggattttagcttgctgggttccgtgggattgggatccactgagctaggccacttggctccctggcttcagccccctttccaggggagtgaacagttctctgtcactggctttccaggtgccactggagtatgaaaaaaactcctgcagctaactcggtgtctggccaaatggctacccagttttgtgcttgaaacccagggccctggtggcgtaggcacccgagggaatctcctggtctatgagttgagaaggtgtgggaaaagcatagtatctggacctaaatgcaccgctcctcacggcaccatccctcagggcttcccttggctaggggagggaattccctgatgtcttgtagttcccaggtgaggtgacactccaccttgc

SEQ ID NO: 941361 - DNA, 589 bp, Homo sapiens
agcctaggaccagaaggattcacagtcaaattctcccagatgtacaaagaagagctggtactatccttactgaaacttttccaaaaaattgagaaagagggattcctcctgaactcattctaggaaggcagcatcttcccaataccaaaacctggcagagacacaataataaaagaaaacatcaggccaataaccttgatgaaaacgatgcaaaaatccgcaacaaaatacttgcaaatggccaggcacagtggctcatgcctgtaattccagcatttggggaggccaaggtgagcaaatcacttgagctcaagagtttgaaaccaacctggacaacatggcaaaaccccatctytacccactcacccccccaaaaaaaatataaaaacttagccaggtacagtggcacacacctatggtccaaggtactcaggaggctgaggtaggaaaattgcttgagcccaggaggacaaggctgcagtgagccaagatcacaccactgcactccagcctgggtgacagagtaagactctgtctctaaaactatatatatatttgcaaactgaatccagcagcacatcaaaaagct

SEQ ID NO: 941362 - DNA, 753 bp, Homo sapiens
gaacaacacaggtttgaactgtgtaggtccacttatacaaagattttttgcaataaatacagttggccctctgtatctgtgggtttgtgtctacaaccaaacagactgaaactacagtattcataagatgtgcaatttgctaataccaaaggctgacttttcatataccaggttctaccaaggcaacttcgggactagagtatgcacagattttggtattgacagcaggtgttggggtggagagtgggatcctggaaccaatgcccgtggatacctagggacgactgtacaaacaagaatccaattgaggtcatacgatgtaagaaggcaatgcaataatattttcaaaccaatcaattaaagaaacttttaatctagaattttaaacaaaaataccgggctgggtgcggkggctcacgcctgtaatcccaggactttgggaggccgaggtgggcggatcacgaggtcaggagatcgagaccatcctggctaacatggtgaaaccccgtctctattaaaactacaaaaaattagccaggcgcggtggcgggcgcccatagtcccagctactcaggaggccgaggcaggagaatggcgtgaacctgggaggcggagcttgcagtgagctgagatagtgccactgcagtccggcctgggtgaaggagtgagactccgtctcaaaaacaaaaaaaaacaaaaaaaaaaatcacctaaaagcaaacatacaagaacagtatctattgaatatctcag

SEQ ID NO: 941363 - DNA, 543 bp, Homo sapiens
cagatgcttgttcagccagcgggaggcatctctcccttcccgtaacttctcccgtaactgggtcagctcttttgcctgagagtgaaccagggctttatactgcctaaggtgagatagtagagaacatttaataatggaaagggatgagtgatcagttctaataccgcaacagaggtttctstgagaatgtcctcaaggagacctccaagcagaaggtcagaacatgtttggggaaatgtctgtggccaagagaaagaagaatatatatatatatatatacacacacacacacacacacacatacatatatacaaacatacacacacatatatatacaaacacacacacacacagccttctgatatatgagagactgcttctgtaatatcctcgcagatgttccattcatctttttcttctgtaaacaaaagttagtgtcttcctaaatcagttccacaaggatgtcctttcagttcctcactttggccatgggcatctctatgtgaaaattcacatagcgcatcttgcagtgactagatacaa

SEQ ID NO: 941364 - DNA, 535 bp, Homo sapiens
accctgggacttgtcagggtcatcaggagtgaggagggttttcagatgcttgttcagccagcgggaggcatctctcccttcccgtaacttctcccgtaactgggtcagctcttttgcctgagagtgaaccagggctttatactgcctaaggtgagatagtagagaacatttaataatggaaagggatgagtgatcagttctaataccgcaacagaggtttctctgagaatgtcctcaaggagacctccaagcagaaggtcagaacatgtttggggaaatgtctgtggccaagagaaagaagaatatatatatatatatayacacacacacacacacacacacatacatatatacaaacatacacacacatatatatacaaacacacacacacacagccttctgatatatgagagactgcttctgtaatatcctcgcagatgttccattcatctttttcttctgtaaacaaaagttagtgtcttcctaaatcagttccacaaggatgtcctttcagttcctcactttggccatggg

SEQ ID NO: 941365 - DNA, 641 bp, Homo sapiens
atatcctgacttgacacattctatgcattgaacaaatacatgtaccccataaatacataaaatactttgtatgaataaaaaagtaacttacaaaatttgaagaacatagccttccctttttataaattaaaattctctaaattttgtattcctatggtcttctctgattcaaatttgtaattggcttattaaaacatatattcacaaaatacgtacatgcagaaaccacaatggtatagcacttcgcacctgttaggatggctaatataataataataataataataataataggccaggtccggtgkctcatgcctgtaatcccagcacttagggaggccgaggtgagaagatcacctgaggtcaggagttcaagaccagcctgaccaacatggtgaaaccctgtctctattaaaaatacaaaaatgagccagccgtggtggttgggtgcctgtaatcccagctacttgggaggctgaggcaggagaatcacttgaacctgggaggcggaggttgcagtgagcagagatcatgccactggactccagcctgggctacagagtgaggctctgtctcacaacaaacaaataaataataaacactggcaaaattggaaggaatacttgacactgctggaagga

SEQ ID NO: 941366 - DNA, 641 bp, Homo sapiens
atatcctgacttgacacattctatgcattgaacaaatacatgtaccccataaatacataaaatactttgtatgaataaaaaagtaacttacaaaatttgaagaacatagccttccctttttataaattaaaattctctaaattttgtattcctatggtcttctctgattcaaatttgtaattggcttattaaaacatatattcacaaaatacgtacatgcagaaaccacaatggtatagcacttcgcacctgttaggatggctaatataataataataataataataataataggccaggtccggtggctcatgcctgtaatcccagcacttagggaggccgaggtgagaagatcacctgaggkcaggagttcaagaccagcctgaccaacatggtgaaaccctgtctctattaaaaatacaaaaatgagccagccgtggtggttgggtgcctgtaatcccagctacttgggaggctgaggcaggagaatcacttgaacctgggaggcggaggttgcagtgagcagagatcatgccactggactccagcctgggctacagagtgaggctctgtctcacaacaaacaaataaataataaacactggcaaaattggaaggaatacttgacactgctggaagga

SEQ ID NO: 941367 - DNA, 742 bp, Homo sapiens
atatgtagacctatatgcaaaatgtaaaacaaaaaaagtttgagaagaagaaaacataagagaaaatctagtgactctgggtttggcagtgacttttgaggtacaccaaaaatgtgatccgtgaaagaaaaaaattggtaagttggacttagttaaaattaaaaacttcctctctgaaaaagatgctattaagaggatggaaaggcaagctacagactgagagattgtatttgccaaacacatatctgayaaatgactggtatccaaaatgtaccaaacaacgcttaaaactgaattttaagaaaacaacttaactaaaaaaatcagcaaaacatctgaacagacacctcataaaagaagagataaagatgggtgggtgcagtggctcatgcctgtaataccagcactttgggaggccaaggtggggggatcacctgaggtcaggagtttgagaccagcctggccaacatggtgaaaccccgtctctactgaaaatacaaatattagccaggtgtgatggcatccgccagtaatcccagaaactcgggaggctgaggcaggagaattgcttggacctgggaggcggaggttgcagtgagctgagattgtgccactgcactccagcctgggcaacagagcaagactctgtctcagaaaaaaaaaaaaaagaagaaagtcatgcacagagagggaagaaggccagccacctgagggtggcggcagagtgtggagttatgggact

SEQ ID NO: 941368 - DNA, 564 bp, Homo sapiens
ttttctgtcttacaacaggactgtaagatacaccaatcagcgtctgtaaaaacgtaccaatcagcactctgtggctagctagaggtttgtaaaatgcaccaatcagcactctgtagctagctagaggtttgtaaaatggaccaatcagagctctgtaaaatggaccaatsggcactctgtaaaatggaccaatcagcactctgtaaaatggaccaatcagcaggacatgggcagggacaaatcagggaataaaagctggccaccccagccagcaggggcaacctgctgccgttcctttctgtgtgtggaagctttgttcttttgctcttctccataaatcttgctgctgctcactctttgggtctgcaccacatttaagagctgtgacactcaccgtgaaggtctgcagcttcattgttgaagtcagtgagactacgaacccactggagggaaccaactccagacacaacagtgcactgggtaagtaacattcctatgctcctgctgaccttccttcacttgttgcttcttccatcacgtgggagtaaagtggctcttgcaggc

SEQ ID NO: 941369 - DNA, 619 bp, Homo sapiens
aacagcccagttcaaaatgaaaatgtgtgttcaaaaagcaggagtccctatgactcagcaattccacttccaaacatacccaacagaatcgaaagcagggactcaaagagatagttgcataccgtgttcatggcagcattacttacaatagccaaaaggtggaacttaaatgtccatctacagatgaatggataaacaaaatgtgacatagacacacaatggaatattattcagcttaaaaaaggaaggaaattctgacacatgctactcacgaagaaccccaaggacattatgctgagtgaaataagccagtcacaaaaacacaaaagctgtatgattcacttgtrtgacgtaccggagttgtcaaattcatagagataggaagtagaatggtggttgtcaggggctgggggtaggggaaaatggggagtaatgggtatcacattttagttttgcaagaagaaaacagttttgaagatgggttgggtcaggcatggtggctcaatcctgtaatctcagcactctgggaggccgaggcggtagattgcttgagcccaggagtctgagacccgcctggacaacatggcgaaatcctttctctactaaacatacaaaactt

SEQ ID NO: 941370 - DNA, 659 bp, Homo sapiens
tgcaagaaagctcaccatgaccttatgcctatccacagggaactgctgcttagaactgctattatcccacatggagcccgctcagaaagctggcaacatcccatgagcacaaataagcatcagagaaatgccatctcataaacaggcagaagcatttgtgaacacagcagtaggtctgcttgtcmatacttatcttggcgattatcagaattattcttatatccccttcttgggcatctctttttatagtgataatcattcccacactactctggacagctctgaaacagatcccagcatccacccacctcccatctctggaatgctcgctcagggaccaggtatccctttgaccaacatacacatcttcttctcaaatcagtttctccacttttttttttgccttaattaaaccttaaaaatgttgttcctttgtaattttctcaagtaggagcttttatgttatcatatcttcatgcatctttaactgtgaagacatggaaacttcttttctcattcattactctcctttctatccatcacccccctctggcttctcttccctttttgaccacctagattctgagatactttacttcaacaattctgttagaaatattctcgattctttttcctctagtttctttcatcatacagca

SEQ ID NO: 941371 - DNA, 775 bp, Homo sapiens
ccaccaaaaataaatacataagggttctaatttctccacttccttactaatgcttgctttaatctgtcttttttattataaccattctattgtgtgtgaagtggtatctcattgtggtgtcgatttacatttcccaaataactaacatatggtgttgcacatcttttcatgtgcttatttgccatttgttygacttctttggttaggggtctatgcaaatcctttccccatgtttcaattgggttatttatctctttgttattgggttataagagattttatatatcctcagtacaagttacttgtcaaatataaaatttgtcaacattatcttacagtctcttggttatttttcactttcttatgatgaccattaaagcatgagtgttttaattttgatgatataaaagtgatgtttgtttcgtcacttacatgttaggtttctatgtaagaaagcatagcctaatcaaattaatgaagatttactcctatgttttcttctaaaagtttgataagtttagctcttagaattagatctatgatccattgtgagtttattttcatgtatggtgtgaggtaggtccaatatcattcttttgcaagtgagtagctagttatcccaatgccattttttgaaaatagcactttttgccattagactatcttgaacacttgtgaaaaatcaattgacaattgatatgatgttttacttacggactgtccattctgcttgaatgatctctatgtttatcactatgccaataccattatggct

SEQ ID NO: 941372 - DNA, 669 bp, Homo sapiens
atgtgtcttttttacagaatgatttattttcctttaggtatatacccaggaatgcagttgtgggttgaatggtagttttgtttttttaagttctttgaaaaatctccacactgctttctacagaggccaaactaatttacattaccaccaacagtgtataagcattctcttttctccatagcttctccagcacctgctatttttttttttttttactttttactaatagcaattctgactggtgtgagatgatattgcattgtggttttgacttgcatttttctgatgattagtgataaagagcatttttcktatgtttatcggacactcacatgtcttcttttgagaaatgtctgttcatgtttttttgccatttttttccttccaacttttaggtttagggggtacgtgggcaggtttgtgacatgggtaaattgtgtgttgctggggtttgatgtaaaaatgattttgacacccaggtagtgagcatagtacccagtaggtaattttttagtcttcaccctcctcccaccctccacctccaagaaagctgtggagtctattgttctcttcttagtgcccatgtgtactcagtgtttagctccctcttataagtgagaacatgtagtatttggttttctgtttctacattaattcacttagaataat

SEQ ID NO: 941373 - DNA, 576 bp, Homo sapiens
agggattgagttcttgatttgattcttagcttagtcgttgttggtgtatagcagtgctactgatttgtatacgctgattttgtaatctgaaagtttgctgctagtagccttttggatgagtctttggggttttctagatatacaaccatatcactggcgaacartgagagcttaactccctcttttccagtttgaatgctctttgtttctttctcttgtcctgttgctctggctaggacttccagtactacgttgaatagaaatggtgaaagaggtcatccttgtcttgttctagttctcaggggtaatgctttcaacctttcccccattcagtacgacgttggctgtgggtttgtcatatgtggcttttattactttgaggtgagtccctcctgtacttattttgttgagggattttatcataaagggatgctggattttatcaaatgcttttttctgtatctatttaaatggtcatatggtttttgtttttcaattctgcttatgtggtatatcacatttattgacttacatatgttaaacaacccctgaatctctgggatgaaaccctgctga

SEQ ID NO: 941374 - DNA, 306 bp, Homo sapiens
ggggggggttcttcgattttttttaattgacaaatgtacatattcatgaggtaagtagtgatgtttcaatataatgtaaagtgatcagatcaagataattagcatatttatcatctcaaacatttatttttttgtgtgtyggacatgttcgatatcatccatctacctatttgaaactatatattattaactgtagtcatcccactgtgatacagaatactagaacttactccccttatctagctgtaattttgtatcctttaacaaatctttcctctatacctccctttcccctacctttccagc

SEQ ID NO: 941375 - DNA, 578 bp, Homo sapiens
ttggatggataagccaactgaattttgaagcaaccaagaatggtggcaattgaaagaaatgagacgatggtaaagtcattcatgaaaggagtgagacagggtgggcaggagatggcagcaactcagaggcacaaagtccgatgacatatacttcaaaggaagaggggttgaagaagggaacgaatggcttagaagtggcaatcggaggccaggygcacacctgtcccatctccagatacatggggagggtatgagaagaaaaaaaaagccaacctgctgttaagtagctgcaatggaagttttaggacaaatcaggcactagacggggtaagcggtgagggaaacattctgagaagggattaagaatagagaagaggaggctgctgagaggctggacagtgtgggggagattggttcagattaccagatgtgcagagccaccatggggctaagggttggggtgatgccagatgacttgggatgggaacttgaccttctggaggtgactgaggtgaacagggaggtgggacatggtgggattagtgctgatgatctcataagaatctggttttgtagca

SEQ ID NO: 941376 - DNA, 540 bp, Homo sapiens
  misc_feature 503, 504, 505, 506, 507, 508, 509, 510, 511, 512, 513, 514,515, 516, 517, 518, 519, 520, 521, 522, 523, 524, 525, 526,527, 528, 529, 530, 531, 532, 533, 534, 535, 536, 537, 538,539, 540: n = A,T,C or G
caaggagtctgtctgctccctgtggctgtttttaggaagtcagagaggcacagaccaaacctcttattatggagtgcagggtatgtatgtgtttttcctttccactgaaaaacagacaacagaagaagaaacgtgtttatttgaatctctctctgcagagggtgtgccaccggccaccccctctcccaagataccygaagacccttgcctggtatctttatccttccaataatttaacaaattaagccgtgcctaattttctaagctgatttcctgagggctctaacttgggaggcccctttcctgtcataggaaccagcagactgacttggttttcctttcttgctctattgctagagccatggaggtgggagtccctttcctggctccataccaccctctccccaggctgccaaatgtccctctgggccctctattccccctgctccttggtgtcctgactcattttcaccggatttcatctggacagcagtagggtgagnnnnnnnnnnnnnnnnnnnnnnnnnnnnnnnnnnnnnn

SEQ ID NO: 941377 - DNA, 638 bp, Homo sapiens
aggggtgacatcacctatcagtagaactgtgatgcccgcctgagtctcagaccagcaagtttttattaaaagtttcaaaaggggaggggatgtaagagcagggagtaggtacaaagatcacatgcttcaaaaggcaaaaagcagaactactagtaagggtctaacaaagatcacatgcttctgagggaacaggacaaagggcaaagcagaactactgataagggtccaacaaagwtcacaaggcaaagggcaaaagcagaactactgataagggtctatgttcagcggtacatgtattgtctttataaacatcttaaataacagaaaacagtgttcgagagcagagaaccggtctgaccacaaatttactggggcagtttttcctcaccctagcaagcctgagggtactgcaggagaccagggcctatctgaatccttatctcaactgcataagacagacattcccagagcggccatttatagacctccccccaggaatgcattcctttcccagggtattaatattccttgctaggaaaataatttagcaatatctctcctacttgcacgcctgtttatagactctatgcaagaagaaaaatatggctctttttgcccaaccccacaggcagtcagac

SEQ ID NO: 941378 - DNA, 638 bp, Homo sapiens
aggggtgacatcacctatcagtagaactgtgatgcccgcctgagtctcagaccagcaagtttttattaaaagtttcaaaaggggaggggatgtaagagcagggagtaggtacaaagatcacatgcttcaaaaggcaaaaagcagaactactagtaagggtctaacaaagatcacatgcttctgagggaacaggacaaagggcaaagcagaactactgataagggtccaacaaagatcacaaggcaaagggcaaaagcagaactactgataagggtctatgttcagsggtacatgtattgtctttataaacatcttaaataacagaaaacagtgttcgagagcagagaaccggtctgaccacaaatttactggggcagtttttcctcaccctagcaagcctgagggtactgcaggagaccagggcctatctgaatccttatctcaactgcataagacagacattcccagagcggccatttatagacctccccccaggaatgcattcctttcccagggtattaatattccttgctaggaaaataatttagcaatatctctcctacttgcacgcctgtttatagactctatgcaagaagaaaaatatggctctttttgcccaaccccacaggcagtcagac

SEQ ID NO: 941379 - DNA, 663 bp, Homo sapiens
aaactttgggtaagtcacttcacctctctgtgattcagtttcccaagcataaaagcagaaatattggtttctacctcatagggtcatgatgaggcttaaataagctaatgcatgtaaaacacttagcagagggtttgcttttattactgctttttataaagtgattttcctgattactgctgtcatccttaactggtgtgttctcattgggatggggtagagtaggacatgggggtgataatgcaagtatttacataatatccaatatatttaataatgcattaaagcaagtttgtccaaaccatggcccatgggctgcatgtgacccaggatggctttgaatgtggcccaaaacaaatttgtaaactttcttaaagcattaagaacttttttcgtgatttttttttttagctcatcagctatcattagtgttagtgtattttatgtgtggcccaacacaattcttctttgtccaatgtggctcagggaagccmaaagattggatacccctactgattaaagcgtggacataatccatcagaatgtgtgagcaatgatgaaagtcctgtggtatttctgttgggtctggcactaacccaccaatttctgatctatagaaaagtcaagggtccaggatattactagggtaacagaggaggaact

SEQ ID NO: 941380 - DNA, 592 bp, Homo sapiens; identical to SEQ ID NO: 929100

SEQ ID NO: 941381 - DNA, 568 bp, Homo sapiens
agggaggtgagaaaaaaagtttataggtatcttatcttatggtcaaactgattaagattgaataaatttgtctataaagttttattaagaattagggagtttgttagaagatggccaaataggaacagctctggtctacagctccccgtgtgagcgacgcagaagatgggtgatttctgcatttccatctgaggtactgggttcatctcactagggagtgccagacagtggrcgcaggacagtgggtgcagggcgccgtgcgcaagcccaagcagggctaggcattgcctcactcgggaagtgcaaggggtcagggagttccttttcctggtcaaggaaaggggtgacagacagaacctggaaaatcgggtcactcccaccccaatactgcacttttccgatgggcttaggaaacggcgcaccacaagattatatcccgcacctggctcggagggtcctatgcccatggagtctccctgatggcaagcacagcagtctgagatcaaactgcaaggcggcagcgaggctgggggaggggcgcccaccattgcccaggctcgcttaagta

SEQ ID NO: 941382 - DNA, 659 bp, Homo sapiens
gatcttgactcactgcaacctctgcctcctgggttcaagcgattctcctgcctcagcctcccgagtagctgggactacagacacgtgccaccacgcccagctaatttttgtatttttagtagagacggggtttcaccatgttggccaggatggtctcggtctcttgacctcatgatccacccaccttggcctcccaaagtgctgggattacaggcttgagccaccgcccccagctatgcacaggattttaaagggaggacagaactgagcagasgggaggacctcagtgaagctgcactttctgctggattcaaactaaatctactctgggcagatcaaggaaaagcttgaaggatgtgacttaaggaagaactttctactgaaagagccaggagaccctaaaatgcattttctgaacagataatggagatgccttttgggtagagagcagcactcactggatttggggtcagccctgtcaataacccatggagaatcctgggcatgcccctcccctctctgaagttgggtccataaaagaggggactgaaagacatcccttcttctaaagcttggccgcacattagcatcacctgggagctgctaaaaatccccatgcttaggctgcaacctagacagtttctatcagaatctttagg

SEQ ID NO: 941383 - DNA, 650 bp, Homo sapiens
gtctgttggagtttgctagaggtccactccagaccctgtttgcctgggtatcagcagcggaggctgcagaacagcgaacattgctgaacagcaaatgttgctgcctgatcattcctctggatgcttcgtctcagaggggtacccggccgtgtgaggtgtcagtctgcccctactrgggggtgcctcccagttaggctactcaggggtcagggacccacttggggaggcagtctgtccattctcagatctcaaactccatgctgggagaaccagtactctcttcaaggctgtcagacagggacatttaagtctacagaggtttctgctgccttttgttcggctatgccctgcccccagaggtggagtctacataggcaggcaggcctccttgagctgcggtggtctccacccagtttgagcttccaggctgctttgtgtacctactcaagccgtagcaatggcgggcacccctgccccagtctcggtgcctccttgcagttctatctcagactgctgtgctagcaatgagcgaggctccgtgggcatgggactctccaagccaggcgcaggatataatctcctggtgtgccgtttgctgagaccattggaaaagcacagtgttagggtgggagtgacccgattttccaggt

SEQ ID NO: 941384 - DNA, 650 bp, Homo sapiens
gtctgttggagtttgctagaggtccactccagaccctgtttgcctgggtatcagcagcggaggctgcagaacagcgaacattgctgaacagcaaatgttgctgcctgatcattcctctggatgcttcgtctcagaggggtacccggccgtgtgaggtgtcagtctgcccctactagggggtgcctcccagttaggctactcaggggtcagggacccacttggggaggcagtctgtccattctcagatctcaaactccatgctgggagaaccagtactctcttcaaggctgtcagacagggacatttaagtctacagaggtttctgctgccttttgttcrgctatgccctgcccccagaggtggagtctacataggcaggcaggcctccttgagctgcggtggtctccacccagtttgagcttccaggctgctttgtgtacctactcaagccgtagcaatggcgggcacccctgccccagtctcggtgcctccttgcagttctatctcagactgctgtgctagcaatgagcgaggctccgtgggcatgggactctccaagccaggcgcaggatataatctcctggtgtgccgtttgctgagaccattggaaaagcacagtgttagggtgggagtgacccgattttccaggt

SEQ ID NO: 941385 - DNA, 664 bp, Homo sapiens
ggatatgctgattggttgagttagagatgaaatgatagggaatcattgctgcctcttgtgcaaaagtcagttcctgggtgggggccacaggactggttggtaggtccaagtgaggtcgtttgattgtcagaaatgcaaaaacctgaaaagatatctcaaaaggccaatcttagcttctacaatagtgatattatatgcaagagtagttggtgaagttgcaaatcttatgacctctggaacaatggctggtaattatttagaattcaagccccttgcatcctagtcacttggtggcctttcattaatttcagaacaacagttaagttttggagaagggctgttatcatttaaactataaacaaaatttctcccaaaattagcttgcctatgcctagaaagagcaaagatagccaacctgtggtgctagaagcaatatggagtcagttatgtcagatttctctactgtcataattttacaaakctggtttcaattactggaactttactagtttattttggtgatgtcataactcactgattttttataatccttttatttatatcttgacaaacgtacatttgaggaggtagccacctctttggcctttgcaggtattctttaatggtgatagacctttagtatttagtctagcatgggattcta

SEQ ID NO: 941386 - DNA, 709 bp, Homo sapiens
gcagtggcagccttgacctcctgggctcgagtgatcctcctgcctcagccccccaagtagctgggactacaggtgtgtaccaccacactggctaatttttgtattgtttatagagatgaagtttcaccatgctgcgcaggctggtcttgaactcctgggttcaagtgactcacccgccttggccttccaaaatgctgggattacaggtgtgaaccaccacacgcagctccaaatcattttttaatggctttattgagaagtaattcacacaccatacaattcttcaaagtgtacaatttaatgattttagtatattcatagagtcgtgcaaacatcaccrtagtctaattttagaacatttttatcaccccaaaaagaaacccataccaattagaagtcagtccctatccctgactcccctgagaccccagccctaggcaaccactaatatttctgtctttcgagatctgggtgttttgtgtaaaaggaatcatacaatgtgtagtcttttgtgactgactgctttaacttaggataatgtactgaagattcttccatgctatagcatgtttcagtacttcattctttttattactgaatgaaatttcatcctgtggtatatttattttgtagggctgtggtcaaagtaacacaaactgctgacttaaaacaacagaggtttattctctcgcagttaaggaagctagaa

SEQ ID NO: 941387 - DNA, 871 bp, Homo sapiens
ccctgactcccctgagaccccagccctaggcaaccactaatatttctgtctttcgagatctgggtgttttgtgtaaaaggaatcatacaatgtgtagtcttttgtgactgactgctttaacttaggataatgtactgaagattcttccatgctatagcatgtttcagtacttcattctttttattactgaatgaaatttcatcctgtggtatatttattttgtagggctgtggtcaaagtaacacaaactgctgacttaaaacaacagaggtttattctctcgcagttaaggaagctagaagttcaaaattaaggtgtcagcagggttgtgctcttcctgaaggctctaggggagaatcctaccttgcctcttctagttcctggtggttgttggcaatccatggcatttcttggtttgcagttgcacaacttcagtttctgcctccgtcttcaaatggtcaccttccctgtgtgtctgtctgcacattggattcgctcagcgtaagcctgtttcttctcctcctcctgtaaggacacaagtcatagttgattaagggcgcaccctacttcagtatgacctcatgttaacttgattacatctgcgaagaccctattttcaaataaggtcacattcacaggtcctgggggttagaccttcaacatatctttttggggaatacgattcaactcataacatayggatatgctacattttatttatctgttcatcaactaattgacatttgagttgtttccacttttgggctattatgaatagctatgaactttagtacggacatgtgttttcatttcccttgggtatatacctgccagtggcattgctaggttatataactgccagactgtgttc

SEQ ID NO: 941388 - DNA, 714 bp, Homo sapiens
ttgcatttccctaacagctcatgatattgaacatcttttcaagtgcttattggccatttgtataccctctatcaggaaatgtctattcagttagctggacttgtctgttcagttagcacacttgtagtcaagaggctgaggcagaaggatcacttgagcccaggagtttgaggctgtcgtgagctgtgattgcatcactgcactgcagcctgggcaacagagccagatctcgtctctaaaaaatatattaaaaaataaagaacagaaatacctattcagattcttagccagtttttaaattggtctgtctttttattatttggtggtaagagatttttgtgtattctagatacacacccttcccaaatatatgatttgtaaatattttttcccattctgtgggttgtcttttcgctgtctcgatggtygattcattcttttttttttataatttcaacttttattttaaattcagggtggtacatgtgcaggtttgttacatgggtaacatgttatgctggagtttggggtatggatgagtccttcactcaggtattgggtataggtcgtttttcagcctgcggcccccttccctgtcttcccctcccctctggtagtccccagtgtctgttgttcccgtctttatgtccatgtgtactgggtgtttagctgcacttacaagtgagaacacgcagtatttggttttctgttcct

SEQ ID NO: 941389 - DNA, 624 bp, Homo sapiens
aactgatctttctctaattttttttctcaatgagacttcatctcagaaaatggtaactatttaggccaaaaattttgaggttatctatttctcttttctcatacctctcaggaatttctgagggctttattttcagagaccagccaatacttaatttcttccatttcagccattctgccacaagtcaaaatcactttttgctgtaattactgcaatagactttgctggtctccctttcatctccccatcccctgcttttttctgtcctttttcttcttctctccttcactctctcttttcccttcttccttttccttcctctcccttgccttcttttctttttcgtctctatttctatttctaactaaactcagatcatgtgtgtcagcctctctacccataagccttcaatgacttcccatagaatcattttaaagccaaaatccttaaakctacatacagctacatgattttcatcctttccttttattactttgccttcatcttttctgaccattttgacctctttactatccctaaaaagacagaacatggtcctgttgtgtccagaggtggttccttctggtgggttcttggtctcgctgacttaaagaatgaagccac

SEQ ID NO: 941390 - DNA, 633 bp, Homo sapiens
aaagcaataacaaacaatggcaggctttcagtctctagttacaattctgtgttttaattaaaaggttatggtagaatgcctttttttttttttgagaagaaacatcagaagcagttgagggaccaggaggtggttcgtttaggaggcattcttctgggtgatttttaaaatattttccccagagttatctgactaattaacaataggttttgtcttagaagtccctctttgattttataacctggcataatttcttgtacttgtcttcaataagcccatcacacattttcatcatgttatctgcattagtccttttttgcattgttatmaaggtatacctgggactaggtaatttaaaatgaaaagaggcttaattggctcatggttctgcaggctttgcaggaagtatggtgctgccatctgcctgatttctgatgaagtctcagggaactttcaatggcagaagatgaagaggaaagccagtgtctcacacggctgaagcaggagcaaaagagagacagtgggaggggaggtgccacacacattgaaatcaccagatctcgtgagaactcattatcatgaagacagcaccaagccatgagtgatctgccccatgatccaaacacttcctgc

SEQ ID NO: 941391 - DNA, 633 bp, Homo sapiens
aaagcaataacaaacaatggcaggctttcagtctctagttacaattctgtgttttaattaaaaggttatggtagaatgcctttttttttttttgagaagaaacatcagaagcagttgagggaccaggaggtggttcgtttaggaggcattcttctgggtgatttttaaaatattttccccagagttatctgactaattaacaataggttttgtcttagaagtccctctttgattttataacctggcataatttcttgtacttgtcttcaataagcccatcacacattttcatcatgttatctgcattagtccttttttgcattgttatcaaggtatacctgggactaggtaatttaaaatgaaaagaggcttaattggctcatggttctgcaggctttgcaggaagtatggtgctgccatctgccygatttctgatgaagtctcagggaactttcaatggcagaagatgaagaggaaagccagtgtctcacacggctgaagcaggagcaaaagagagacagtgggaggggaggtgccacacacattgaaatcaccagatctcgtgagaactcattatcatgaagacagcaccaagccatgagtgatctgccccatgatccaaacacttcctgc

SEQ ID NO: 941392 - DNA, 637 bp, Homo sapiens
acaaacaatggcaggctttcagtctctagttacaattctgtgttttaattaaaaggttatggtagaatgcctttttttttttttgagaagaaacatcagaagcagttgagggaccaggaggtggttcgtttaggaggcattcttctgggtgatttttaaaatattttccccagagttatctgactaattaacaataggttttgtcttagaagtccctctttgattttataacctggcataatttcttgtacttgtcttcaataagcccatcacacattttcatcatgttatctgcattagtccttttttgcattgttatcaaggtatacctgggactaggtaatttaaaatgaaaagaggcttaattggctcatggttctgcaggctttgcaggaagtatggtgctgccatctgcctratttctgatgaagtctcagggaactttcaatggcagaagatgaagaggaaagccagtgtctcacacggctgaagcaggagcaaaagagagacagtgggaggggaggtgccacacacattgaaatcaccagatctcgtgagaactcattatcatgaagacagcaccaagccatgagtgatctgccccatgatccaaacacttcctgcctgaacccacctc

SEQ ID NO: 941393 - DNA, 763 bp, Homo sapiens
atcgtcccaacgagtgtagaggagacctgaagtctgtggctcctttcagcaggcaggttgtcctaagagtgtctgagtctggctgagtccaggatttttcttggctcagaagggaggaagtgcatgctgattggtccatgggcaaccatgggttagcctggaaaaagcaccataagttctcgctcctggttgtggactccacccagtactggcagcctggccccaaggcttctggccatccctgcttgaaggtgggatttcacaagggacccatctcttcctgcctaggaacctgcctgcctcctgccatcatcaacatgtcatctatggtgcccaggctgtttgcattgaggggcacctgcaggctcatgctgagccgccctcagcccactggcctccctcccatgcttgtcagtaatcaaagtctggaggggaccaaggcagcagggagctggcatgccagcatcactctgagcttgcgcacacgtggccaggtcatgrcagtgtctgggctcagccacaactttgctctgcactggagcaggctctgaaagccaagagaggccagggagcaggagcaggcacttcaagcctgcagagacagggggcttcccaggcccccaatggcacagggatgcccgagtccagacccactgctgggcatctgtagctgtgcccaggatcatggggctcccaccccatcaactcagtaaaggataaggatcctgcctgttcctggcccccaccagctctgtgtagtgca

SEQ ID NO: 941394 - DNA, 766 bp, Homo sapiens
gtctgagtattctacggtaaagtaaaggaaacagaagagtcaaaacaatttcgacaaagaagaacaaagttggaggactcatactagctgattccaagacttactataaaggcatagtaatccagagagtgtagtcttggcaaaaagatacatacctagattaatagaggcacaataacgactactaaacagacacacagatatatggccaatttattctggacaaaggtgcaaggcaattctaaggtgaaataacaaagttttctaaaactgattctagaacaattgaatgtccaaatgaaaataaatgaccctcaacccatatctcatacctcaaagacctaatattaagccctgaaatatcaaattactagaggcaaccactgaataaaaatctttttgatcttggaggagacttagacacaataccaaaagcatggactataaataaaaaaatttataaatttgactttatcaaaacktaaaacctttattcaattggctttgctaagaaaatgaaaagaaaagccataaattggaacaaagttttgtaaaacaaatatttaataagccatttgtatccagaatatattaagaaatctcaacaagcaatattatgaaaccacccagtaaaagattggacacagttttgaacagacagttcacaaatgaagatatatagcacaaatcaacacatgaaaaagtgctccacattattagtcattaggcaaattcaaattaaaaccacaatgtgatatactacatg

SEQ ID NO: 941395 - DNA, 576 bp, Homo sapiens
agtcagaacttgggggggtagagtccagtgatttgggttttaaggagctttccaggtgattcagacacatactctaaagtttgagaagtattgcatcacagcccaaggcatggtgaactcccaacttgctctccttttatcctttaatatttgtaatctctaggttgacatatgtggcttcatatctatatggactaggatttgttaagagcaattgtacatatattgtacattaacataattggtgtatttgtatatgtatgttgcctttttgttttttgttttgttttgttttgtttgagatggagtctcactctgtcatccaggctggagtgcagtggtgtgtgatctcagctcactgcaacctscacctcccaggttcaagcgattctcctgcttcagcctcctgggtagcagggactacagtcatgtggcaccaagcctggctaatttttcatatttttagtagagacggggtttcactgtgttagccaggatggtctcgatctcctgaccttgtgatccacccgcctcggcctcccaaagtgctgggattacaggcgtaagccaccgcac

SEQ ID NO: 941396 - DNA, 590 bp, Homo sapiens
ctctttctcccatagctagtattcatgggtccaggaatcaaagagtggaagtggcatcacataccatcacctttagtaaaccactagcaaaawtttcgtgtcctgttcctgcaacattatgttctgctggcctaggggtcttagttccagagggaggaatgctgccaccaggagacacatcaatgattccattaaactggaagttaagattgccatctgcacactttggattcctcctacctttaaaccaacagtctaagaagggagttacagggctggctgggatgattgacccagactgtcaagatgaaatcagcctactattccacaacaaaggtaaggaagagtacgcatggaatacaggagatccattaggccatctcttagggttaccattccctgtgattaaggtcaatgagaaactacaacagcccaatccaggcaggactacaaatgaccaagacccttcaggaaggaaggtttgggtcactccaccaggaaaaaaaccatgacctactaaggtgcttactgaaagcaaagggaatgcagaatgggtactataagaagttagtcatcaataccagctacga

SEQ ID NO: 941397 - DNA, 568 bp, Homo sapiens
atgtagatttggtcttttcacataatctcatgttttttggaggctttgtttgtttcttttcattcttttttctctaaacttctcttctcacttcatttcattcatttgatcttccatgactgacaccctttcttccagttgatcaaatccactactaaggcttgtgcattcatcacatagttctcctgccatggttttcagctccatcaggtcctttaaggacttctctgcattggttattctagttagccattcatctaatctttttccaggtttttaacttctttgygatggttcgaacttcctcctttagcttggagtaatttgattgtctgaagccttctctcaacttgttaaagtcattctccatccagctttgttccattgctggtgaggagctgcgttcctttggaggaggagaggcgctctgatttttagagtttccagtttttcttctctgttttttccccatctttgtggttttatctacctttggtctttgatgatggtgacgtacagatggggttttggtgtcgatgtcctttctgtttgttagttttccttctaa

SEQ ID NO: 941398 - DNA, 568 bp, Homo sapiens
atgtagatttggtcttttcacataatctcatgttttttggaggctttgtttgtttcttttcattcttttttctctaaacttctcttctcacttcatttcattcatttgatcttccatgactgacaccctttcttccagttgatcaaatccactactaaggcttgtgcattcatcacatagttctcctgccatggttttcagctccatcaggtcctttaaggacttctctgcattggttattctagttagccattcatctaatctttttccaggtttttaacttctttgtgatggttygaacttcctcctttagcttggagtaatttgattgtctgaagccttctctcaacttgttaaagtcattctccatccagctttgttccattgctggtgaggagctgcgttcctttggaggaggagaggcgctctgatttttagagtttccagtttttcttctctgttttttccccatctttgtggttttatctacctttggtctttgatgatggtgacgtacagatggggttttggtgtcgatgtcctttctgtttgttagttttccttctaa

SEQ ID NO: 941399 - DNA, 725 bp, Homo sapiens
gctacttgtgtatgctttatgaagttctcatgctgtgtttttcagctccatcaggtcatttatgttcctctctaaactggttgttctagttagtaattcctctaaccttttatcaaggttcttagcttctttgccttggattagaacatgcycctttagctcagcatagttttttttattacccatgttctgaagcctacttctgtcagtttgtccatctgattctccatccagttctgtgctcttgaaggagagacgttgcagtcatttggaggaaaagaggcactctggccttttgggttttcagcattttttgttgattctttctcatcttcatgagtttgtctagttttggtctttgaggctgctgactcttgcatggggttttttttttggcagcttttttgttgttgatgctgttgttgttgctttctgcttgtttgcttttctttcaatagtcaggtcccgcttctgtagggctgctgcagtttgctgggggttcacttcaggccctattcatctgatttactcctgtgcctggagatattactcaaggagactggagaacagtaaaggtgggtgcctgctccttcttctgggaactctgaccttgaggggcaccaatctgataccagtaagatcactccagtgtagggtgtctgacaacccctgttggagggtctcacctagttgggtggcacagggaacaggacccatttaatgaa

SEQ ID NO: 941400 - DNA, 725 bp, Homo sapiens
gctacttgtgtatgctttatgaagttctcatgctgtgtttttcagctccatcaggtcatttatgttcctctctaaactggttgttctagttagtaattcctctaaccttttatcaaggttcttagcttctttgccttggattagaacatgctcctttagctcagcatagttttttttattacccatkttctgaagcctacttctgtcagtttgtccatctgattctccatccagttctgtgctcttgaaggagagacgttgcagtcatttggaggaaaagaggcactctggccttttgggttttcagcattttttgttgattctttctcatcttcatgagtttgtctagttttggtctttgaggctgctgactcttgcatggggttttttttttggcagcttttttgttgttgatgctgttgttgttgctttctgcttgtttgcttttctttcaatagtcaggtcccgcttctgtagggctgctgcagtttgctgggggttcacttcaggccctattcatctgatttactcctgtgcctggagatattactcaaggagactggagaacagtaaaggtgggtgcctgctccttcttctgggaactctgaccttgaggggcaccaatctgataccagtaagatcactccagtgtagggtgtctgacaacccctgttggagggtctcacctagttgggtggcacagggaacaggacccatttaatgaa

SEQ ID NO: 941401 - DNA, 523 bp, Homo sapiens
cgctggccgggctggaattccaagtcagtagatcttatcttgtgagctgccgtgtgagtgcagcctgcagaacaccacttggctcccgggcttcagtctccttcttacggggatgcacagatgatctcctgtctcaccagwattcccggggccagagtacacaaaaaactcctgggtctctgtgcatgcctgagtggctgcaaagagtccacaaagctctgtgctttggacccaaggccctcgtggtgtgggcttacaaggggatctcctgatccatgggttgcaaagatccacgggaaaagcatggtttcctgggtggggtcccacaatcactcacagccttccttggctggggttggggctcccctgcttccacactactcaggagtgggctgtcgccccaacctccctttcctcgctctccatgggtggtgccaactgcccagtcagtcccaaccgatttgatctcttaaaagacattttttaatgttagaatcatttgccttctagaaagcctatgaga

SEQ ID NO: 941402 - DNA, 616 bp, Homo sapiens; identical to SEQ ID NO: 937993

SEQ ID NO: 941403 - DNA, 671 bp, Homo sapiens
attatttgacatacaaatattgaatttaaaaaatatgacaagtgtcagtctatacactgcaaatgagtttgaccttcatttggatttcttgtctgccaaagtaaataaatgaggtcagttaataggcaatttgaattattcttatagaaatgtatatacatagggtatgatatgtccataaaacatcctaggatagttaattataagaatcttttaaatcaagartcaatcttttgcatttataagttctttgaccttatcaaagctctggcatataggaagcactaaatcaatagttattgaataagtaaaatattcattaatttcattttcatatcaagcttgacaaatgcaatgggataaaaaaatcaaacatattttcaagcatcttcataaatgacagcacaatagcatgataaagtttgaaatatgtgaagatttcttctatgttatatatttgtcatgattgattaacttgaagatttgtgttacaaactattaatttcatttaaagcatattatttcattttatggtgccaatttcctgttgtgaattatttttgcttttgacataattacctggttattttggcattgtgtaagtgtaggtctttctttgccagccaagttccctttctttgccaggaaaggcatgggaccacttcagggga

SEQ ID NO: 941404 - DNA, 671 bp, Homo sapiens
attatttgacatacaaatattgaatttaaaaaatatgacaagtgtcagtctatacactgcaaatgagtttgaccttcatttggatttcttgtctgccaaagtaaataaatgaggtcagttaataggcaatttgaattattcttatagaaatgtatatacatagggtatgatatgtccataaaacatcctaggatagttaattataagaatcttttaaatcaagaatcaatcttttgcatttataagttctttgaccttatcaaagctctggcatataggaagcactaaatcaatagttattgaataagtaaaatattcattaatttcattttcatatcaagcttgacaaatgcaatgggataaaaaaatcaaacatattttcaagcatcttcataaatgacagcacaatagcatgataaagtttgaaatatgtgaagatttcttctatgttatatatttgtcatgaytgattaacttgaagatttgtgttacaaactattaatttcatttaaagcatattatttcattttatggtgccaatttcctgttgtgaattatttttgcttttgacataattacctggttattttggcattgtgtaagtgtaggtctttctttgccagccaagttccctttctttgccaggaaaggcatgggaccacttcagggga

SEQ ID NO: 941405 - DNA, 797 bp, Homo sapiens
cagaaaatcactttattgaaaacaaatatatttgtttcaggtagtattctgttccattccagtccaaaatactaatatactgactgttaatgaccaaagtaatgtattattattattttatttatttatttatttatttatttatttatttatttatttatttctgagacggagtctygctctttcacccaggccggagtgcagtggcgctatctcggctcactgcaagctccgcctcccgggttcacgccattctcctgcctcagcctcccgagtagctgggactacaggcgcccgccacgacacccggctaattttttgtatttttagtagagacggggtttcactgtgttagccaggatggtctccatctcctgacctcgtgatccgccctcctcggcctcccaaagtgctgggattacaggcgtgagccaccgcgcctggcatattatttatgtaaacagtataggcacaagaacaattaaaatttaaaattaggtaatacatgttattgggtaaccactgtagaccagctccaggtaagataatggatcaaaccagccctctcccaatagatattacatagtattattggactccccaggaaacttgctgctctttttctccttctgtacagctccatacctttcacaagcgggaggagttttaagtcatgtattaggtacatgactcacatgtcttgtcttttgcatgagatttttgaatactccttgtataaccatggttacactgatcaagctcagtccccttctctgtctcttcttcccttccctctt

SEQ ID NO: 941406 - DNA, 500 bp, Homo sapiens
ggaaagtgggaaactgcttcactcgtacttcagccctaacggcatcagcccatgcttgacttgcactgtatctccagtagtggcagcttgtgttccacacatgctttagtccacatgcagcagtccacagcagtaacagccataggcaggaaactctatctgggcacgtgaaagtgcacagtggcttcactgctggaggcagttgcagcctgtggcctgccctttggccctagcatcagacaatttggaaaagaggaagtcaaattgttcctgtttgcagacgacatgactgtatatttagaaaaccccattgtctcagccyaaaatttccttaagctgataagcaacttcagcaaggtctcaggatacaaaatcaatgtgcaaaaatcacaagcattcttatacaccaataacagacaaacagagagccaaatcatgagtgaactccaattcacaattgcttcaaagagaataaaatacctaggaatccaacttacaaa

SEQ ID NO: 941407 - DNA, 729 bp, Homo sapiens
ttgttttcatctcactcgactctatcatcagtatttgccatatgatcactcctactgtgtctggaattggtgggttcttggtctcactgacttcaagaatgaagccgcggaccctcgcggtgagtgttacagttcttaaggtggcgtgtctggagtttgttccttctgatgttcggatatgttcggagtttcttccttctggtgggttcatggtctcgctggctcaggaatgaagctgcagaccttcgcggtgagtgttacagctcataaaagcagcgtggacccaaagagtgagcagtagcaagatttattgcaaagagcaaaagaacaaaacttccacagtgtggaaggggaccygagtgggttgccactgctggctcgggcagcctgcttttattcttttatctggccccacccacatcctgctgattggtagagccaagtggtctgttttgacagggcgctgattggtgcgtttagaatccctgagctagatacaaaggttctccatgtccccatcagattagttagatacagagtatggacacacaggttctccaaggccccaccagagcagctagatacagagtgtccaatgggtgcactcacaaaccctgagctagacacagggtgctgattggtgtgtttacaaaccttgagctagatacagcgtgcccattggtgtatttacaatccctgcgctagacataaatgttctccacgttccca

SEQ ID NO: 941408 - DNA, 729 bp, Homo sapiens
ttgttttcatctcactcgactctatcatcagtatttgccatatgatcactcctactgtgtctggaattggtgggttcttggtctcactgacttcaagaatgaagccgcggaccctcgcggtgagtgttacagttcttaaggtggcgtgtctggagtttgttccttctgatgttcggatatgttcggagtttcttccttctggtgggttcatggtctcgctggctcaggaatgaagctgcagaccttcgcggtgagtgttacagctcataaaagcagcgtggacccaaagagtgagcagtagcaagatttattgcaaagagcaaaagaacaaaacttccacagtgtggaaggggacctgagtgggttgccactgctggctcgggcagcctgcttttattctyttatctggccccacccacatcctgctgattggtagagccaagtggtctgttttgacagggcgctgattggtgcgtttagaatccctgagctagatacaaaggttctccatgtccccatcagattagttagatacagagtatggacacacaggttctccaaggccccaccagagcagctagatacagagtgtccaatgggtgcactcacaaaccctgagctagacacagggtgctgattggtgtgtttacaaaccttgagctagatacagcgtgcccattggtgtatttacaatccctgcgctagacataaatgttctccacgttccca

SEQ ID NO: 941409 - DNA, 566 bp, Homo sapiens
tccatctggccctgggtttttttttattggtaagctattaattactgcctcaatttcagaacttgttattggtctattcagggattcgacttcttcctggtttagtctttggagggtgtatgtgttctggaatttaccaatttcttctagattttctagtttattkcgtagaggtgtttatagtattctctgatggtagttggtacttagcggggtcagtggtgatatcctctttatcattttttattgtgtctatttgattcttctctcttttcttctttattagtctagctagaggtcgtctattttgttaatttttttttaaaaaaccagctcctggattcatacattttttgaaggctttttcatgtctctaatctccttcagttctgctctgatcttagttatttcttgtcttctgctagcttttgaatgtgttttctcttgcttctctagttcttttaattgtgatgttagggcatcgatttgagatctttctagctctctgacatggggattctgtgctataaatttccctcttaacactgctttagctgtgtcccaga

SEQ ID NO: 941410 - DNA, 742 bp, Homo sapiens
tccactaaaaatatacaaaaattagctggccgtggtggcatgcgcctgtaaccccagctactcagaagggtgaggcaggagaatcgcttaaacctaggaggcagaggttacagtgagccgagatggcaccattgcactccagcctgggtgacaagagcaaaactctgtctaaaaataataataataatcatagaaatatataactagctcctcgcgcccaccagttcacagcatcttgcttaggatgggtctaaagtgtkctggaccatggaaatagtaactagctcctcatgcccaccagttcacagcgcatagcttaggacagggctgaagtgtgctggaccacagagacccctctttttagactttactgctaaagtcctgagagaggcattttggaaaagcagtctatggcctatggaggcagagtgacatggttcttcctgcaggtggtgttctgtcaagaaaagctgagctgctcagagaaactttcccagttgaagctttctaaagctttgcccctctgttaataggcaaatcccccacatgacaaatccactgttgctcttggctaaccctctgtgaattcatgccctaaaagaagcaggttataaaagggagggagacagaacaagggagggatgccactgaggtggggaggtagtaaccagagactgcaggaaacaccaccagtgccatactcctgatccgactccagagggagtgtgcggaccactggcca

SEQ ID NO: 941411 - DNA, 629 bp, Homo sapiens
gagcatgcggaagtgagagcctcacaatcctgaatttcagtgttcagtagacttaagcaacttatttatcttagcttatgaatatcaagtttgagaaatatatatatatatatatatatatatatatatatatatatatatwtttttttttttttttttttttgagacggagtcttactttgtcacccaggctggagtgcagtggcgcgatcttggctcactgcaagctctgcctcccgggttcacgtgccattctcctgcctcagcctcctgagtagctgggactacaggcacccaccaccacacccagctaattttttgtgttttttttagtagagacggggtttcactgtgtcagccaggatggtctcgatctcctgacctcgtgatccgcccgccttggcctcccaaagtgctgggattacaggtgtgagccaccacacccggcctcaagtttgagaaatttttaattgctctcttagaaagttagtagtattagatagtggttaagagcaaggactctggagccagcctgctgaggtttgaatcccaactctgccatttactagctgtgtgttcttgaagcagattacctaacttctctgtacctctgttttccatccataaaa

SEQ ID NO: 941412 - DNA, 646 bp, Homo sapiens
actcgaacctgggtgacagagtgagaccctgttcccccaaaaacaacaaacaaaaacaaggaagagtgtaaggatgaaggtgagcatgagcattacattatgttatagtagttaattaaaaagatgtaattcttactgtatatgcacctctatttgtcagggttctctagagggacagaactaataggatatatatataaaggggagtttatttattaagatatatatcttaataagatctatattaatatatattattatataattatatactattattcatattattaaatatatataatatattaaatatataatatagtataattgtataatattaacaatctaattratattatataattatactaatatataatatatacatttaatatatatttgatatatatatgtaaaggggaggttattaagtattaactcacacaatgacaaggtcccacaataggccatctgcaagctgaggagcaaagaaagctagtctgagtcccaaaactgaagaacttggagtctggagtctgatgtttgagggcaggaagcatccagcatgggagcaagctgtaggctagggggctaggccattttagtcttttcacgtttttctgcctgctttctattttagccacag

SEQ ID NO: 941413 - DNA, 646 bp, Homo sapiens
actcgaacctgggtgacagagtgagaccctgttcccccaaaaacaacaaacaaaaacaaggaagagtgtaaggatgaaggtgagcatgagcattacattatgttatagtagttaattaaaaagatgtaattcttactgtatatgcacctctatttgtcagggttctctagagggacagaactaataggatatatatataaaggggagtttatttattaagatatatatcttaataagatctatattaatatatattattatataattatatactattattcatattattaaatatatataatatattaaatatataatatagtataattgtataatattaacaatctaattaatattatataattatactaatatataatatatacatttaatatatatttgatatatataygtaaaggggaggttattaagtattaactcacacaatgacaaggtcccacaataggccatctgcaagctgaggagcaaagaaagctagtctgagtcccaaaactgaagaacttggagtctggagtctgatgtttgagggcaggaagcatccagcatgggagcaagctgtaggctagggggctaggccattttagtcttttcacgtttttctgcctgctttctattttagccacag

SEQ ID NO: 941414 - DNA, 825 bp, Homo sapiens
ggctcctgagtctggtggggacttggagaacctttatgtctagctaagggattgtaaatacaccaatcggcactctgtatcttgttcaaggtttgtaaacacaccaatcagcaccctgggtctagctcagggtttgtgaatgcaccaactggcactctgtaactagttactctggtggggacttggagaacctttatgtgtagctaagggattgtaaatacaccaatcagcaccctgtgtctagctcagggtttgtgaatgcaccaatcgacactctgtatctagctactctggttaggacttagagaacmtttgtgtccacactctgtatctggctaatctagtggggacgtggagaacttttgtgtctagctcagggattgtaaatgcaccaatcagcaccctgtcaaaacggaccaatcacctctctgtaaaacagaccaattggctctctgtaaaatggaccaatcagcaggatgtgggtagggccagataagagaataaaagcaggctgcccgacccagcagtggcaacctaccctgggcaccattcacactgtggaagctttgttctttcactctttgcaataaatcttgctgctgctcacgctttgggtccgcactgctgtaacacttatggcaaagggctgcagcttcactcttgaagccagggagaccacgaacccactgggaggaaagaacaactccaaacacactgccttaagagctgtaacactcactgcgaaggtctgcagcttcactcttgagccagggagaccacaaacccaccagaaggaagaaactcaacacatccgaacatcagaag

SEQ ID NO: 941415 - DNA, 590 bp, Homo sapiens
gaagccaaaccgaggcaggtttttggagtttacttacagtcttaaggttcttgggcctgccaggaagtgacagttttcattcactccctgaaaagctgggaactcctgaagccaggcattttattcacattcttaaatatgacatttcagtccaaaccttagtaatataaccaatgtttcccattgcatcttgcttataaagagagagcacatttttttttttttccctgagacggggtcttgctgtcttacccaggctggagtgcagtggcgagctcttgactcactgcagcctctgccccccaggtttaagcaattctcctgcctcagtctccagagtaactgggattacaggcrtgtgccaccatgcctggctaattttttgtatttttttttttagtagagatggggtttcaccaagttggccaggctagtctgtgaactcctgacctcgtgatccaccctccttggcctcccagaatgctggaattacaggcgtgagccactgtgcccggctgagagagcagattttttactgaacttacattacataaaaataagaatactcattaatggtttctaaattttgt

SEQ ID NO: 941416 - DNA, 629 bp, Homo sapiens
tgtcttcctatttgaataccctttctttctttctcttgcctgattgccttggccagaacttccaatactattttgaataggagtggtaagagaggtcatccttgtcttgtgtcatttttcgaagggaatgcttccagcttttgcccattcagtatgatactggctgtcggtttgtgataaatagctcttattattttgagrtacattccatcaatacttagtttattgagcgtttttagcatgaagtggtgttgaattttatcgaaggcctttttgcatctattgagataatcatgtgtgttttgtcatcgttctgtttatgtgatggattatttttattgatttgcatatatttaaccagccttgcatgccagggatgaagccgacttgataatggtggataagcttttttatgtgctgctggattcggtttgccagtattttattgaggatttttgcattgatgttcatcagtgatatgggcctgaaattttctttttttgttttgtctctgccaggttttggtatcaggatgatgctggcctcataaaatgagttagggaggactccctctttttcaattgtttggaataatttcagaaggaatggtacagttcctctttgtacct

SEQ ID NO: 941417 - DNA, 757 bp, Homo sapiens
tttacaattgttatatcctcttcctgcattgattccttcgtgattatgtaatgacctttttggtctttttttaaaagtcaatttaatcttatataagtatagttcttcctgctttgttatttatttatttatttgagacagagtctttctttgttgcccaggttggtatgcagtggagcgatctcggctcactgcaacctctgcctcccgggttcaagcgtttctcctgtctcagcctcctgagtagctgggattacaggtgtgcaccaccacacctggctaatttttgtatttttagtagagatagggtttcaccatgatggccaggctggtcttgaactcttgacctcaggtgatctacccacctgggctcctaaagtgctaggattacaggtgtgagccactgcgccccacccctgctttgtttttatttccatttgcatggaatcttttttgcatcccatayctttaagtctgtcttggaatctttttcatcctatacctttcagtctgtctgtctttacatgtaaagtgagttttttgtgggcaaaatatagttgggatttttaaaaagaaatccgttcaatcactctatatctttaatttgggaatttaataacagtcaagattattgatgatacattgaggacttactcctgttatattattgattgttttttgattgttttgaatttcctttgttctcttttttcctctcttgtttatctttgcagttcggttgatgtctgtagtgata

SEQ ID NO: 941418 - DNA, 594 bp, Homo sapiens
  misc_feature 594: n = A,T,C or G
tgtaaattagtcagggggaagatgaatattttccagattaaatgcaaggttaaggacctatgctgattttctccattaagataccacatctgaaacaacaactaatattggaataatctctggttactttaattatatgtgcagttagaatctctaagatcattatttactgcaaaggaaagcaggaaaattaaatagaattctgagatgaatcaccattctcttgcatttttaacccttcaytgtggtcacagtctctgtggtttgtccagagccacagtactgctctctgtgtacaatacttagagcagagtcatttcatgccgttgacttttctctccctactgtgacagtcttcactccttggttcagagagtcagtacaggggttctgtcagttaccaagtacagctactcaaattatatttaggaactgaggaaataaccactgtgatccaaacctctgccaaaactccattcatcacctgacgacctggtgtgattaggctttgtgtgcccacccaaatcttatcttgaattgtgatccccaaaattcccaggtgtcaagggagagaccaggtggaggtaattgaan

SEQ ID NO: 941419 - DNA, 580 bp, Homo sapiens
tggatcattttttacccagatccctacatatgggtaaaaatccaaaggatttgaaatcatatcagagcgatatctacacttccatgtttaatgcaacattctttaccatagccaatatatggaaccaaacaatgtgttcatgaatgaataaagaaattgtgtatatatacamaataaatattattcagttttaattaaaagggaaattctgtcattcgagagcaacatggatgaacctggaggacataatgctaagtgaaaggcaggcccacaaaggcaatccaggcatataaagacaattattgcatgttctcacttgtatgtggaatctaaaacaaattcacagaagcagagagcagaacggtggttaccagtggctggggctaggggggaatgaggagatattggtcaaagggtacaatgtttcagttaggaggaataagtgatgagcatttgaggtgatagatatgttaataagcgtgattcattaattccatattgtatacatgtgtcatagcatgacattgtaccccataaatatataaatatatacaatgatctttgtcaatattctaaaaga

SEQ ID NO: 941420 - DNA, 573 bp, Homo sapiens
gtatccacattgaaatttcatcttctgttgtagtttctgtaatccccacatgttgtgggagggaccaggtggagataactgaatcatgggggtggttttcctcatcctgctctcctgatagtgagtttgttatcacgagatcacatggttttataaggggcttccccttcactgggctctctttctttctctagctgccatgtgaagatggacatatttgcttccccttctgccatggatgttaagtttcctgaggcctctccagccatgcaaaactgtgagtcaattaagcctcttttatttataaattaccyagtcttaggtacgttttattagcagtgtgagaacagactaatacaggatattggtactgcagagagtggagtgctgctataaggatacccaaaaatttgaagtggctttggaactggttaacaggcagaggtgggaagaggttggagggcttagaagaagacaagataatgtgcaaaatttggaacttcctagagacttggagggctcggaagacaagaagatgtgggaaagtttggaaattcctagaaacttgttgaa

SEQ ID NO: 941421 - DNA, 800 bp, Homo sapiens
gctgaccacttcgtgtgatgaggttggaggtctctgccacctccctgtgtgtctcggcatgtcctcaggcctcgtgggggggctcccttgtcctggtctcatgcagaggaaggacgtggtgtgttcagagtcagcttagtggtggcacatagtgactgcccacccagtggaagctgctacctttgcctctttggaccatcgatcctctgttcaggacctcacttcctggaaactttttttattttttgagatggagtcttgctctgttgccaggctggagtacagtggcacgatmttggctcactgcaacctctgcctcctgggttcaagtgattctcctgcctcaggttcccgagtagctggaactacaggcgcgtgccatcacacctggctaatttttgtatttttagtagagacatggtttcatcatgttggccaggatggtctccatctcttgacctcgtgatctgccggccttggcctccccaagtgctgagattacaggcatgagccaatgcgcccggctggaaacttctgtaccgcaggtcaagcccagcaggaaagtgagaactgctcttttctttatttctttccgtcttttttttttttttttgagacagagtctgactctgtcatccaggctggattgcagttttgcgatctcggctcactgcaacttctgcctcctgggttcaggcgattcttgtgcctcagcctcccaagtagctgggactacagttgcacaccaccacacctggctaatttttgtatttttagtagagatagggtttcaccatgtt

SEQ ID NO: 941422 - DNA, 800 bp, Homo sapiens
gctgaccacttcgtgtgatgaggttggaggtctctgccacctccctgtgtgtctcggcatgtcctcaggcctcgtgggggggctcccttgtcctggtctcatgcagaggaaggacgtggtgtgttcagagtcagcttagtggtggcacatagtgactgcccacccagtggaagctgctacctttgcctctttggaccatcgatcctctgttcaggacctcacttcctggaaactttttttattttttgagatggagtcttgctctgttgccaggctggagtacagtggcacgatcttggctcactgcaacctctgcctcctgggttcaagtgattctcctgcctcaggttcccgagtagctggaactacaggcgcgtgccatcacacctggctaatttttgtatttttagtagagacatggtttcatcatgttggccaggatggtctccatctcttgacctcgtgatctgccggccttggcctccccaagtgctgagattacaggcatgagccaatgmgcccggctggaaacttctgtaccgcaggtcaagcccagcaggaaagtgagaactgctcttttctttatttctttccgtcttttttttttttttttgagacagagtctgactctgtcatccaggctggattgcagttttgcgatctcggctcactgcaacttctgcctcctgggttcaggcgattcttgtgcctcagcctcccaagtagctgggactacagttgcacaccaccacacctggctaatttttgtatttttagtagagatagggtttcaccatgtt

SEQ ID NO: 941423 - DNA, 630 bp, Homo sapiens
attgaaaatagagctaccatatgatccagcaattctgcttctaggtgtataccccaaagaattgaaagcagaatctcaaggagatgtttgtacactcatattcatagtagcattattcataatagcggaaacgtggaagcaaccaacccaagtgcccatcaayagtgaatggataaacaaaatgtgatacatacatgcaatgaaacattatttaaccttacaaggaaattttgacatgtgctaccacatggatgaaccttgagaatatgatgctaagttaaattagccagttaccaaaagataaatacagtagattccactcatatcgaggtacttagtcatcatatttatagagacagaaagtagaatggtggttcccagggcctgggattagggaggggaagtgaggagctgtttaatggatacagagtttcagttttacaagaggaaaagagttctgtgggaggatggtggtggatgataacacaacaatgtgaatgtacttaatgctactgagctgtacacttaaagataatcaaggtagtaaattttagattatgtgtattttatcacaatataaaaaacaagaagaagcagggtagatttaagagaaaagagtctgtgagccaa

SEQ ID NO: 941424 - DNA, 630 bp, Homo sapiens
attgaaaatagagctaccatatgatccagcaattctgcttctaggtgtataccccaaagaattgaaagcagaatctcaaggagatgtttgtacactcatattcatagtagcattattcataatagcggaaacgtggaagcaaccaacccaagtgcccatcaacagtgaatggataaacaaaatgtgatacatacatgcaatgaaacattatttaaccttacaaggaaattttgacatgtgctaccacatggatgaaccttgagaatatgatgctaagttaaattagccagttaccaaaagataaatacagtagattccactcatatcgaggtacttagtcatcawatttatagagacagaaagtagaatggtggttcccagggcctgggattagggaggggaagtgaggagctgtttaatggatacagagtttcagttttacaagaggaaaagagttctgtgggaggatggtggtggatgataacacaacaatgtgaatgtacttaatgctactgagctgtacacttaaagataatcaaggtagtaaattttagattatgtgtattttatcacaatataaaaaacaagaagaagcagggtagatttaagagaaaagagtctgtgagccaa

SEQ ID NO: 941425 - DNA, 820 bp, Homo sapiens
tcctacaggattcacacacatctcaacccagagttcagggccatagtgaactaccaggctaggcacacacatggagagaacaaagtcaatgtttcttagatgtttactaggtactcagcactttactataagctttttatttcttttactcctcacaataactccgtgaaatggttactacttttatcccaatttacaggcaaggaagctgaagattattaagaggtaaacaggttggctgggcatggtggctcacacctgtaatcccaacactttgggaggctgaggcaggatgatcacttgaggccaggagtttgagaccagtctaggcaacatagcaagactctgtctctccaaaaacgtttttttaaaattagccggacgtggtggtgtgtacctgtagtcccagctactcaggaggmtgaggtgggaggatcactggagcccaggaggttgaggctgtagtgagccatgatcacaccactgcactccagcctgggcaacagagtgagaccccaactcaaaaaaaagaaaatagctaaaacaggttgtccaaatcacacagccagtaagtggcagagctggggtttgcatttaggcagtccagggcccccactgttagcctctctatacctatcatgggtttaaaatttgtccacaaagtctttgatactcttcctttcaagaggtgaagcctagttcctcccttcagacatgggctggacttagtgacttgcttctaacaaatagaatgtggtagaaatgacagtggatgactttcaacattaggatattaaaggtattattagttccttctttt

SEQ ID NO: 941426 - DNA, 763 bp, Homo sapiens
aatgccatctgtctctgctaaaacaaagcgtagagtcacctttgctccagttcccaacaagttcctgatctccatctgagaccacctcagcctagaccttattgttcatatcaccatcagcatttttgtcaaagccattcaacaggtctctaggaagttccaaactttcccacattttcctgacttcttctgagcccttcaaactgttttaacctctgctcgttacccagttccaaagttgcttccacattttgggtatcttttcagcagcaccccactctactgataccaattcactgtattagtccattttcgcacctgctgcaagactgggcaatttataagagaaaagggtttattggacttacagttccatgtggctaggaaggcctcacagtcatggcagaaggtgaaaggcacatctcacatggtggcagacaagagaagagaaagagagcttgtgcgggggaccacctctatttaaaaccatcagatctcatgagacttattcactatcacaagagcagcaygggaaagacttgctcccatgattcaattacctcccacccagtccctcccacaacacatttgaattcaagatgagattgagtggagacacagccaaaccatatcaaggggccagggtggaaacagggggaccaaccaggaggccactgccatggcccaggtgagggacaagaactgcttggacaagcatagtaacagcagagacatgggaggtggctgactttcagaaatataa

SEQ ID NO: 941427 - DNA, 617 bp, Homo sapiens
gaatcaacctctctctctctctctgacctatcttccttttacttgcccaagacaggaatctaattgtgactcaaaagaccctaattccagagagggtcctgtcctattcctggagaaagggatgctgcacccagagtccaagaagaatctgatcggacaggccctgtcaggttttcccactcactctattagtatgcaattatattcttttcacccaatcacatttctacttggttgtgaatcatgcccaagtaacaaagtttccataaaaacccaaaaggacagtgttcacagagcttctgaatagctgaggatctggcagttcctggagagtggtgccccagggagaggatggaacctcagcaccccacccccaccttgtcytatgcatctcctcattgatatcctttgtaatactctttaggataaattggtaaatgtaagtaactgcttccctcagttctttgagctgctttggcaaattattgaagcacaaagagggagtcatgggaaccccaacttgcaaccagtcagctggaagttccagaggccagatttgtgactggtatctggggtatgggacagtcttggggactgacccttcaacttgtgggatc

SEQ ID NO: 941428 - DNA, 636 bp, Homo sapiens
tgccttaaatgatgacattaccttgtgaaattccttctcctggctcatcctggctcaaaagctcccccattgagcaccttgtgacccccacccctgccagccagagaacaaccccctttgattgtaattttccactacctacccaaatcttataaaacggccccacccctatctcccttcactgactatcttttcggactcagcccgcctgcacccaggtgaaataaacagccttgttgcttacacaaagcctgtttggtggwctcttcacatggacgcgcatgacacttccactcttcctgcccctttccaaaggcagaggagcctcccatggccaccattgccacaggcccacgaggagtaccgccagactaccatttaaggcccaaggcctctccagtcagcttgtggtgaatgctgcccagcttgcgactcacccttcagggcagtgcactccccagtggcccagggcaggtctagaaaagccatccaagagccaagtcctggaataaaggaccccaagaggtcacttggtgctctagaccctgtggctgagctggtacctaaggtgcaagacaaagtcccctttgcttttactttcacttttctcaagtggaaggcatcttgccccatagc

SEQ ID NO: 941429 - DNA, 637 bp, Homo sapiens
gtttcctgactttttttttttttttttttttttttttttgagacagagtctctctctgtcacccaggctggagtgctgtggtgcaatctcggctcactgcaagctctgcctcccaggttcacaccattctcctggctcagccttccgagtagctaggactacaggtgcctgccaccacacygggctaatttttttgtatttttagtagagacggggtttcaccatgttagccaggatggtcttgatctcctgacctcgtgatctgcctgtctcggcctcccaaagtgctgggattacaggcgtgagtcactgcacccagcctgtttcctgactttttaatgatcactattctaactggcgtgagatggtatcttattgtggtttttatttgcatttctctaatgaccagtgatgatgacatttttttcatgtttgttgcctgcataaatgtcttctgttgagaagtgtctgctcagatccttcgcccactttaatgaagttgtttgtttttttcttctaaatttatgttctttgtagattctagatattacccctttatcagatggatagattgcaaaaattttctcccattctgtaggctgcctgttcactctgatgttagtttcttttgctgtgc

SEQ ID NO: 941430 - DNA, 691 bp, Homo sapiens
tggaggggagaggcagagacacacagccatggccccaggcagaggaagaggaagaggggaggtcaggaaggttggggagagacgaagagagaggggagaggataatgggaaagtggaagagaggaaagtgggacagggaaagagagaagtaagggagcagagaaagaggaaaagcaggkgaaaaggatgaggcagaggcacttggaggaggaatgaagccagggcctgggtctcatgagatgaaaaggtcaaccacggcccctctaaagaaggctgccaacatcctttggcccatgagtagagaagtattttaaaatataagcttaatgagggcagggactttttaaaaattgtttctttttcttttggtgttgtatcttcagctcctagaatcatgcctgcccaggaatttaatagctatttgttgaatgataatattttagcgctggcagtcaactaaccacattttagacaagtagcttctgtgggctccatcctgcactcttgacaatggggagactccagagagagggaccaggctgcctggctgtttttgaggatcacagcttggctgggcaaaacgggctgagagaggggaggtaaagggaatttgcatgacaacgcacagtcagcgggtgattggctggctctggctacaggcagcacaggaggaacagcccagagaagcggg

SEQ ID NO: 941431 - DNA, 691 bp, Homo sapiens
tggaggggagaggcagagacacacagccatggccccaggcagaggaagaggaagaggggaggtcaggaaggttggggagagacgaagagagaggggagaggataatgggaaagtggaagagaggaaagtgggacagggaaagagagaagtaagggagcagagaaagaggaaaagcaggggaaaaggatgaggcagaggcacttggaggaggaatgaagccagggcctgggtctcatgagatgaaaaggtcaaccacggcccctctaaagaaggctgccaacatcctttggcccatgagtagagaagtattttaaaatataagcttaatgagggcagggactttttaaaaattgtttctttttcttttggtgttgtatcttcagctcctagaatcakgcctgcccaggaatttaatagctatttgttgaatgataatattttagcgctggcagtcaactaaccacattttagacaagtagcttctgtgggctccatcctgcactcttgacaatggggagactccagagagagggaccaggctgcctggctgtttttgaggatcacagcttggctgggcaaaacgggctgagagaggggaggtaaagggaatttgcatgacaacgcacagtcagcgggtgattggctggctctggctacaggcagcacaggaggaacagcccagagaagcggg

SEQ ID NO: 941432 - DNA, 594 bp, Homo sapiens
gcccattgagagaaaagagagaaaaaaaatggctttgctattgtgaggttattgctgtggcctataatccaaatttcctgagattatgataatctggagtctggtagggatggaaaagtgatgctattgtatgtgagcaaagataggtggtgggaaccacagtgaaacataagattgggctcaccaggaagtgtgaatccccagaccatgcacaaacaactgttgaaataatccctctgccaggagtggtggctcacacctgtaatcccagcactttgggaggccgaggcaggcggatcacctgaggtaaggagttmaaaaccagcctggccaacatggcaaaaaaacccatctctactaaaaatacaaaaattagccaggcatggtggtgcttgcctgtagctacctgggaggctgaagcaggagattctcttgaacccaggaggtggaggttgcagtgagctgagattgtgtcattgcactccagcctgggcaagagagaaagactccgtctctaaataaaaaataaaaataaaaataaataaactctcttactctctttctggcagtgaggacaattacttctgttgtgag

SEQ ID NO: 941433 - DNA, 594 bp, Homo sapiens
gcccattgagagaaaagagagaaaaaaaatggctttgctattgtgaggttattgctgtggcctataatccaaatttcctgagattatgataatctggagtctggtagggatggaaaagtgatgctattgtatgtgagcaaagataggtggtgggaaccacagtgaaacataagattgggctcaccaggaagtgtgaatccccagaccatgcacaaacaactgttgaaataatccctctgccaggagtggtggctcacacctgtaatcccagcactttgggaggccgaggcaggcggatcacctgaggtaaggagttaaaaaccagcctggccaacatggcaaaaaaacccatctctactaaaaatacaaaaattagccaggcatggtggtgcttgcctgtagctacctgggaggctgaagcaggagattckcttgaacccaggaggtggaggttgcagtgagctgagattgtgtcattgcactccagcctgggcaagagagaaagactccgtctctaaataaaaaataaaaataaaaataaataaactctcttactctctttctggcagtgaggacaattacttctgttgtgag

SEQ ID NO: 941434 - DNA, 594 bp, Homo sapiens
gcccattgagagaaaagagagaaaaaaaatggctttgctattgtgaggttattgctgtggcctataatccaaatttcctgagattatgataatctggagtctggtagggatggaaaagtgatgctattgtatgtgagcaaagataggtggtgggaaccacagtgaaacataagattgggctcaccaggaagtgtgaatccccagaccatgcacaaacaactgttgaaataatccctctgccaggagtggtggctcacacctgtaatcccagcactttgggaggccgaggcaggcggatcacctgaggtaaggagttaaaaaccagcctggccaacatggcaaaaaaacccatctctactaaaaatacaaaaattagccaggcatggtggtgcttgcctgtagctacctgggaggctgaagcaggagattctcttgaacccaggaggyggaggttgcagtgagctgagattgtgtcattgcactccagcctgggcaagagagaaagactccgtctctaaataaaaaataaaaataaaaataaataaactctcttactctctttctggcagtgaggacaattacttctgttgtgag

SEQ ID NO: 941435 - DNA, 740 bp, Homo sapiens
agcagttccacttaggagctgtgtaccctcgtgcaagtcacttagctctttgagcctcactttccccttctgtaaaatggagctagcaccaatacttaatccctagggttgtcatgagtataaaatggtaaatagctacaaaatgctacagcacctggcacatggcatatgttattaaagtgtttgtctataccatatttatatgcattctctcattttgtctcccaactacttttgcaaagtaggtattacctccctgcacatgtgaaaactgaagctcaaaatatcaatgagatttgctccaagtctagggtgaccacctgtccgaattcgcctgagactaaggggattcctgggatgcagtactttcagttgtggtttgtttgtttgtttgttttgtttttgacacaagtttcrttcttgttgcccaggctgcagtgcaatggcgtgatttcagctcactgcaacctctgcctcccaggttcaagtgattctcctcctttagctccccgagtagcatcaccatgcctggctaatttttgtatttttagtagagatggggtttcaccatgttggccaggctggtctcgaactcatgacctcgggtgattcacctgcctcggcctcccaaagtgctgggattacaggcgtgagccactgtgcccagccaggactttcagttttgaagttaggaaagtcccaggccaactaggatgagttgggcaccctacccaggtcac

SEQ ID NO: 941436 - DNA, 634 bp, Homo sapiens
acccgtcaggaccctcgggccctgactcttgatgttgttcttgctcctcttgttgatcttgttgttcccacagtgaggtccagtcctgtggggtttgacaaacacagcatcacgtacccaactctgtagagccacacagaagactttcatccctcaaaaatggccccagttcggcccctcggtagtaaactcctctcccctcactcacccactggcaaatactgatctgtttctgtcccgataattgtgtctttccatatacacaaaagtgaagtctgagggtgaggcccatggccttgggaagcaggcataagttggcgggggtgggcacacagggtcaccgcggaagaagatccatgctgcccacacagccacatgtgggacagggcaggaccagccccccaagctgtgaacctcgcccgaggctatgccccactctggagcagaacggcctctgcagagcttccaccatgcacataggstgtgcacagccaggccaggaaggggagggcccctgtctgcagagacaggcccatcctggacaggagggaacagcattccaggcagatccgccactggctgctgttcccagagtggctgtgtcccctctgcagcgtccatgcccagccggcct

SEQ ID NO: 941437 - DNA, 634 bp, Homo sapiens
acccgtcaggaccctcgggccctgactcttgatgttgttcttgctcctcttgttgatcttgttgttcccacagtgaggtccagtcctgtggggtttgacaaacacagcatcacgtacccaactctgtagagccacacagaagactttcatccctcaaaaatggccccagttcggcccctcggtagtaaactcctctcccctcactcacccactggcaaatactgatctgtttctgtcccgataattgtgtctttccatatacacaaaagtgaagtctgagggtgaggcccatggccttgggaagcaggcataagttggcgggggtgggcacacagggtcaccgcggaagaagatccatgctgcccacacagccacatgtgggacagggcaggaccagccccccaagctgtgaacctcgcccgaggctatgccccactctggagcagaacggcctctgcagagcttccaccatgcacataggcwgtgcacagccaggccaggaaggggagggcccctgtctgcagagacaggcccatcctggacaggagggaacagcattccaggcagatccgccactggctgctgttcccagagtggctgtgtcccctctgcagcgtccatgcccagccggcct

SEQ ID NO: 941438 - DNA, 644 bp, Homo sapiens
gcctgggtggtgcctagccagtcctgctgctgaacctgctctgacctggcctaagggtaggactcgaggctgggagccaagggccaaccacaggacaggcagcaagacccgcttcgctggtctgtcacacacaccgcaccaagtcggtgttcaggataaaccrgggcacactctgagctgggcctgtctccggcttcaaccaaaaagcctgagctctggcaggtgaaggaccagacgtttctgtggggctatggacttgtctgggaggcagccacctctaagccacccaggatggtttcggttgtgtttggatggagttctgagttttgccagttaaaattcccccttcaggagctctctatgggggtaaagtgcaagatttggggtagaaaaatgacaagtcagaggactggaaggaacattatggactgtcctcccttctgcctgaagagatggggagactctcccaggccatgtggaagacctcacagggggaccaactgctgcctttcagcctggccgagggaagagcccctgactcagcctccgcaggaggaggtgggctggaaccaagtttccctgcatcaatccaggcaggcagccccgaacagtgcactccaacatgggatagtgagccagcttgg

SEQ ID NO: 941439 - DNA, 653 bp, Homo sapiens
gccacctcatgagcctgggtggtgcctagccagtcctgctgctgaacctgctctgacctggcctaagggtaggactcgaggctgggagccaagggccaaccacaggacaggcagcaagacccgcttcgctggtctgtcacacacaccgcaccaagtcggtgttcaggataaaccggggcacactctgagctgggcctgtctccggcttcaaccaaaaagcctgagctctggcaggtgaaggaccagacgtttctgtggggctatggacttgtctgggaggcagccacctctaagccacccaggatggtttcggttgtgtttggatggagttctgagttttgccagttaaaattcccccttcaggagctctctatgsgggtaaagtgcaagatttggggtagaaaaatgacaagtcagaggactggaaggaacattatggactgtcctcccttctgcctgaagagatggggagactctcccaggccatgtggaagacctcacagggggaccaactgctgcctttcagcctggccgagggaagagcccctgactcagcctccgcaggaggaggtgggctggaaccaagtttccctgcatcaatccaggcaggcagccccgaacagtgcactccaacatgggatagtgagccagct

SEQ ID NO: 941440 - DNA, 622 bp, Homo sapiens
cctagccagtcctgctgctgaacctgctctgacctggcctaagggtaggactcgaggctgggagccaagggccaaccacaggacaggcagcaagacccgcttcgctggtctgtcacacacaccgcaccaagtcggtgttcaggataaaccggggcacactctgagctgggcctgtctccggcttcaaccaaaaagcctgagctctggcaggtgaaggaccagacgtttctgtggggctatggacttgtctgggaggcagccacctctaagccacccaggatggtttcggttgtgtttggatggagttctgagttttgccagttaaaattcccccttcaggagctctctatgggggtaaagtgcaagatttggggtagaaaaatgacaartcagaggactggaaggaacattatggactgtcctcccttctgcctgaagagatggggagactctcccaggccatgtggaagacctcacagggggaccaactgctgcctttcagcctggccgagggaagagcccctgactcagcctccgcaggaggaggtgggctggaaccaagtttccctgcatcaatccaggcaggcagccccgaacagtgcactccaacatgggatagtga

SEQ ID NO: 941441 - DNA, 622 bp, Homo sapiens
cctagccagtcctgctgctgaacctgctctgacctggcctaagggtaggactcgaggctgggagccaagggccaaccacaggacaggcagcaagacccgcttcgctggtctgtcacacacaccgcaccaagtcggtgttcaggataaaccggggcacactctgagctgggcctgtctccggcttcaaccaaaaagcctgagctctggcaggtgaaggaccagacgtttctgtggggctatggacttgtctgggaggcagccacctctaagccacccaggatggtttcggttgtgtttggatggagttctgagttttgccagttaaaattcccccttcaggagctctctatgggggtaaagtgcaagatttggggtagaaaaatgacaagtcagasgactggaaggaacattatggactgtcctcccttctgcctgaagagatggggagactctcccaggccatgtggaagacctcacagggggaccaactgctgcctttcagcctggccgagggaagagcccctgactcagcctccgcaggaggaggtgggctggaaccaagtttccctgcatcaatccaggcaggcagccccgaacagtgcactccaacatgggatagtga

SEQ ID NO: 941442 - DNA, 738 bp, Homo sapiens
aatagccctggccgtacgcctaaccgctaacattactgcaggccacctactcatgcacctaattggaagcgccacactagcaatatcaactattaaccttccctctacacttatcatcttcacaattctaattctactgactatcctagaaatcgctgtcgccttaatccaagcctacgttttyacacttctagtaagcctctacctgcacgacaacacataatgacccaccaatcacatgcctatcatatagtaaaacccagcccatggcccctaacaggggccctctcagccctcctaatgacctccggcctagccatgtgatttcacttccactccacaaccctcctcatactaggcctactaaccaacacactaaccatataccaatgatggcgcgatgtaacacgagaaagcacataccaaggccaccacacaccacctgtccagaaaggccttcgatacgggataatcctatttattacctcagaagtttttttcttcgcaggatttttctgagccttttaccactccagcctagctcccaccccccaactagggggacactggcccccaacaggcatcaccccgctaaatcccctagaagtcccactcctaaacacatccgtattactcgcatcaggggtatcaatcacctgagctcaccatagtctaatagaaaacaaccgaaaccaaataattcaagcactgcttattacaattttactgggtctctat

SEQ ID NO: 941443 - DNA, 738 bp, Homo sapiens
aatagccctggccgtacgcctaaccgctaacattactgcaggccacctactcatgcacctaattggaagcgccacactagcaatatcaactattaaccttccctctacacttatcatcttcacaattctaattctactgactatcctagaaatcgctgtcgccttaatccaagcctacgtttttacacttctagtaagcctctacctgcacgacaacacataatgacccaccaatcacatgcctatcatatagtaaaacccagcccatgrcccctaacaggggccctctcagccctcctaatgacctccggcctagccatgtgatttcacttccactccacaaccctcctcatactaggcctactaaccaacacactaaccatataccaatgatggcgcgatgtaacacgagaaagcacataccaaggccaccacacaccacctgtccagaaaggccttcgatacgggataatcctatttattacctcagaagtttttttcttcgcaggatttttctgagccttttaccactccagcctagctcccaccccccaactagggggacactggcccccaacaggcatcaccccgctaaatcccctagaagtcccactcctaaacacatccgtattactcgcatcaggggtatcaatcacctgagctcaccatagtctaatagaaaacaaccgaaaccaaataattcaagcactgcttattacaattttactgggtctctat

SEQ ID NO: 941444 - DNA, 738 bp, Homo sapiens
aatagccctggccgtacgcctaaccgctaacattactgcaggccacctactcatgcacctaattggaagcgccacactagcaatatcaactattaaccttccctctacacttatcatcttcacaattctaattctactgactatcctagaaatcgctgtcgccttaatccaagcctacgtttttacacttctagtaagcctctacctgcacgacaacacataatgacccaccaatcacatgcctatcatatagtaaaacccagcccatggcccctaacaggggccctctcagccctcctaatgacctccggcctagccatgtgatttcacttccactccayaaccctcctcatactaggcctactaaccaacacactaaccatataccaatgatggcgcgatgtaacacgagaaagcacataccaaggccaccacacaccacctgtccagaaaggccttcgatacgggataatcctatttattacctcagaagtttttttcttcgcaggatttttctgagccttttaccactccagcctagctcccaccccccaactagggggacactggcccccaacaggcatcaccccgctaaatcccctagaagtcccactcctaaacacatccgtattactcgcatcaggggtatcaatcacctgagctcaccatagtctaatagaaaacaaccgaaaccaaataattcaagcactgcttattacaattttactgggtctctat

SEQ ID NO: 941445 - DNA, 738 bp, Homo sapiens
aatagccctggccgtacgcctaaccgctaacattactgcaggccacctactcatgcacctaattggaagcgccacactagcaatatcaactattaaccttccctctacacttatcatcttcacaattctaattctactgactatcctagaaatcgctgtcgccttaatccaagcctacgtttttacacttctagtaagcctctacctgcacgacaacacataatgacccaccaatcacatgcctatcatatagtaaaacccagcccatggcccctaacaggggccctctcagccctcctaatgacctccggcctagccatgtgatttcacttccactccacaaccctcctcatactaggcctactaaccaacacactaaccatataccaatgatggcgcgatgtaacacgagaaagcacataccaaggccaccacacaccacctgtccaraaaggccttcgatacgggataatcctatttattacctcagaagtttttttcttcgcaggatttttctgagccttttaccactccagcctagctcccaccccccaactagggggacactggcccccaacaggcatcaccccgctaaatcccctagaagtcccactcctaaacacatccgtattactcgcatcaggggtatcaatcacctgagctcaccatagtctaatagaaaacaaccgaaaccaaataattcaagcactgcttattacaattttactgggtctctat

SEQ ID NO: 941446 - DNA, 577 bp, Homo sapiens
atctggcaggttcccctctggggccaagcttccagaggaagcagcaggcagaaatctttgcttttctgcagcctccactggtgatacccaggcaaacaggctctggagtggacctccagtcaactccagcagacctgcagaagaggggtccaactgttaaaaggaaaactaacacagagaaagcaatagcatcaacatcaacaacaacaacaaaaaatgaccactcaaaaaccctatctgaaggtcaccaacatcaaaggccaaaggtagacaaatccacgaagatgagaaaaaaccagtgcgaaaaggttgaaaattccaaaaaccaggatgcgtcttctttcccaaaggatcayaacacctcgccagcaatggaacaaaactggacagagaatgagtttgataaattgacagaagtaggcttcagaaggtgggtaataacaaactcctccgagctaaaggagcatgtactaacccaatgcatggaagctaagaaccttgatataaggttacaggaactgctaattagaataaccagtttagagaggaacataaatgacctaatggagctgaaaaa

SEQ ID NO: 941447 - DNA, 520 bp, Homo sapiens
tatgatctgccatctataagctagagagccagaaaaactggtggggtaattcagtctgaggccaaatgcctcagaacaaggtgggtgggccagtggtgtaagttccagacttacaaggctgcaggggggcggcaggagaagtggtgtaagtcccagaatcccagggctggaaaactagaagttctaatgtccaagggcagaagaagatggatgttctggctcatgaaaagaaagagacagcaaatttaccctttctctgcctttttgttccattcataacctcaacagactggataatgcttaaccacattagtgggggtgatcttctttgctcactcagtctactgattsaaatgttaatctcttccagaaatgccatcatagaaaatactaaaaatattttaccagctatctgggcatcccttagcccagtcaagttgacacataaaatcaaccatcacagagaaaagaaaatctgtggagaagttggaaagtttatacattggtagtggaaacgtaa

SEQ ID NO: 941448 - DNA, 525 bp, Homo sapiens
tgggatccccaggcaacccatgcttctgcccagccaactctaaattttagggttcccctgcttaggaagccatcctcacagggttaacaagagttctgggcagaaatatatttataattaagcattaattagtctgtgctttgacccacttscttataaccaaagccacgtaacactagatactgaccatttgcatgcccgctgctcctatagacaggatttctaatgttaaaatcataagacttttaagaattgcttaaacagaatcataggatcatgaggattttgtttaagaattgcttaagccgaccctgaattccactgaaacagttgacgccaaccagttggaagaccccctcagaggaactgaatcagcatgagaatctatattcttcacctgcctgtctaatgacttcacctgcactcaatcaaccatcaccacactccagcctgctccaaaacccttgaaaaccttagcctcaatctccttggggagacatatttgaggtttcctcccatctcctt

SEQ ID NO: 941449 - DNA, 525 bp, Homo sapiens
tgggatccccaggcaacccatgcttctgcccagccaactctaaattttagggttcccctgcttaggaagccatcctcacagggttaacaagagttctgggcagaaatatatttataattaagcattaattagtctgtgctttgacccacttccttataaccaaagccacgtaacactagatactgaccatttgcatgcccgctgctcctatagacaggatttctaatgttaaaatcataagacttttaagaattgcttaaacagaatcataggatcatgaggattttgtttaagaatygcttaagccgaccctgaattccactgaaacagttgacgccaaccagttggaagaccccctcagaggaactgaatcagcatgagaatctatattcttcacctgcctgtctaatgacttcacctgcactcaatcaaccatcaccacactccagcctgctccaaaacccttgaaaaccttagcctcaatctccttggggagacatatttgaggtttcctcccatctcctt

SEQ ID NO: 941450 - DNA, 449 bp, Homo sapiens
ctgcagcagggcttaggcctgcgctgagccatgacaacacacttgagccatgaaattccagaataattcctgagagttctatatgccccagcagatccacacacaagcaactggagctccgcccacccccaccccccaccaagagacaggcctgtctgcctttgaaaggccaccaacataagagacccaaatataaaaggaatctgcaaggaggcaaccaagacaggagactgaagacagaakactattttaacaaaggacaaggagagaaacctgatagatacacaaatagctgaaaaggaaaattcaaaatgaaggtgctcagaaggcagaacaaaaacaaacagaatgaaaaaggaagatgaggaccaacttaagatatcaaccaacagaaaccctaaaaagaaagaacgtacgaaattacggggtgaaatttttccctgttccag

SEQ ID NO: 941451 - DNA, 540 bp, Homo sapiens
aatcaccgtgttccatgtgaccaccaggctctacaggctctaattttaaattatgacagggagggagaaggctgagaaccatgctgctgacactgagacaagggttcccagaggttcattttccctggacatggcaaaaagactttgcatagccttttcaaagatttggcaaatactatgggccaattttttttttttttttttgagayggagtctcgctctgtcgcccaggctggagtgcagtggcgcgatgggccaatttttatatgcattttctggcatttatttcagtggatgcaggatagattattaaaattcctgcactttacatttttaaaaatcctttttttttttttttttttttttggagacagagtctcactgtgtcgcctaggctggagtgcagtggcacgatcttggctctctgcaagctttgccttctgggttcacaccattctcctgcctcagcctccctggtagctgggactacaggtgcccgccaccacgcccagctaattttttgtatttttagtagagacg

SEQ ID NO: 941452 - DNA, 358 bp, Homo sapiens
tgaaagtaattgtatagaatttacagataagttagggagcattgccattttaaaaaatccgtgaacatgagatgcttttccatttatttagatctttaatttctttcagtgatgctttgtacttttcagtgtatacatcttgcacttcttttgttaaatttattccccagtattttacttatttgatattattttaaattgacttrtattcttaactttatgcttggattgttcattgcttgtgtatagaaatataattgattttgcatgttaatcttatattctgcaaccttgctgactcttttgtcaattctaataatttttctggattcattataaatttctatgtacaagatat

SEQ ID NO: 941453 - DNA, 611 bp, Homo sapiens
ccaacaaaaggcctgtggttgcctttctgcttccacccctacaattaggggagaggccacgtttcttcctgaaatgggatctacagagaggccccttgttccaggcaggaccctgccggtagcactgtcaggggataggacagcccatggaggcagccagrgtgaaaatgtgagcagagacaccaggaggctgggacccttggtcttccccaacccaaggtgacatgtgactgctttggggctccactgcacactctgtctgagacccagagatccagagagaatgatcggagcttgagatccctggacataatccagatttgggagaccaacccaagggagagtgagagacatgggctcatctgctgcagcccaagagggtcactgcatcagcacagagctggcagagggaggggagtttcttcagcagtggcagcctgggatcatttgtttacctgttataatgggagctcacacctaattttaagtaaaaatgtgtgttttcaagtttatggcccttctttccccaacttccttaactgtgctggttgttttagggagaatgatgaaccgtgttgcctcctggcctgtgccagctcccgccctgtccc

SEQ ID NO: 941454 - DNA, 635 bp, Homo sapiens
aaaaaatgaggattttttggacgggtaccatggctcacacctgtaatcccagcactttgggaggccaaggcaggtggatcgcctgagctcaggagtttgagagcagcctgggcaaaatggtgaaaccccatctctacaaaaaaatataaactattagccaggcatggtggtgcgcacctgttgccccagctacgtgggaggctgaagtgggaggatcacttgagcctgggaggcagaggttgcagtgagccaagatagcgccactgcacttcagcctgggtgacagagtgagaccctgtctcaaaaaaaaaawttttttttaacgatgttgaattttgtgtgaatgaggaattatagagtggaaaatactgtaagaatctagaaaaagtctatacccagttggttgtaaagtgtttttttaagctcttaaatctctttgaagaaattcaaagcaaaaactgaactgttaatacgaatgtggttcgtggaagtcaaattaattgaattgaaaactcaaagagagagccttggccctttgtggttcgtaagatcaatgaataaaaatacatttgtattatttaatttcagataacacctttatgaatacatcattttctataattccccctctaaca

SEQ ID NO: 941455 - DNA, 811 bp, Homo sapiens
cccatgtcctacccctggcccagaaagcttaacctggctatctccatctctgtgcctctttattggagtgtctcttctttgttcggcatcccccttctcatataatagctcttgtctcttccctcaacctgtccatctgagaaatgcttagtacctgattgcttctgactgaagtgaaayggtcatgcagctttaggcagaacaggaaaccaaacaaaaatgtgtctttttttttggagctgactagatgttgcagagaatggaagtcctctcataacccctaggtcctgatcgagcacattggaaacctggaccgggcatatgagtttgcggagagatgcaatgagcctgctgtgtggagtcagctggcccaagcccagctccagaaagatttggtgaaggaagccatcaactcctatatcagaggggacgacccttcctcttacctggaagttgttcagtcagccagcaggagcagtaagtgagtcccctctccctagggctctgcatctcactgatgcaaaacctggctgaagcaagaagttgaagagattctcacaaatctctacgtatgatgtatccagagatatcagagggcacatctacatgaaagtttcccacaagagtctgagataaacattattctgttattgacaccagctctttagttgactattgccctcctttacaagatgaggtcatttaagcacactagatatctcaatatcgccactgtagtaattttaaagtgagtgacaggcccacaattcccagggatcttctggtgtttcaagttgattgtggcaccgac

SEQ ID NO: 941456 - DNA, 641 bp, Homo sapiens
tagcatttaccattttaacctttttgtttgtttgtttgtttttggtagaggggatcttgctctgtcacccaggctggagtacagtggtgcagtcatggctcactgcagcctcgatctcctgggctcaagcgattctcccacctcagcctctggttgctggaaccataggcatccaccatgtgtacctaatttttgtatatttgtagagactgggtctcacttatttgcccagattcattttaaccttttctacgtgtgcaatacaagtgtgcattaaggatatccacaaggctgtgtaaccctctccgcgaccattcccagagctttcctaatcagaaaactgtaaccattgcacagtaattgcccttccctgaactcccagcccccggcgagcggggctyatggctgaataacactgcactgcatgtgcagactacattttgtttatccacttatccctccagggtccttgggttgtttccaccctctggctgctgtgaatagcgctgctgtgaacatgggtgtaatgcgcttgcttcagttcctgcattcagcccttctgggtatatactgaggagaggaattgctggggcgcatggtaattctatgtttagggttttgaggatccactgaacttttcc

SEQ ID NO: 941457 - DNA, 670 bp, Homo sapiens
ttttttttttttagataaattctctgttgcccaggctggagtacagtggtgggatcacagctcactgcagccttgacctccctggctcaagtgatcctgccacctcaccctcaccgagtagctgggaccacaggtgttcaccatcatatgtggctaatatttttattttaatttttgtagagactggatccctgtgttgcccaagctggtctccaactcctgggctcaagtgatcctcctgtctcagctttccaaagtgttgggattacaagtgagagctactgtgctcagtgtggtctgtgtatctttactaagcttttgatcaaagacttttttaattttaaagaagtctgatttatcattttttcttgttatggtcatgctttctgtttttgtctaataaatcyttgcctaccccaaggttacgaagatcttctccttccctagtaaaatctgagcttcgtgggggcagacaccttatggttctcctcctgctcttctcacttgtgtcctgtacaacacctggcccctaggaggtacacggcggtgttcatggaaggagcaaatgagttgtcttaaggattcataataatgtattctaagcacttgatatactgcctggcacatgcaaaatgagcattcaggaatctgatttgactacagctgttct

SEQ ID NO: 941458 - DNA, 670 bp, Homo sapiens
ttttttttttttagataaattctctgttgcccaggctggagtacagtggtgggatcacagctcactgcagccttgacctccctggctcaagtgatcctgccacctcaccctcaccgagtagctgggaccacaggtgttcaccatcatatgtggctaatatttttattttaatttttgtagagactggatccctgtgttgcccaagctggtctccaactcctgggctcaagtgatcctcctgtctcagctttccaaagtgttgggattacaagtgagagctactgtgctcagtgtggtctgtgtatctttactaagcttttgatcaaagacttttttaattttaaagaagtctgatttatcattttttcttgttatggtcatgctttctgtttttgtctaataaatctttgcctaccccaaggttacgaagwtcttctccttccctagtaaaatctgagcttcgtgggggcagacaccttatggttctcctcctgctcttctcacttgtgtcctgtacaacacctggcccctaggaggtacacggcggtgttcatggaaggagcaaatgagttgtcttaaggattcataataatgtattctaagcacttgatatactgcctggcacatgcaaaatgagcattcaggaatctgatttgactacagctgttct

SEQ ID NO: 941459 - DNA, 721 bp, Homo sapiens
atcagcactctgtaaaatgggccaatcagcactctgtagaatggaccaattagcgctctgtaaaatgggccaatcagcaggatgtgggtggggccaaataagggaataaaagctggccatgcgagccagcagtgcaacctgtttgggtctttttccatgttgtgggagctttgttcttttgcttttcacaatcagtcttgctgctgctcactcattgagtctgcactaggtttaaaagctgtaacactcactgcgaaggtctggagcttcatttgtgaagtcagccagatcacgaacscaccagaaggaagaaactctcacctctcaacatctgaaggaacaaactctggacacaacatctttaagagctgtaacactcaccatgagggtctgtggcttcattcttgaagtcagtgagaccaagaacccaccggaaggaataaattacagacacaatccgcccgccttggcctcccaaagtgctgggattacaggcgtgagccaccacgcccagccttcagttttcccttgtataaaacagggatactaccatgtcttctggggtgctggctgtccttgctgaccatgctagtgggcacgggcctgccagtgctccatgtcctggcgcgtggctagtggactcaccccatcctgtctttcagcttggatctggaggacgctccagaggggccccgccgctccattcctcctgtagtgcaga

SEQ ID NO: 941460 - DNA, 721 bp, Homo sapiens
atcagcactctgtaaaatgggccaatcagcactctgtagaatggaccaattagcgctctgtaaaatgggccaatcagcaggatgtgggtggggccaaataagggaataaaagctggccatgcgagccagcagtgcaacctgtttgggtctttttccatgttgtgggagctttgttcttttgcttttcacaatcagtcttgctgctgctcactcattgagtctgcactaggtttaaaagctgtaacactcactgcgaaggtctggagcttcatttgtgaagtcagccagatcacgaacgcaccagaaggaagaaactcwcacctctcaacatctgaaggaacaaactctggacacaacatctttaagagctgtaacactcaccatgagggtctgtggcttcattcttgaagtcagtgagaccaagaacccaccggaaggaataaattacagacacaatccgcccgccttggcctcccaaagtgctgggattacaggcgtgagccaccacgcccagccttcagttttcccttgtataaaacagggatactaccatgtcttctggggtgctggctgtccttgctgaccatgctagtgggcacgggcctgccagtgctccatgtcctggcgcgtggctagtggactcaccccatcctgtctttcagcttggatctggaggacgctccagaggggccccgccgctccattcctcctgtagtgcaga

SEQ ID NO: 941461 - DNA, 596 bp, Homo sapiens
tattacacagagtggtcagggaaggctgccctccaacctcactgggcaggctggttggagtttctccaaggaccccctcccacctggctgactcattcctccctctaaaaaagtacatctaattgccattacattaaggataaggatgaagactgatctcaacttcttcctgctgacaggggttgctgttttggggaaacggaagtcggagctccttcagaggcctatctaagggttcctagcagaaggggccattgtcagaggctccagttgcatgaccatttggagtttgatggcctgaaggcaagaacagacaaacccatttgttagaaaacacatatcaacatgaaacaaggggagggataaggacagctcaaaaattccaaggccttttaccagtttgcacagggwgagggaggccaaacacccagctagcaaaaaaaaaaaaaaaaactttacccttttgctagtatgttgggcttctgggttccttttccctgagcccaatcctaaaccaactagttttaaggtttgggaaattaactctttctagtttgaaggatgcatctgaggggaccttcccatagtacagagac

SEQ ID NO: 941462 - DNA, 820 bp, Homo sapiens
ctgtgggggacttttgagccatgcgtcctagcactgcgtagggtgtggggatcggcatggagctgctgctcaccagtctgtcctgaaaaaggaaaaaaaaggccatgaaaagtctcccgaccccaaggagcgacagrgggtggtggggtggtttcccataagctcagaagtccaaggacgaaaaggcttagaaagccacagtgagaggttttgtgttctcatttcactcaccacttcttgagctcccacattgaacaccaaaaatgtcgcaggacttttccttagtgcagctaaagatggtgttctttgtcccatggccatgaaaattcaggcttgcagacaatttgaatggtgagtaagacagggttttattgggtgaaaaggaaggaaaggcagaaacagggactctgtctaggccagagtccctgctagagcacttcccgccagactgttcaaatctcatgttccacacaggaagaggaagggccagggtcctccccactgcaaagagtgtgagcttcccaaggctccacctcagtgggcgggctggttggagtttctccagggaccccctcccacttggctgtctcgttaatattttttgggtgaatgacttttttctatttaatattatatctgtgagatttatctagttgttgcatgtatcaatagttcattcttttttatggctatacagtctgtcattgtatatgccacaataaaattatcttgctccttcttgttgataaacattttggttgtttctggttttagactattatgtgtaacgctgccattaatattcttgtctaaaagggcc

SEQ ID NO: 941463 - DNA, 820 bp, Homo sapiens
ctgtgggggacttttgagccatgcgtcctagcactgcgtagggtgtggggatcggcatggagctgctgctcaccagtctgtcctgaaaaaggaaaaaaaaggccatgaaaagtctcccgaccccaaggagcgacagagggtggtggggtggtttcccataagctcagaagtccaaggacgaaaaggcttagaaagccacagtgagaggttttgtgttctcatttcactcaccacttcttgagctcccacattgaacaccaaaaatgtcgcaggacttttccttartgcagctaaagatggtgttctttgtcccatggccatgaaaattcaggcttgcagacaatttgaatggtgagtaagacagggttttattgggtgaaaaggaaggaaaggcagaaacagggactctgtctaggccagagtccctgctagagcacttcccgccagactgttcaaatctcatgttccacacaggaagaggaagggccagggtcctccccactgcaaagagtgtgagcttcccaaggctccacctcagtgggcgggctggttggagtttctccagggaccccctcccacttggctgtctcgttaatattttttgggtgaatgacttttttctatttaatattatatctgtgagatttatctagttgttgcatgtatcaatagttcattcttttttatggctatacagtctgtcattgtatatgccacaataaaattatcttgctccttcttgttgataaacattttggttgtttctggttttagactattatgtgtaacgctgccattaatattcttgtctaaaagggcc

SEQ ID NO: 941464 - DNA, 820 bp, Homo sapiens
ctgtgggggacttttgagccatgcgtcctagcactgcgtagggtgtggggatcggcatggagctgctgctcaccagtctgtcctgaaaaaggaaaaaaaaggccatgaaaagtctcccgaccccaaggagcgacagagggtggtggggtggtttcccataagctcagaagtccaaggacgaaaaggcttagaaagccacagtgagaggttttgtgttctcatttcactcaccacttcttgagctcccacattgaacaccaaaaatgtcgcaggacttttccttagtgcagctaaagatggtgttctttgtcccatggccatgaaaattcaggcttgcagacaatttgaatggtgagtaagacagggttttattgggtgaaaaggaaggaaaggcagaaacagggactctgtctaggccagagtccctgctagagcacttcccgccagactgttcaaatctcatgttccacacaggaagaggaagggccagggtcctccccactgcaaagagtgtgagcttcccaaggctccacctcagtggrcgggctggttggagtttctccagggaccccctcccacttggctgtctcgttaatattttttgggtgaatgacttttttctatttaatattatatctgtgagatttatctagttgttgcatgtatcaatagttcattcttttttatggctatacagtctgtcattgtatatgccacaataaaattatcttgctccttcttgttgataaacattttggttgtttctggttttagactattatgtgtaacgctgccattaatattcttgtctaaaagggcc

SEQ ID NO: 941465 - DNA, 820 bp, Homo sapiens
ctgtgggggacttttgagccatgcgtcctagcactgcgtagggtgtggggatcggcatggagctgctgctcaccagtctgtcctgaaaaaggaaaaaaaaggccatgaaaagtctcccgaccccaaggagcgacagagggtggtggggtggtttcccataagctcagaagtccaaggacgaaaaggcttagaaagccacagtgagaggttttgtgttctcatttcactcaccacttcttgagctcccacattgaacaccaaaaatgtcgcaggacttttccttagtgcagctaaagatggtgttctttgtcccatggccatgaaaattcaggcttgcagacaatttgaatggtgagtaagacagggttttattgggtgaaaaggaaggaaaggcagaaacagggactctgtctaggccagagtccctgctagagcacttcccgccagactgttcaaatctcatgttccacacaggaagaggaagggccagggtcctccccactgcaaagagtgtgagcttcccaaggctccacctcagtgggcgggctggttggagtttctccagggaccccctcccacttggctgtctcgttaatattttttgggtgaatgacwtttttctatttaatattatatctgtgagatttatctagttgttgcatgtatcaatagttcattcttttttatggctatacagtctgtcattgtatatgccacaataaaattatcttgctccttcttgttgataaacattttggttgtttctggttttagactattatgtgtaacgctgccattaatattcttgtctaaaagggcc

SEQ ID NO: 941466 - DNA, 574 bp, Homo sapiens
cacaatttcctaattatattctctaggacaagttatttaacctctgtgctttgatttcttctgtttaatgagaatggaccagatcagttgttagaaatcacattgaggcagggcatggtggcttacacctataatctgagcacttgggagactgaggcrggaggatccatttgagcctaggagtagtgagctatgatggcttcttcctgccagctgcacagacaaaatcaattccctgagatcgtggcattgcagtaagaaagagtttaattgactcaaggccagccatgccaaagaggcagttatcacttaaatcagtcttcctgaagccctctagaggttagagtttttatggacaatttggtgggcagggctgagggaatgggtgctgctgattaattgggggtgtggaaaagtccttgtgcgctgagtgtgcctctgtgtagggctacagcaggagtcctcaacccccaggttatggaccggtatcagcctgtggcctgttaggaactgggccacacagcaggaggtgaacaggtgagcaagcattgctgcctgagctctgcttcctgtc

SEQ ID NO: 941467 - DNA, 567 bp, Homo sapiens
tgctggggggtaggggtcaaggggagggagagcatcaggacaaatacctaatgcatgtggggcttaaaacctagatgacaagttgataggtgcagcaaaccaccatggcacatgtatacctatgtaacaaacctgcatgttctgcacatgtatcccagaacttaaagtaaaatttaaaaagcagcaataaaattttaaaggtagtgtcaatataaattcataccaagattagctgaagggaaagtaactcccataagacatctcattttgtttccactgagcctgttctgactccttgaaatggcaraaacaggggtaataacaatatcttttatcatgtattaccttatgcttttcaaaaaaagtttcaaaaacacaataaatatttgaataaatgcacttagataatcccaaatcagagtcaagaaaatatataaaagttaaattcaaatgatagaatttgtccatttttccattcaaattacaatttaagtcaagtaaagaaagacatacaaaagctgcatgattaggagggagtgcagcgctcatcctcctgtccccaaggcc

SEQ ID NO: 941468 - DNA, 625 bp, Homo sapiens
ggattagcaagctactctgtttctctatatgttggtttcgccttctacaatatggagctagtaatcatatttgcctcctagagctgacatcaatattaaataaaatatgtttgaaataattgagcatagtgcctggaacatagtgagccttcaatgaacattagctgtsactattattactctcaaagatgagcatgcatacctcttggggagttccaagtctcagtatagatgtggtgaatattcttggattggcagttttacttgttttcaagtaatttaagtctttatcttttcccccattaaaactggcacagaatgaatatacttaaaactactgaaacttaaaaatagttgggccgggcgtggtggctcacgcctgtaatcccagctctttgggaggccgaggtgggcggatcacaaggtcaggagatccagaccatcctggctaacacggtgaaaccccgtctctactaaaaatacaaaaaaattagccgggcgtagtggtgggtgcctgtagtcccagctactcgggaggctgaggcaggagaatggcatgaacccgggaggcagagcttgcagtgagccaagatcacgccactgcactccagcctgggcaacagag

SEQ ID NO: 941469 - DNA, 530 bp, Homo sapiens
aatgaacaaaggagtaaagtcaattatctatattttcatcataagaatactgaaaaataactgtaaaataaacacaaaattaataaatgtaagccaataataaagaaaatcatgaaataaaaaatgaacaaacaatagagacaatcaatggtcaatttttctatactccatgaacaaaacttcatttcagaatgattttatatttaaatrtgtatccagaaccacagaaatcttaaaataaaaagttaggaaaatatgggaataaaataagaattctatgagaataaaaatcagaaagtagttgtctaccaagtaggttgggtacagtgcaaggaattaactaagaacttcttttcaagaagaaaatggcctctgtttttttggatggtacttacacgggcatacataactgtcaagtttcactggactgaacacttgagatctgggcagtttaatgaatacaaattacatttttttaagtaaagaaagtgtctcaggagcttacggtgggtaaatttgggcagttctaa

SEQ ID NO: 941470 - DNA, 559 bp, Homo sapiens
attctcataaaattatagaggaaatgcaaacacatcccactttcaaagcagagcaactttaaaaacctctagtatgcaaaaactaaacgtgatcatctgtcttatcaggtcaacagtttggtcaaagtaggcaatgtatgtacatatgatatctggagcttattttaagtttctggtaagtctgtgtaaatataccattttggaaytgcaaggcttatgacaaaggattatctttctttttttcaactttaattttaagttcaagcttacaagtgtaggtttgttacataggtaaacttgtgtcatggaggtttgttgtacagattatttcatcacccaggtattaagcctagtacccataagttgtttttcctgatcctctcccaccctccatccttcagtaggcctcagtgtgtgctgttcccctctgtgtccatgtgttctcatcattcagctcccactaatatgcggtattcagttttctgttcctgtgttagtatgctaaggatcatggcctccagctccatccatgtccctgcaaaggacataatctcattct

SEQ ID NO: 941471 - DNA, 542 bp, Homo sapiens
attaaaacctccccttctgaggtcatgctttggtgagtatttacatgggacacagatatcttcatatctttgcccattcatagaggtctattcacattgctcttccccaggtatctttgtcatcaattttccaatcatgttgcttccaaatccctgatcacccagaatgtgtttcctctaaaatccaaatagatgcaccaggcatagtgcctctctcttgagtgtaagaggggccagacacttatccttcaccttaaaagggctatctggacaggtctcacaccaytggaccctataaatttcacgaggaagtataagtcccttgaattttagccagatttatttgtactttttgacacacaaatgtcctaccaatgagttcagactcactaggtctaattggcacaatgttatcaatataatggaccagtgtggcatcttgtggaaggacaagtggtcgagaattctgtgaacttgattatgacatggggctgcagaattgatatactcctgaggtatgacagttaaggtgtactgctggc

SEQ ID NO: 941472 - DNA, 789 bp, Homo sapiens
caacaaggttgggtctgtacttaatccttgtttactggcagaagctccctcttgcctcaggcaatgatctgatttgaggaatgcacagtagtctgagctccctgcccaggcctgtgggttgagccatgaaggacagggctggactgggcaggtttacctgcgggtcccttgatggcaggcrtaagaaccaatgccaatggagaatccagtgggtggccaccaggatcccagaggtgtgtctaggtgtggagcagggaaacctccttagttccaggttctctgcatggggacagggggctgcctaagcttttaatccaggagagtaagggctcagatccctggagatttgcctggcatgaagcagaggggaaccccctaaaccaatatctctgcacaggagggatgtggcatctcaggccgctgaaccaggcaaacaggtgctttgaatgcctggagatctgcctgggcatggatcagagagagcccctgtgcaccaagatctctgcacaggaggggtggaggcaactcaggttgctggatgaagcaagaaggtgttctgactgcctggagatctgcctgggcatgtagcagtggggtctccctgcaccaggatctctgcacaggaagaatagggtgggtcaggctgctgatccaggtgaacaggtgctctgaatgcctgaagatctgcctggctgtggagaagggaagagcctcgctgcaccaagatctatgtccaggaagggttgggcagctcatgctgctagtctggacaaacagggaccccaaatg

SEQ ID NO: 941473 - DNA, 789 bp, Homo sapiens
caacaaggttgggtctgtacttaatccttgtttactggcagaagctccctcttgcctcaggcaatgatctgatttgaggaatgcacagtagtctgagctccctgcccaggcctgtgggttgagccatgaaggacagggctggactgggcaggtttacctgcgggtcccttgatggcaggcgtaagaaccaatgccaatggagaatccagtgggtggccaccaggatcccagaggtgtgtctaggtgtggagcagggaaacctccttagttccaggttctctgcatggggacagggggctgcctaagcttttaatccaggagagtaagggctcagatccctggagatttgcctggcatgaagcagaggggarccccctaaaccaatatctctgcacaggagggatgtggcatctcaggccgctgaaccaggcaaacaggtgctttgaatgcctggagatctgcctgggcatggatcagagagagcccctgtgcaccaagatctctgcacaggaggggtggaggcaactcaggttgctggatgaagcaagaaggtgttctgactgcctggagatctgcctgggcatgtagcagtggggtctccctgcaccaggatctctgcacaggaagaatagggtgggtcaggctgctgatccaggtgaacaggtgctctgaatgcctgaagatctgcctggctgtggagaagggaagagcctcgctgcaccaagatctatgtccaggaagggttgggcagctcatgctgctagtctggacaaacagggaccccaaatg

SEQ ID NO: 941474 - DNA, 789 bp, Homo sapiens
caacaaggttgggtctgtacttaatccttgtttactggcagaagctccctcttgcctcaggcaatgatctgatttgaggaatgcacagtagtctgagctccctgcccaggcctgtgggttgagccatgaaggacagggctggactgggcaggtttacctgcgggtcccttgatggcaggcgtaagaaccaatgccaatggagaatccagtgggtggccaccaggatcccagaggtgtgtctaggtgtggagcagggaaacctccttagttccaggttctctgcatggggacagggggctgcctaagcttttaatccaggagagtaagggctcagatccctggagatttgcctggcatgaagcagaggggaaccccctaaaccaatatctctgcacaggagggatgtggcatctcaggycgctgaaccaggcaaacaggtgctttgaatgcctggagatctgcctgggcatggatcagagagagcccctgtgcaccaagatctctgcacaggaggggtggaggcaactcaggttgctggatgaagcaagaaggtgttctgactgcctggagatctgcctgggcatgtagcagtggggtctccctgcaccaggatctctgcacaggaagaatagggtgggtcaggctgctgatccaggtgaacaggtgctctgaatgcctgaagatctgcctggctgtggagaagggaagagcctcgctgcaccaagatctatgtccaggaagggttgggcagctcatgctgctagtctggacaaacagggaccccaaatg

SEQ ID NO: 941475 - DNA, 556 bp, Homo sapiens
ttccagctgatctgaatatatcagcaattacgataaatgtgacaaacactaagacagggaaatagggcagtcagactgaattatgagggtacatggaaaaaggatctaactagatttgaacatctgggaatgtttcctgtaggaagtaacatcttaggtgagacccggcaaattaataaatgttaacyagataaaactgagagtggattggggcagttaataggagaggtgctatgcttcatatttatggggttaattatttgtacgctcacttgatagatgaggaaactgaggcacagagtgtaagcaacttgccgacagtcacacagctagtaagcagtagagctgggaggcaaagccagccatctgacttaaccaggttctccatggatggaaatcataactatagccatttaaagcatggaatgggtaagatcacccaaggacagtgcaccgagtgagaaaagggataaggacagaagagttaagcacatttgcttgtaatgagttgtcagaagaagagagtccaaaaggaaactaagaaggcgtagtataa

SEQ ID NO: 941476 - DNA, 618 bp, Homo sapiens
tgtttgttttttgagatggagtctcactttgttacccaggctagagtgcagtagcatgattgtgatcttgactcactgcaacctccgccccctgggttcaagtgattctcctgcctcagcctcaagtagctgggattacagacttctgccactgcagcccggctaatttttgtatttttagtagagacggggtttcaccatcttggccaggcaggtcttgaactcctgaccttgtgatccacccacctcggcctcccaaaatgctgggattactggagtgagccaccacacccggcsgagactgggcctacagagctttaaacgccttgcataaagacatgactttttaagtttgcaaaagaaactcaaagcagttaaaacaatgggactttctagaaatagaaagtctttgtttacccacagttcaaataaagtgcaagtaaaaggaaagctttctgtttggccctgccatgctcagcagcagtcttctgacccacacacagctcatgcagcctccctcttgctctgctgggaagtgactcacattccataaactggaacattaataccctagctcttggctgatgctgtaatatctgtatgttccctaaagaagac

SEQ ID NO: 941477 - DNA, 609 bp, Homo sapiens
  misc_feature 568, 569, 570, 571, 572, 573, 574, 575, 576, 577, 578, 579,580, 581, 582, 583, 584, 585, 586, 587, 588, 589, 590, 591,592, 593, 594, 595, 596, 597, 598, 599, 600, 601, 602, 603,604, 605, 606, 607, 608, 609: n = A,T,C or G
gtttcctcttttcttcttgacttcttagagctagtcccagtctttttttttttttttcttattatactcttccctcttccctctactggtttaaaagttatatatccatttctatttttttactaattaccctaacttttaatatgcatacctaaagttaaatagtatttatccccacctatcaaataattcatgtctcttcaaacactttagctctgattaaccccctcagatttatgtgctatttttgtcaagtgttttagctctatttttcttaactcacagattagacacttgatatagtcaaagtttattcagatatacttgaaaacattccactttatttgatcccattttttctcagatcatagatcttcaaatattactttccttttatctggagtatatcctttagactttctgttagtgagggttcmttagaagtgagtgcttttggttttctgtattttgtttgtctgaaatatttgtatttggtgctctctcttgaaagttagttttgcagtgaacttaactctacgttgacagttatcttgtctcaacacttcannnnnnnnnnnnnnnnnnnnnnnnnnnnnnnnnnnnnnnnnn

SEQ ID NO: 941478 - DNA, 579 bp, Homo sapiens
tgggttttgacaaacacataagtacattcattcaccattatagtaccatatagaatagtttcactgccctaaaaattccctacattcttcacagtttttcctccctccctccaatctctcacaaccattgacctttctactgtctccatagttttgtcttttccagaatgtcatatggttgaagtcatatagtatatagctttttcagattggctcatttcacttagcaatgtgcatttaagatttctctatgtcttttcacagcttgatggcttctttttcttttccttttttttttttttttttttgagacagggtctcactctgtgcccaggctggaatgcagtggcacaaacatggctcactacagcctctcctttccgggctcaagcaatcctcctctctcagtccccccaagtagctgggactacaggcacrtgccaccacgtttggctaatttttgtattttttgtagagatgggtttttgccatgttggccagggtggtctcgaactcttgggcacaagtgatccatccacctcggcctctcaaactgctgggattataggcgtgagccac

SEQ ID NO: 941479 - DNA, 691 bp, Homo sapiens
tacgagtaggcagtgtgatggaaaaagcgccgtgagtaggggtacctaaattctcttttgttaccagctctgcagcctgggccgcacttgcagctccttaaccttagcctatccagccacaaaagaaaggtgatcagaccaatgcccaccactcaggattgttgtagagacaatttgcatgctgtaaagtactcgcacagttaattgttcctttttaatttttaaattttttgatacataatatttgtagttatggggtacatgagatattttgatacacacaacaaatgtgtcatgagcaagtcaaggtattaaggatatccatcaccttgagcacatcaattgttcttatttttaaacaccactggccaaacggaggtagtgttactggaaaggggtcctgatccagaccccaagagagggttcttggatcttatgcaagaagtagaggtgaatctggccgggcgcrgtggctcacacctgtaatcccagcactttgggaggccaaggcgagcagatcatgaggtcaggagatcaagaccatcctggctgacgaggtgaaaccctgtctctactaaaaatataaaaaattagccaggcgtggtggtgggcgcctgtagtcccagctactcgggaggctgaggcaggagaatggcgtgaacccaggaggcggagcttgcagtgagcagag

SEQ ID NO: 941480 - DNA, 578 bp, Homo sapiens
ctcctgcctcagcctccggagtaactgggactacaggtgccgccaccacgcccggataattttttgtatttttagtggagacggagtttcaccgtgttagccaggatgttctcgatctcctgacctcgtgatccacccgcctcggcctcccaaagtgctgggccttattttaacagacaccaatgtgatcagaaaaagtataacatgtgctgaaaactgtttattgtgtggacattgtgtgggaaccaataaaagacaaagagctatagaataaatcatttttatttaattttatttacttttaaagttagactcgtattcattctggtctctctgagttgtttgctcccacctgtttggtctcacttttctctctgtatctcaggagccagaactayaagcttcagaagtcagttcagatggttatctgcaatttctctttgtagtgctattcgaggtcaaatccattacagcatatgttcagactgactttgcacacttaactccactgggctttcagtgacatacttggcgcttcacctgagaacctgttatccatagatacatgagatgttaaa

SEQ ID NO: 941481 - DNA, 533 bp, Homo sapiens
ctggactttttttggttggtaggctattaattattgcctcaatttcagaacctgttattggtctattcagagaccaataacaacttcttcctggtttagtcttgggagagtgtacgtgtcaaggaatttatccatttcttctagattttctagtttatttgcgtagaggtgtttatagtattctctgaaggtaatttgtatttctgtgggatcagtggtgatatcccctttatcattttttattgcatctatttgagtcttctctcttttcttctttattagtcttgctagcrgtctatcaattttgttgatctttttaaaataccagctcctggattcactgattttttgaagggttttttgtgtctctatttccttgagttctgctctgctcttagttatttcttgctttctgctagcttttgaatgtgtttgctcttgcttctctagatcttttaattgtgatgttagggtgtcaattttagatctttcctgctttctcttgtgggcatttagtgctataaatttccctc

SEQ ID NO: 941482 - DNA, 706 bp, Homo sapiens
cttgctttatgaatctgggtgttcctgtattgggtgcatatatatttgggatagttagctcttcttgttgaattgatccctttaccattatgtaatggccttctttgtctcttttgatctttgttagtttaaagtctgttttatcagagacaggattgcaacccctgcctttttttgttttccatttgcttggtagatcttcctccatccctcttattttgagcctatgtgtgtctctgcacgtgagatgggtttcctgaatatagcrcactgatgggttcttgactctttatccaatttgccagtctgtgtttcttaattggagcatttagcccatttacatttaaggttaatattgttatgtttgaatttgatcctgtcattatgatgttagctggtgattttgctcattagttgatgcagtttcttcctagtctcgatggtctttacaatttggcatgtttttgcagtgactggtaccggttgtgcctttccgtgtttagtgcttccttcaggagctcttttagggcagacctggtggtgacaaaatctctcagcatttgcttgtctgtaaaatattttatttctccttcacttatgaagcttagtttggctggatatgaaattctgggttgaaaattctttcctttaagaatgttgaatattggtccccactctcttctggcttgtggggtttctgccgaga

SEQ ID NO: 941483 - DNA, 706 bp, Homo sapiens
cttgctttatgaatctgggtgttcctgtattgggtgcatatatatttgggatagttagctcttcttgttgaattgatccctttaccattatgtaatggccttctttgtctcttttgatctttgttagtttaaagtctgttttatcagagacaggattgcaacccctgcctttttttgttttccatttgcttggtagatcttcctccatccctcttattttgagcctatgtgtgtctctgcacgtgagatgggtttcctgaatatagcacactgatgggttcttkactctttatccaatttgccagtctgtgtttcttaattggagcatttagcccatttacatttaaggttaatattgttatgtttgaatttgatcctgtcattatgatgttagctggtgattttgctcattagttgatgcagtttcttcctagtctcgatggtctttacaatttggcatgtttttgcagtgactggtaccggttgtgcctttccgtgtttagtgcttccttcaggagctcttttagggcagacctggtggtgacaaaatctctcagcatttgcttgtctgtaaaatattttatttctccttcacttatgaagcttagtttggctggatatgaaattctgggttgaaaattctttcctttaagaatgttgaatattggtccccactctcttctggcttgtggggtttctgccgaga

SEQ ID NO: 941484 - DNA, 706 bp, Homo sapiens
cttgctttatgaatctgggtgttcctgtattgggtgcatatatatttgggatagttagctcttcttgttgaattgatccctttaccattatgtaatggccttctttgtctcttttgatctttgttagtttaaagtctgttttatcagagacaggattgcaacccctgcctttttttgttttccatttgcttggtagatcttcctccatccctcttattttgagcctatgtgtgtctctgcacgtgagatgggtttcctgaatatagcacactgatgggttcttgactctttatccaatttgccagtctgtgtttcttaattggagcatttagcccatttacatttaaggttaatattgttatgtttgaatttgatcctgtcattatgatgttagctggtgattttgctcrttagttgatgcagtttcttcctagtctcgatggtctttacaatttggcatgtttttgcagtgactggtaccggttgtgcctttccgtgtttagtgcttccttcaggagctcttttagggcagacctggtggtgacaaaatctctcagcatttgcttgtctgtaaaatattttatttctccttcacttatgaagcttagtttggctggatatgaaattctgggttgaaaattctttcctttaagaatgttgaatattggtccccactctcttctggcttgtggggtttctgccgaga

SEQ ID NO: 941485 - DNA, 584 bp, Homo sapiens; identical to SEQ ID NO: 930575

SEQ ID NO: 941486 - DNA, 622 bp, Homo sapiens
taatacataagttttgaaaggtgatggaaactgttaaactaagagattgcttgggaatgacagaatctaccccacattttaaaaagtcatcccatcaatatctattgcaaagtacaatataagtggatgataaaaatataagaaaaatgaaagtagaaaaaataaagcaagccagatgatatggtttggctctgtgtccccacccaaatctcatctcaaattgtaatctctatgtgttgagggagggagatgattgggtgcagggagtggttttctccatgctgttttcatgatagcaagagagttcttatgcaatctgttgtttttataagggttcttcctcctccgttcatctgtctctctcctgctgccytgtaaagaaggtgcccttctactatgactgtaagtttcctgaggcctccctggccatttggaactgtgagtcaattaaacctctgtattggtctgttctcatgctgctaataagaacatactcaaggctgggtaatttataatggaaagaggcttaatggcctcacagttccacatggctggggagggctcacaatcatggtgaaaggtgaaggaagagcaacagcatgccttacatagaggcaggcaa

SEQ ID NO: 941487 - DNA, 653 bp, Homo sapiens
ctgcagtctgttggagtttgccagaggtccactgcagaccttgtttgcctgggtatcagcagcggaggctgcagaacagcggatattggtgaacagcaaatgttgctgcctgatcgttcctctggaagttttgtctcagaagagtacccagccttgtgaggtgtcagtctgcccctaatggggggtgcctcccagttaggctacaaggggatcagggacccacttgaggaggcagtctgtccattctcaggtctcaagctttgtgctgggagaaccactattctctccaaagctgtcagactgggacaattaagtctgcagaattttctgctgccttttgtttggctataccctgaccccagaggtggagtctacagaggcaggcaggcctccttgagctgcggtgggctccaccyggttcgagcttcccagccgctttgtttacctactcaagctttggcaatggggggcacccctcacccagcctcgctgctgccttgctgtttgatctcagactgctgtgttaggaatgagtgagcctcagtgggcataagaccctctgagccaggcacgggatataatctcctggtttgccatttgctaagaccatcagaaaagcacagtattagggtggaagtgaccttattttccag

SEQ ID NO: 941488 - DNA, 789 bp, Homo sapiens
tatcagcctggcaaagctcaaaaactttttcccgttggtccctgttgtctttgatccactccaggtggggagggatgaccttagaatagtaattcacaatggggtctctcggcaagacgaagagcagatagtcaccccgagacaggcctgttgagccttctctagggctcatcaaatgtgaccagacaaataaggagggttttgagttaggtctgctggacttccatcagtaacctcttctgagatcccttccacatatacaaacacacacaaagatgagaggacacaggccttcccaattagatccctaaccaagacctccaggagtatcccttccaaactatctttctattctccytctgagaaacctcctcaaaatcttcctaattgagaagaagtctcccaaaccagaagtcttcctactagttagaaggagccaaccaagactccccaggagctgaacagacaccctccaatggggctacagacacagacatcccatgatggagctacaaatagacatcccaccacagggctacagaaccagtcaggagaaggaaggaggcattggcagtgcataggatactaaccaatctggattagacaacctgcaatggggttacagacagacaccccaccatggggctacagacagacaccccatgatagggctacagttaagggatgtctccccgtgactatttctccactgcaattaaatccatgcacattgggtcagcagtgccccaccagtagtgagagtatcagggtcagcctccagtccaagag

SEQ ID NO: 941489 - DNA, 789 bp, Homo sapiens
tatcagcctggcaaagctcaaaaactttttcccgttggtccctgttgtctttgatccactccaggtggggagggatgaccttagaatagtaattcacaatggggtctctcggcaagacgaagagcagatagtcaccccgagacaggcctgttgagccttctctagggctcatcaaatgtgaccagacaaataaggagggttttgagttaggtctgctggacttccatcagtaacctcttctgagatcccttccacatatacaaacacacacaaagatgagaggacacaggccttcccaattagatccctaaccaagacctccaggagtatcccttccaaactatctttctattctccttctgagaaacctcctcaaaatcttcctaattgagaagaagtctcccaaaccagaagtcttcctactagttagaaggagccaaccaagactccccaggagctgaacagacaccctccaatggggctacagacacagacatcccatgatggagctacaaatagacatcccaccacagggctacagaaccagtcaggagaaggaaggaggcattggcagtgcataggatactaaccaatctggattagacaacctgcaatggggttacagacagacacmccaccatggggctacagacagacaccccatgatagggctacagttaagggatgtctccccgtgactatttctccactgcaattaaatccatgcacattgggtcagcagtgccccaccagtagtgagagtatcagggtcagcctccagtccaagag

SEQ ID NO: 941490 - DNA, 620 bp, Homo sapiens
actctcaaaagatttctcagacagtttacaagaaataacaaaacctatccttactctacaatcccaaatagactctttggcagcagtgactctccagaactgctgaggcctagacctcctcactgctgagaaaggaggactctgcaccttcttaggggtggagtgtttcttttacactaaccagtcagggacagtatgagatgccaccggcygtttacaggaaaaggcttctgaaatcagacaatgtctttcaaactcttatgccaacctctggagttgggagacatggcttctcccctttctaggtcctgtgacagccatcttgctattactcatctcacacttgggccttgtgtttttaacctccttgtcaaatttgtttcctccaggattgatgccatcaagttacagatggtgttacaaatggaaccccaagtgagctcaactacaacttctatggaggacccctggaccaacccactgaccctttggctggcctagagaattcccttctggaagacactaccactgcagggccccttcttcacccctatccagcaggatgtagcttgagtgatcattgcccaattcccaacagcagttggggtgtcctgtttgtt

SEQ ID NO: 941491 - DNA, 643 bp, Homo sapiens
aagttcacctgaatggaggtatcaggacttgttaaatgattgtgggaagagatgtacctggacgtgaatgaggaagactatacctataaatgagcccagaagccatcttggtgcaatgaaagaatcagcctgagatgaaggcaacacaaggaagtgtctagagtcaagggaagtyacagaaacattgccagagacccttcttgttctttgcctaaagtatgagctctctatctttatatttaaaaccagaaaattctcaccctcaccagaaacactgaagtgacacaagagcaggaaataagccttttttgtgtttagccactgagaatttggagttttcatcaaagaaagtagcttaccctgactaataaaagcatttatcccaacattgtaaggatggcttaatatagagggggaaatatatataggacatcacagcattaaattaaagagaaagaaaaaagtcacaaaattatttcaatagatgcaaaaaaactgataaaatttaatattcattactgatttaaagctgtttttaaaaattcagagaaactaaataaatggatgcatccttcaaattggtagcaaatacttgattaaaagctatattcaaaccaattgtttaatacaatggtacaattct

SEQ ID NO: 941492 - DNA, 738 bp, Homo sapiens
cagtgtcaaagttacttcctctgggaagccatgcttaacccaccagggtgtgcctgctgagtccccccacaggcccgatctaccacagcaatgaacacttggtacgatgtggctttgatgattcagcatccttgatggatggccaggtccatgagggcaaaaccaggctgtcttgtttggtawcacctccctggacctgctcactcagtccctgctgagcactgggggtccttggtgagcgagccggacaaggtccttgaccacatggagcgtactggctccggagggagacagatccacctacagggcccataagcgcctgtcgcgtaactgggaccagtgtcttgcaggagaaggggcctggggctctggatgcccaatcaggggacttgccctggactggggagtcagagcaggtatccttagaagtgacatttcaggccaggtgcagtggctcacacctgtaatcccaaaactttgggagactgaggtaggtggatcacctgaggtcaggagttcgagaccagcctggccaacatggtgaaactccgtctctactaaaaatacaaaaataagctgggctggtggcgcacgcctgtaatcccagctactcgggaggctgaggcaggagaattgcttgaacccgggaggcggaggttgcagtgagccaagatcacaccattgcactctagcctgggcaataagagcaaaactccatcaaaaaaaaaaaaagaagtg

SEQ ID NO: 941493 - DNA, 694 bp, Homo sapiens
tgtgcctgctgagtccccccacaggcccgatctaccacagcaatgaacacttggtacgatgtggctttgatgattcagcatccttgatggatggccaggtccatgagggcaaaaccaggctgtcttgtttggtatcacctccctggacctgctcactcagtccctgctgagcactgggggtccttggtgagcgagccggacaaggtccttgaccacatggagcgtactggctccggagggagacagatccacctacagggcccataagcgcctgtcgygtaactgggaccagtgtcttgcaggagaaggggcctggggctctggatgcccaatcaggggacttgccctggactggggagtcagagcaggtatccttagaagtgacatttcaggccaggtgcagtggctcacacctgtaatcccaaaactttgggagactgaggtaggtggatcacctgaggtcaggagttcgagaccagcctggccaacatggtgaaactccgtctctactaaaaatacaaaaataagctgggctggtggcgcacgcctgtaatcccagctactcgggaggctgaggcaggagaattgcttgaacccgggaggcggaggttgcagtgagccaagatcacaccattgcactctagcctgggcaataagagcaaaactccatcaaaaaaaaaaaaagaagtgacat

SEQ ID NO: 941494 - DNA, 577 bp, Homo sapiens
ctagtattcatgggtccaggaatcaaagagtggaagtggcatcacataccatcacctttagtaaaccactagcaaaawtttcgtgtcctgttcctgcaacattatgttctgctggcctaggggtcttagttccagagggaggaatgctgccaccaggagacacatcaatgattccattaaactggaagttaagattgccatctgcacactttggattcctcctacctttaaaccaacagtctaagaagggagttacagggctggctgggatgattgacccagactgtcaagatgaaatcagcctactattccacaacaaaggtaaggaagagtacgcatggaatacaggagatccattaggccatctcttagggttaccattccctgtgattaaggtcaatgagaaactacaacagcccaatccaggcaggactacaaatgaccaagacccttcaggaaggaaggtttgggtcactccaccaggaaaaaaaccatgacctactaaggtgcttactgaaagcaaagggaatgcagaatgggtactataagaagttagtcatcaataccagctacgact

SEQ ID NO: 941495 - DNA, 618 bp, Homo sapiens
cagggcccagtcgccagctttgatgctagcctcctttaaaatgaatgatattagggaaagcaagggagatgtcacaatatctatgacctagcctaggaagtcacacaccataatttctgcaatattttattagttacgtaggtcagtcctattcactgtgaaagggaccaaccacatcatggtatgaatgccaggtgagaactgttgtggatcatcttggagcttgaccatcacaatatgttcccatggtaagttgttgggggaatgtttttaaaaaataacccyctcccaactcaattaatagtcactgttgttaaatattcagaacctattgcccaattttctgattgtaatgagacaatactggaaacaatacatgtaaagagtattaccttaagacaaaatatttggtcagcaggttattgttgacttcatgctacgtgtaggtgccagttacctgtgtgtgtatgtgtgtatgtgtcctcatgctcagatacctctgctgcacaatgggaactatcccactctgtaactcatcaatcattttctcttggcttttcaaaaaatacataactaaatggatttatagccccttcctcccaaacaaactcttcacat

SEQ ID NO: 941496 - DNA, 757 bp, Homo sapiens
gtctgagtattctacggtaaagtaaaggaaacagaagagtcaaaacaatttcgacaaagaagaacaaagttggaggactcatactagctgattccaagacttactataaaggcatagtaatccagagagtgtagtcttggcaaaaagatacatacctagattaatagaggcacaataacgactactaaacagacacacagatatatggccaatttattctggacaaaggtgcaaggcaattctaaggtgaaataacaaagttttctaaaactgattctagaacaattgaatgtccaaatgaaaataaatgaccctcaacccatatctcatacctcaaagacctaatattaagccctgaaatatcaaattactagaggcaaccactgaataaaaatctttttgatcttggaggagacttagacacaataccaaaagcatggactataaataaaaaaatttataaatttgactttatcaaaacktaaaacctttattcaattggctttgctaagaaaatgaaaagaaaagccataaattggaacaaagttttgtaaaacaaatatttaataagccatttgtatccagaatatattaagaaatctcaacaagcaatattatgaaaccacccagtaaaagattggacacagttttgaacagacagttcacaaatgaagatatatagcacaaatcaacacatgaaaaagtgctccacattattagtcattaggcaaattcaaattaaaaccacaatgtgata

SEQ ID NO: 941497 - DNA, 597 bp, Homo sapiens
agaaaatctcgctcatgctctagccctcttcttcaaggtcaaaactgccttctggtggactgaggatcggtgactttgtttccctctatgtccagccagggctggaggaagcttgttgtcagcaggccccttcccagaagacaccacatccacacctgtcactgccsacagtgactggaccctcagcctcaagttccccggtggtaaaacccctgtagatctcccaaccctccaggctcctgtaagcccagccctttaatttctttatttccctttctttctttctttctttctttccttctttccttcctttctttcctttctttctttctctttctctctttctgtctgctacaagtaaactttatttgatgtaatgtaatacaacattttcaagtttcacaatgagcgtttgacataaataatcatttaaattaggaatataagtatgcacggtcacttgagcaaatttgcagttcaggggttggtacgagctttgtctgaaagcttttttctcctttaggaaaaagtagcccttcccttcacctggtaagaagcactatcaatgggagttagaagaagtccataatccacctt

SEQ ID NO: 941498 - DNA, 613 bp, Homo sapiens
cttaaaatccaagtgaagaaagaattttgatttgtttgaagtggtcaactatgtcaaaagatagagtcagatgaaaagagagaattgatttttggatttggctttgtgggagttggagatcttgacaagcactaattcataggagtgatataaatacaactttaattggaggggttcaggagaagatgggaggagaggacatgcagcctgtcaattatatcagcttaactataaaggggagaagagaaaatagggaggtagctataaggagatgtatggtgtatgaagtttttctgtctttctaagacagaagrtatgagagcatgttttgatgctaatgagatgatccagtaaagaaggggaaatttataatgcaagagaaagggaagccaattgcaggatgaataactttgagtaggcatagagaacaagatccagtgcacacatcaccgaatagttcttagataggagtaagaacagttcatctgaagtagcaggtgggacagtagaagagatgggccaagatgctggtaggttggtagatttagtagggaaagtgtgtgggagtgcttttcagattgctgatattttctcaataaaataaaaagtaaag

SEQ ID NO: 941499 - DNA, 613 bp, Homo sapiens
cttaaaatccaagtgaagaaagaattttgatttgtttgaagtggtcaactatgtcaaaagatagagtcagatgaaaagagagaattgatttttggatttggctttgtgggagttggagatcttgacaagcactaattcataggagtgatataaatacaactttaattggaggggttcaggagaagatgggaggagaggacatgcagcctgtcaattatatcagcttaactataaaggggagaagagaaaatagggaggtagctataaggagatgtatggtgtatgaagtttttctgtctttctaagacagaagatatgagagcatgttttgatgctaatragatgatccagtaaagaaggggaaatttataatgcaagagaaagggaagccaattgcaggatgaataactttgagtaggcatagagaacaagatccagtgcacacatcaccgaatagttcttagataggagtaagaacagttcatctgaagtagcaggtgggacagtagaagagatgggccaagatgctggtaggttggtagatttagtagggaaagtgtgtgggagtgcttttcagattgctgatattttctcaataaaataaaaagtaaag

SEQ ID NO: 941500 - DNA, 718 bp, Homo sapiens
gtctccatgagcctcagtttcctcatctgtcacatgataacagcatttaccccacagggttactgtgaggactgagtgaaacaaaatacccgaggacctttgtaccgggcacaggtgggcccctccataagtgagkcactgccactgtcatgtaacacggtaatagttcagcctgggaatgtcttccacagtctgaccacagaaccccctcacctgtgacggggtcactcgcatctccgcccactctacccggggattcagtctaagtggagcctccctcttacccttcccagcctagcctcacgccccaccagtcccctgccacagccacacatacctggaaggccacaccttgccactgaccctgttcccacatcaaatgattttgtcaacatgaaaccaaaccacaaccaggtggatgcagagcctctgtcacactcagtccttgctcctcagtttccttcctgtgtgaccatgggagagtcattcaccctctctgggcacaaactcaatcatttgtaaagaacaggcttcagatcagatattcaagttccttccaccttgagaaacactgcagagattctactatgaagccctaatgaagacgccccatgtaactggctaactccaatgtcaatttccacccaaatgcatccacttaatctaatagagaccgcatggtacaggcaagaagtgttgctttgctaacaagaccact

SEQ ID NO: 941501 - DNA, 718 bp, Homo sapiens
gtctccatgagcctcagtttcctcatctgtcacatgataacagcatttaccccacagggttactgtgaggactgagtgaaacaaaatacccgaggacctttgtaccgggcacaggtgggcccctccataagtgagtcactgccactgtcatgtaacacggtaatagttcagcctgggaatgtcttccacagtctgaccacagaaccccctcacctgtgacggggtcactcgcatctccgcccactctacccggggattcagtctaagtggagcctccctcttacccttcccagcctagcctcacgccccaccagtcccctgccacagccacacatacctgkaaggccacaccttgccactgaccctgttcccacatcaaatgattttgtcaacatgaaaccaaaccacaaccaggtggatgcagagcctctgtcacactcagtccttgctcctcagtttccttcctgtgtgaccatgggagagtcattcaccctctctgggcacaaactcaatcatttgtaaagaacaggcttcagatcagatattcaagttccttccaccttgagaaacactgcagagattctactatgaagccctaatgaagacgccccatgtaactggctaactccaatgtcaatttccacccaaatgcatccacttaatctaatagagaccgcatggtacaggcaagaagtgttgctttgctaacaagaccact

SEQ ID NO: 941502 - DNA, 796 bp, Homo sapiens
ggttttgttttgttttgtttgttgttgttgttgtttttgagatggagtttcggtcttgttgcccaggctggagtgcaatggtgcaatctcggctcactgcagcctccacctcctgtgttcaagcaattctcctgcctcagcctcccaagtaaactgggattacaggtgtgagccaccacacctggctaattttgtatttttagtagagatggggtttcatcatgttggtcaggctggtcacaaactcctgacctcaggtgatccacccaccttggcctcccaaagtgctgggattacaggcgtgagccactgcacccggccccctggtatttctttatggcagcacaaaaatggcctaatacaacttatttcttccactttcttttaaacaagrggtggataaatcaacacaaggggaagagtaaaactgttccctggcctggttgactgcatttgagcaaacatgcccatgacctatctcacttgaaacactttccacactaggtcttttagaatgcatgttgtggcagaaactgtcagtcatctcctcgaatctactctttcctttcttattgagtgacaagcaccatgactactttctgagccataagatacaagcagagttagatcttccagggagtcctcttaaaagagagagaacacgcccttttctatgtcttcctgctgctagaactcaagtagccaccttgggccatgaggttcagggccacaacccctctgaatggtagatgagaaaactggaaagagcctgggaccctttcaactgtaaagtgcc

SEQ ID NO: 941503 - DNA, 661 bp, Homo sapiens
tccagactgggtgacagaacgagactccatccaaaaagaaaaaaacaattattgaggatcccttctgcatgatgagtcagttttctctcactactttcacagtgctatctttgtttctgtctttcagcagtttgattataatgtaactcagcataggactcttttgagtttatcctacgtggagtttgttgacctttttatatatccatgtcttccctcaaagttggggagttttggccattatttcttcaaataagctctctgcctctttctttccggtataaagattagtgtgggggtgtctccattgttcttttttttcccctcaaacttagagctggaagaaacyttagacatcctgtgggccagaatttcatattaccttccacaaaactaacttccagagaggtcttcaggaagttggcaaattttagttacgtatttttaaagtgtctttgaacttttaagaactacatctcgttaattatatgtattcgtatatattattatccaaattttaacaaattagagtgcattggtgctttaaagtgctgtcaactactctgagaatgcaaaattcttgttttaaaatgtgtatcttacaactccttccttggatgaattagatttttttagatggagaaaccaaaatcaagtacag

SEQ ID NO: 941504 - DNA, 572 bp, Homo sapiens
ctgcttggagacccctttctttatagagagagctgtttctccttctcttctcttctcttctgcctattgaacctccaccttgtgtgtgtccatgtcttaaattttcctggcccatgacaatgaaccccagggtatataccccagacaacacagtcgcttcaaaaagatttatctattctgttcctagaaaatctcatagtttctgcccaaaagctcctagatgtgataaacaactttagcaaagtttcaagatattaatacaaaatcaatgtacaaaaatcagtagcatttctatacaccaaccatgtccaagctgagagccaaaycaagaatgcaatcccattcacaatagtcacaaaatgaataaaatacctaggaatacaactaacaagaaaggtgaaggatctctactatgagatttataaaacactgctcaaaaaatcagagatgacataaacaaatggaacaacattccgtgctcatggataggaagaatcaatattgttaaaatgcccatactgcccaaactaatttacagattccatgttattcatatgaaactaccaatgaca

SEQ ID NO: 941505 - DNA, 484 bp, Homo sapiens
ttcattcctactggatccagatatacccactgagtctcaacacattattcccatagccattaattatcctcagaattggatgtaagttgaaggctgtttgtcataccttcacaatatgatggatactaaccatatgttagtatataatacaatgatatgatgttgtgytaatcataacctaaacagattacttgcaattttacagcccttgtaaaaaaatcttaattttttttatctgaatccctccccatccttttagaacaaagaccgattctatatgataaccagtgttctgcatactctggccccttcctgcctttccaacctcatcttgaacttctttaacccattttttctgtggtctagacacagagagaatctttcagttcctcaaatagtctatgctccttctgccataaagcctttgctcatgcttttctttctgtctgtgatatttatcctttccttctcttcttcctttaga

SEQ ID NO: 941506 - DNA, 629 bp, Homo sapiens
gcttcataaaaatttttcagcattgtgtgctgggcacttccagttctgtgaactcatgaaagtcaaccaaccaggtctaaagacagagactgcttccacagagaacaggatcacagaagggtaccactctttggagatgctgccaggaagttaaagacacctccaactcttttttttaaaattttttatttttaaatcttctacctccaacctgctggctctctctgtactaccactctagaagacaggatgggatagaagaactgtgtgtattaggtctgtctctctacaaccccagagactgagtagcctgcttrgagatagatccgtgattagaggaaattttcccttgtcttctttttctcaagtgtgtatttctttgctccagattcccatcttcctctctactttgaatattaagagctaagcttaggtgattttgtactactaaaacaataaagatgtacaactcaatatccagtttaaattgaagaaaaatacaacaagactaacttactgttttgctggacacaaaatccatagaaaacttgtcattgtaacactgagggagagacagctttatctatgtaaaccactgacaaatattgtgaggtgaacactgctgaaaa

SEQ ID NO: 941507 - DNA, 734 bp, Homo sapiens
gaatgggattgcattcttgacttggctttcagcttggatgttgttggtgtacaggaatgctactgatttttgtacactgattttttatcctgtaactttgctgaagttgtttatcagatcaagaagcttctggacagagactatggtgttttctaagtatagaatcttatcatctgcaaacagggatagtttgcttttctctcttcttattcggatgccctttatttctttctcttgcctgaacactctggttaggacttccaataccatgttgaataggagtggtgagagagggcatccttgtcttgtgccagttttcaaggagaatgcttccagcttttgccaattcaatatgatgttggttgtgagtctgtcatagatggctcttattattttgaagtatgttccttcaatgcctagtttgttgaggatttttaacataaaagatgttgaattgtattgaaagccttttccgcagctattgagatgataacgtggtttttgtttttagttctstttacatgatgaatcacatttattgatttgcatacgttgaaacaaccttgcatcccagggatgaagcatacttgattgtggtgagttagctttttgatgtgctactgggtttagtttgctagtattttgttgaggatttttgcatctcagttcatcaaggatattggcctgaagttttctgtttttgctgtatctctcccaggttttggtatcaggat

SEQ ID NO: 941508 - DNA, 621 bp, Homo sapiens
gcaccaggtacatatctcaggtttccaaccccagaccctggctcttagacagcatttctggacccacctagggtccaagggaactcgttgccctgaagggagggacacaaacctaactggctttgccacctgctgactatagagccctagggccttgagcaaacataggcaatagccacggagtagatacagcaggccttgggtgagatccagtgctatgttggcttcaggtctgacctagtgcagtcccagcggtggtgatcacagtggtgcttgtgtcacccctcccccagctccaggcagctcagcacagatacagcaactgtgtttgtttgggaggaagtaaaaaaacaagagtgtctgcgtgataatccagagaattcttccagattttatccgagaccaccaacattgtccctctgtgaatatgcaagaaccacagtgttactgggcttgcggtccccyctaatgcagatatggctgcagtgaccaaaaacttagatcacaatactcgagtctctttgaatacctggaaacccttccagggataggtacaaacaagcctacactgcaaagactacaataaatacctaactcttcaatgctcagaaaccgacaaac

SEQ ID NO: 941509 - DNA, 583 bp, Homo sapiens
tatcaatcttgaatcataaagaaatccaaaacctgaacagaacaataacaagtaatgaaatcaaagccataataaaaaatcctccagcaaagaaaagcctgggatctggtggcttcactgctaaattttaccaaacatttaaagaagaactgatcccaatcctactcaaactattccaaaaaacagagaagggaatactttcgaactcattctacaaggccagtattatcctgataccaaaaagaaaaacacatcaaaaaaagaaaactacagaccaatatccctgatgaacattgatgcaaaaatcctcaacaaaattactagtaaaccgaattcaacaagaygttaaaagctcattcatcatgaccaagtgggatttatcccagggatgaaagaatggttcaacatacacaaatcaatgtgatacatcatatcaacagaatgaaggacaaaaagcatatgatcatttcaactgatgctgaaaaagcatttggtaacattcaacatccttttatgataaaaaccatcaaaaaactggacatagaagttacatacctcaacataataaaagccatatacaaca

SEQ ID NO: 941510 - DNA, 592 bp, Homo sapiens
tcactccaaaacttaatggcttaaaacaacaaaaacagattatcttatggtttcagtgggttttgaatccagggggccttgctgttgagtatcctctagctcagggtctcttccaaagctgcaatcaaggtgccacctggggctgtagtcatctcaaggtttgatcgggtgactttttcacttagctgctgacaggcctcaagtctttgctgtcctttggccagatacatcagctcttgccctgtgggtctttccatggagcagcttgcttcccttwgaacaagagctgaaaaagagacagagagggtttgggagagagaggggtgggagcagaagtcaccatctgagaagggaaatcacttggtcatattcaatgttagcagcaagtccagcttatactcaaggggaggagtttacacaaaggcgtgaataccaggaggtggggattgaagtcatcttagaggctgcctaccacagaaggaatgagatctagtgtgcagtagagaggctgacccttgctgggagcagggattgttcctcagcagcacagaagagaaggcagcgtctatgggtacacagagcctagtaagtg

SEQ ID NO: 941511 - DNA, 420 bp, Homo sapiens
accatgtttgccaggctggtctcaaacttctggcctcaagtgatctgcccactttggcctcccaaagtgctagaattataggcatgagccattgtgcccaaccaatatttgtttatttaaaggatgaatctacagatatggtctgggttttcgtgtgtttgtttgttttttttgagacagggtctctctctgtcacttaggctggagtacagtrgcgcaatcagggctcactgtagctttgatgtcctgggctcaagcaatccttccccctcagcctctggagtagccgggactataggcatttgccaccatgctcagctaattcttcttttcaattttatgtagagaaggggtctcactatgttgaccaggctactgctgacatggtctgtgccaccctgtcctggggatcataaggtt

SEQ ID NO: 941512 - DNA, 612 bp, Homo sapiens
ctagtccaagctcataatttatctctttctcttacctctccccaaactcccagccccgtttctgccagggctagtattgcttctcaatactattgcttcaggcttttataaaagaaaaaacatttaatatcccaaaaatcatataatgcagttactagttttatctctcttttatgaatgaggaaattgagggcagggcagatggagtagcatgcccaaggctacaaagctagaaagtgtcagaacccagatgtgaacacagcctagcaccagggagatccagttaccttgttgaatgggggaaaacaaatattagaataacatgcggtggctcatacctgtaatcccagcattttgggaggccaaggcgggtgggtcacctgaggtcaggagtttgagaccagcctcgccaacatggtgaaascttatctctagtaaaaatccaaaaattagccaggacatggtggctcgtgcctgtaatctgagctactcgggaggctgaggcatgggagtctaagacagaagaatagaagaattgcttaaacccgggaggcagaggctgcaatgagctgagatcgtgccactgcactccagcctgggcaacaggctttt

SEQ ID NO: 941513 - DNA, 663 bp, Homo sapiens
atgcagggcaccacgttctaaggctgcacacagcaggagggtcctgagcctggcccatgaaaccatttttccctcctcggcctctaggcatgtgatgagaggggctgcattgaggttctctgatatgcccaggagatattttccccatggccttggtaattaacattcagctccttgttacttatgcaaatttctgcagaagaccttgaatttctccccagaaatggggttttctttcctatcaaatcttcaggctacaaattttccaaacttttatgctctgcttcctcttgaatgctttgccgcttagaaatttattccaccagacaccctaaatcatctttctcaaattcaaagttccacacatctctctggtagggrcaaaatgccagtctttttgcatagcaagactcatctttactccagttcccaacaagttcccttctccatctgacatcacctcagcctggacttcattgtccatcttactatcagcatttcagtcaaagccattcaagaagtctctagcaagttccaaactttcccacatcttcctgtcttctgagccctgcaagtctttaggaagctccaaactttcctacattttcttgtcttcttctgagccctccaagctgttccaagctctgttatccagttccaaac

SEQ ID NO: 941514 - DNA, 663 bp, Homo sapiens
atgcagggcaccacgttctaaggctgcacacagcaggagggtcctgagcctggcccatgaaaccatttttccctcctcggcctctaggcatgtgatgagaggggctgcattgaggttctctgatatgcccaggagatattttccccatggccttggtaattaacattcagctccttgttacttatgcaaatttctgcagaagaccttgaatttctccccagaaatggggttttctttcctatcaaatcttcaggctacaaattttccaaacttttatgctctgcttcctcttgaatgctttgccgcttagaaatttattccaccagacaccctaaatcatctttctcaaattcaaagttccacacatctctctggtaggggcaaaatgccagtctttttgcatagcaagactcatctttactccagttcccaacaagttcccttctccatctgacatcacctcagcctggacttcattgtccatcttactatcagcatttcagtcaaagccattcaagaagtctctagcaagttycaaactttcccacatcttcctgtcttctgagccctgcaagtctttaggaagctccaaactttcctacattttcttgtcttcttctgagccctccaagctgttccaagctctgttatccagttccaaac

SEQ ID NO: 941515 - DNA, 739 bp, Homo sapiens
gcagaatcatctgtgaaccaggacctagtattctattcctctgtcaacttttagggaactccccatgaggtcactggtgcaggctgagagagagaaggcagggtggcaggagaagagatcatgggcatttgagccacttcctcatgtaacttacttgtgccttcaggagctgcttgaccccagccacgtatatactacttgcatttgataatgaaatcctgctgtgcataccccactttatggctagaagggtcagaaagcacccagktcatgataggcagttcaggtcacatggagacttgatgacccatagtcaaatgttcagtttctagtttctaccaaagctcagtaacaggccaggagctgtctctcaaaaggagagtagttatctgcagataatggcagggtctaggtccacaatcctagaggtctcctctgtgacctatggaggcctgccaaaggccccaaacagcatccctatctgccactgacacctcaaacatcattcgatccactggatcatatggcccaagtggcagagaagctttcacagcagcctggacctgtttcagagcctcctccagttctggaccccactcaaaactggcagcctttcaggtcactcaataaatgggccagagtaacacactcaaatgagaaatgtgttgcctcccaaatccaaataggcccactaggcattgtgcctctctcttggttgtaagaggggcctaatgcagta

SEQ ID NO: 941516 - DNA, 587 bp, Homo sapiens
cagcctttcaggtcactcaataaatgggccagagtaacacactcaaatgagaaatgtgttgcctcccaaatccaaataggcccactaggcattgtgcctctctcttggttgtaagaggggcctaatgcagtaacttatgcttcaccttagaaggaatatcttgacaaaccccacaccactggaccccctagaaattttactgaggtagaaggtccctgaattttagttggayttatttcccatcctctggcatgcaaatgtctcaccaataagtccagtgtgtttgctacttcttgctcactggatccaatcagcacaatgtcatcaatgtaatggaccagtgtgatatcttgcagaagtgaaaagcgaccaaggtctctccaaataagattatgacacaaagtcagagagttgatatacccttgaggtaggacagtaacagtatattgctggccttgccagctaaaggcaaattgcttctggtgggcctaatggacaggagtggagaaaaaggcatttgccaagtcaatggctgcataccaggtaacaggggatatgttaatttgctcaagcaatgaaaccacatc

SEQ ID NO: 941517 - DNA, 609 bp, Homo sapiens
gaggctgagggagtggagctctgagaccactacttaatttatattttctatactagagttctataaccacctttgcaaaatgatgacagtagaagaaatctgtcatggctgaccccatcttgcttctagtcttacaggctggctgtctttgctcattcctgggtgtaagccaagctatgtttgggagacatttagtttatagtttaaatgatagcgggtcttcccccaaagcttaactgcctttgcagagctaatgaagggccatcaggttaggaggacgttagaaggttgaattctgctaaagtgtagacataaaccattaccagccattattctggaggtcagaagataccttctctaattactcaacttctctaattactcctgcagataacgtcactattgcagaacctaagattggycttttgagatggcttttcaggtttttgcatttctgactaccaatggctccaactggacccgcggactccgccaactggtcctgtggccccacccacaagcagactccctggcccgccaaactatcgttgaaaaaccctagcgtctgcattttcagagagattgatttgagtaataacaccaacttcc

SEQ ID NO: 941518 - DNA, 706 bp, Homo sapiens
tgttaagttcatgatattaatatggttgtgcaactattactaccattcatctcgagaactgttccatctcccaaactgaatgtccatactcattaagcaacagctcccatttctcctcctcctcccagaccccagaaattactgttctactttctttctctacaaatttgactwctctaggtacttcaaataattggaatcatatgctatttgctcttttgtgactgtcatatttcagttagcataatgtcctccaggttcatccctgctgtagcatgagtcagaatttcttttctttttaaggctaaataatattctattatatgtatataccacattttccttatccatttatcaatcagtgaacatttgggttgtttctgcctgttggctgttgtgagtaatgctgctgtgaacatcagtgtataaatatctgttctgcatacatcaaaataataagagccatgtatgacaaacccacagccaatatcatactctaatgggtaaaagccggaaggattccccttgaaaaccgacacaagacaagaatggcctctctctcaccattcctattcaacatagttttagaagttctggccaaagcagtcaggcaagagaaagaaataaatgacatccaaataggaagagaggaagtcaaactatccctgtttgcagatgacatgattctgtatcctgaaaaccccaa

SEQ ID NO: 941519 - DNA, 709 bp, Homo sapiens
atattaatatggttgtgcaactattactaccattcatctcgagaactgttccatctcccaaactgaatgtccatactcattaagcaacagctcccatttctcctcctcctcccagaccccagaaattactgttctactttctttctctacaaatttgacttctctaggtacttcaaataattggaatcatatgctatttgctcttttgtgactgtcatatttcagttagcataatgtcctccaggttcatccctgctgtagcatgagtcagaatttcttttctttttaaggctaaataatattctattatatgtatataccacattttccttatccatttatcaatcagtgaacatttgggttgtttctgcctgttggctgttgtgagtaatgctgctgtgaacmtcagtgtataaatatctgttctgcatacatcaaaataataagagccatgtatgacaaacccacagccaatatcatactctaatgggtaaaagccggaaggattccccttgaaaaccgacacaagacaagaatggcctctctctcaccattcctattcaacatagttttagaagttctggccaaagcagtcaggcaagagaaagaaataaatgacatccaaataggaagagaggaagtcaaactatccctgtttgcagatgacatgattctgtatcctgaaaaccccaaagtctcgcccccaaag

SEQ ID NO: 941520 - DNA, 601 bp, Homo sapiens
ctctgtgggctgaaactatgggtgaaccccaagagctcaggccacggagatgcacacagagggaaagagctgggtcacaggaactgacaacgtcaaaacatgatgcacaatttccagggtccatcccccttcagtggttcccaaacacccagggcctgtggcatctaatcacatggaaaatgtttagaaaaataaagatcctcccctgccctgggccactgagtcaggttgggtggtggtagtggggaaggatgttggctgagaatttattttgaaaagctcctcaaatgattctgacacctggaaaaatttgggaaccactggaccttcaggttaagcttacttaaaccacaccacatgctcaggttgttctaggacatatgccttttgttgcctgtccaygcagcaagccacaagttgcaggcaatggattctgattgcattggctggaaacctctgcgttagccaatgtgtaccactgaatgttccttattccaacgaataggacaaaatccttccatccgtccacgctgacctctccgcctggagcaactttcccacccaaaacagcccatcaaattctggctcatccctcaaaagt

SEQ ID NO: 941521 - DNA, 619 bp, Homo sapiens
acctagtgggtctatgtggattttggaggcaacacattcctcatttgggtgtgttactccagcccatttatttagtgaccccgaaggctgccagttttgagtagggtccagaacagtagaaggttctgcaacaggtccaggctgctgtgcaagctgctgtgccacttgggccatacaatacagtagatccaatggtgcttgaggtgacagtggcagatagggatgctgtttggagcttttggcatgcccccataggtgaatcacagcagaggcctctaggattttggagcaaggctctgacatcttcttcagataactactctccttttgagagtcagctcttggcctgttactgggctttggtggaaactgaacgtttgactacgggacatcaaattaccatgttacctaaacagcctatcatgaattgagtgctttctgacccatctagccataaagtgggtcatgcacagcagcattccatcatcaaatggaagtggtatgtatgtgattgggctygagcaggtcctgaaggcacaagtaagttacatgaggaagtggctcaaatgcccatggtctccatttctgccaccctgcctcctctcccccagcctgcacc

SEQ ID NO: 941522 - DNA, 728 bp, Homo sapiens
gcatatgaaagttatgtttatagcagagtgcaatagcattatgtcttagaaaacaatgtatatctcttaatttaaaattgctttattgtgaacaaatgctgacaatgatctgagccttcaacgagtggtaatagttttgctggtggagggtcttcccttgacattgatggctgctgactgattagggtggtggttgctaaaggttggggcggctgtgttaattccttgtttttcattaataattgtctatattgatacacattgaaatgataacattttagatatattgggtaaactaaaatatattgctgtaattcattttaactgtttcttttttgctttttaaaatgtagctgctagaaaagtttaaataaaatacasagctcacatagtattcctattagacagtgcattttttcagattcttttaaaatagtttcaacttttattgtagattcaaggggtatatgtgcaggattgttacctgagtatatttcatgatgctaaggtttggggtatgattgatcccatcacccagatactaagcagagtacccaatagtttttcaaaccttagtcccctagccacgcttcccctctagaaatctgcagtgtctattgttttcatctttatgtctataagaactcattgtttagctcccacttataagtgagaacatgccgtatttggtttctgttcctgtgttaatttccttaggctgatggcct

SEQ ID NO: 941523 - DNA, 640 bp, Homo sapiens
agcctcgtcttccagctccacttataattctagttctcttgattcttccaccacattggcagttccttcctccactgaagccttgaacccctcaaagtcatccatgaggattggagtcaatttcttcaaaactccttctaatgttgctattttgacctccttccatgaaccatgaatattctkaagggtatcctaaaatggtaaatcctccccaaaagttttcaatttacattgcccagatccatgagaagaatcactatttatggcagctaaagccttatgaaatgtatttcttaaataataagacttgaaaatcaaaattactccttcatccatggactgcagaatggatactgtgttagcaggcatgacaacaacatacatctccttgtacatcttcatcagagctcctgtgtgactaggtgtattgtcgataagcaagaatattttgaaaggaatcttttcatctgagcaggagatctcaatagtgagcttataacattcaataaaccatgctgtaaacagatgtgctatcttccaagcttttctgttgcatttatagaatacaaacagagtagatttaacataattctgaggggccttaggattctcacaatggtaaatgggtggcttcaactca

SEQ ID NO: 941524 - DNA, 604 bp, Homo sapiens
atataattacacaggtaaatatttcaatatgtacactaaaagataaggggtatgtaaaaatatatactcataataccattttatgtctaacattagcaatgattctttaatatcatcaaggatgcaggacatctaaaaatttatagtggtctcagaatgtcataattttttaaatagttcatttgaatcaggatccagtaagttccccacatcgtaattttaatgtatatgtttcttctccaacttgttttcttccttttgtaatttatttgttggaaaaaaaaacaaaacaggttgtttgcctgtagtgtttsccattctgggttttgctgattgtacctctgtggtacagtttaacatgttcttctgttttctgtagttcctgaaaattactagttgtaactagaggtttgatcagattcaggtttaatttttttattttaacaagacaactttataggtggcactgtgttcctcctcagtaggtacataatctctacttgtttttcgtgatgttagcagccattgatgcttaaagccttaattcattgtgggctgcaaaatggtaatattctaattctatcacttgtctggaatttttttc

SEQ ID NO: 941525 - DNA, 614 bp, Homo sapiens
cttgttggccatttgtatatcttcactggtgaggtgtctatttaagtcctttgccccacttttaaattgggttgtttgtctttttgttgttgagatgtgggagtttgttatatattctggatactaggctttcgtcagatatatcattcgcaaatattttctcttattctgtargttttcttttcactttctttttaatgtcccttgaaacacaaaggttttaaattttgaagaagtctaatctatctgccttttcttttgctgctaatgcttttgatgtcacatccaagaatccattgccaaactcctttggtaatgatgaagactgatctgcttttatttcattaattttttaaaaataaattttattatgtatatttaaggcttataacatgatcatgttatggaatacatatagatagtaataaggttactatatggaagcaaattaacatatccatcatctcacagttactttttttgcatgtggcaggagcagttaaaatctactcatttggtatgaattgcaaatacagtgcaagtttattgtttatctccctcatgttatacattacatttctagacctgtttattctacatatctgctactttgt

SEQ ID NO: 941526 - DNA, 790 bp, Homo sapiens
atggctattataaaaagagaagaaagataaatgttgtcaatgatgtggagaaaagggaatctttacacactgctgatggaaacgtcaattagtatagccattatggaaaacagcttggacgttcctcaaaaaactaaaaatagacctaccacatcattcagcaatcccagttctgggtacaaatccaaaggaattaaaatcggtatgtcaaaaaggtatctgtactcccaagcttactgcagtattactcacaatagccaagatatgggaacaatctatgtgttcatcaatggatgaatggataaaggaaatgtggtgtatatgcctgtggaatactattcagcctcaaaaaagaaggatgttctgtcatttgcaacatgggtgaatctagaggacattatgttaagtgaaatatgccaggcatggaaagacaaacactgcatgatctcacttttaggcagaatctagaaagmtaaactcataaaaatagagggtagaatgatggttaacagagcctgggggtaagggtggaggtgcatggagagacagaatttggtcaaagggtacaaagtttcagttagataggaggaataagtttaacagatacattgcatgtcatggtgactgtagttagcaatggtaatgtattgtatgttccaaaattgctagaaaagtagaatttaactgttcttttcacaaagaaatggtaagtatgtgaggcaatgggtatgttaattagactgacttaatcattctgcaatgtatacatgtgtcacaacacacatcctac

SEQ ID NO: 941527 - DNA, 571 bp, Homo sapiens
caggagtttgagagtagcctggccaacatggtgaaaccctgtctctactaaaaaatacaaaaattaggctgagcgcagtggctcctgcctgtaatcccagcattttgggaggccgaggcgggcagatcacctgaggtcaggagtttgagaccagactggccarcatggtgaaaccctgtctctactaaaaatacaaaaattagccaggcatggtggcaggtgcctgtaatcccagctactcgggaggctgaagcaggagaattgcttgaaccctggaggtggaggttgcggtgacctgagatcgtgccactgcactccagctgggtgacagagcgagactccctctcaaaataaataaataaatacaaatacaaaaattagctgggcatggtgacgtgggcctgtaatccgagctactcgggaagctgaggccaggggaatcgctttaacacgggaggcagaggttgcagtgagcctagattgcgctactgcactccagcctgggtgacagaataagagtctgactcaaaaaaaaaaaagtattctttaatgtttggtctactatgactaa

SEQ ID NO: 941528 - DNA, 754 bp, Homo sapiens
tacctctggctagagtacttaatttaaatattcagcactcaagacagtgtgatattggcataaagaaagaacattattgagagcccaaaactggaaatgcacaaatattattatttgatttttgagaaatatcagaattcagtgggagaaaggacaaacataattcaatcagaaaagaacaggaataggacaatcttttaaataaatgttggtagaacaagttgattccacctggaaaaggtaaataccaccacctcacaccatacacaaaaataactcaaaactaaatatagacaaaaaagcaaaaatcatattataaacttgtaaaagaaaggataagataaaaatttcagacttgtggggtggggaaacatttcttagaatacaaaagcactaagtgctaaaaaataaaagattacatttcaccaagataaaattttgttcttcaaaaggtttctctaagaccatgaaaatgtaagccacagactgagagaaaaatatttgcagtgcacatatctgacaaagaaagtgtattaataatatgtaaagaacscttaaaactgaaaaataagaagatgtaacccaatttaaaaagaaacaattctgaacatacacattgcaaaaaaggacatatgaatgctcaataagcaagaaaagaaaagatgttcagtaccattattcttcaaggaaattcaagttaatatacacctactagaattactgaaattaaataattttcctatgttgctaatgg

SEQ ID NO: 941529 - DNA, 732 bp, Homo sapiens
cgatcacccctttctttgactcggaaagggaactccctgacccttgtgcttcccaagtgaggcaatgcctcaccctacttcggctcgcgcatggtgcgtgcacccactgacctgcgcccactgtctggcactccctagtgagatgaactcggtacctcagatggaaatgcagaaatcacccatcttctgcgtcgcttacgctgggagctgtatacgggagctattcctgttcggccatcttggctcctccctctgggagaaatcttaaacaacattatgctcaagggcaatgggtcccagtaacagccctaacgctatgggctttagttagagcggctctggttcattgcaaccagaagagcctaaaaaggggaaggaggaggaaccatcacctgccttaccacttcctcttccctcagccccaatatcaccaagccaaaataacaaagatgaatggaggttttgcctgagctccctcctccaatagatgggaaaaraaatgggatatgctctaggtatggaaccctgtcttaagcggcattaaaaggggagccgttcacctgcccagtaatgcaagatcaacgaggcaatcataaacccattttttttttttaacgcttataaaaagattttgaaaagcatcagaggccagagttgtgcggccaagcaagcagtaggtagaaagaaaggctcggcagcggggaagctcacaaatccgcagccagctaatgc

SEQ ID NO: 941530 - DNA, 620 bp, Homo sapiens
acagtcttagctgcaggcagcctcaaactgggtaatgcaattaatgccgctttcccaaacattccttcctgtgctcacaatagcaaagacttggaaccaacccaaatgtccaacagtgatagactggattaagaaaatgtggcacatatacaccatggaatactatgcagccataaaaaatgatgagttcatgtcctttgtagggacatgaatgaaattggaaatcatcattctcagtaaactatcgcaagaacaaaaaaccaaacagtgcatattctcactcataggtgggaattgaacaatgagaacacatggacacaggaaggggaacatcacactctggggactgttgtggggtggggggagggggaagggagagcattgggagatatacctaaygctagatgacgagttagtgggtacagcgcaccagcatggcgcatgtatacatatgtaactaacctgcacattgtgcccatgtaccctaaaacttaaagtataataataaaaacaaaacaaaacaaaaaaagccaggaaagtaatgaattccactttagctgggaggtctgtcatggggaacaagcctatagcctccaactaggcaattataacatcttaga

SEQ ID NO: 941531 - DNA, 622 bp, Homo sapiens
ggaagccccttgtaaaaccatcagatctcgtgagaacttactatcaagagaacagtatgagggtaactgcccccatgattcaattacctgccactgaaccctcccatgacacatgggagttaggggaactacgaggtgagatttgggtagggacacagccaaaccttattaccttctaacaayaaaaaaggccaggaccagatagatttgtagctgaattttgccagacatataaagaaaagctggtatttaggaaagaatactgaaactatttcagaaaattgaggaggagtaattcctttctaactcattctacaaaaccagtatcaaagtcaggtgaggacaccagtatcaaagtcaggtgaggacaccagataccaaagtcaggcaaggacacaaccagaaaagaaaaccacaggccaatatccctaatgaacataggtgcaaaaatcctcaacaaatgctgaatccgacagcacatcaaaaagataataaatcatgatcaagtgggttttattccagggatgcaagaatgtttaagcatatgcaaatcaataaacatgattcaccacataaatagaaccaaaccccaaaactgtatgattatctccatagatgcaga

SEQ ID NO: 941532 - DNA, 814 bp, Homo sapiens
ggccaaagtgttccgggactgctggttacaatgctccaattggtgcattggagccaaaatgcttcactgggcagtgccagtgggatctgtgctcatatgcatgtgttagcaacagcaatgtggtagggtgcatgcttgtcaactgtgctggtgggcatggtggtgctggcctccatgtgggcattcacagtgatggcagtggtggttcagcacatggtggggtggggccctagcatagtgcatgtgttcaccctggtgatggtgtcagcttgstgtagggaaccggtgggttcagggctggtgctctccatgcactcattcattctgctggcagtggtggtacagggtggggtaaagggcccctgggttctgtgtgcagattcatactagtagcagtgtcagtgtgggagtgaggcactgatggccatggcactggagctctccagcagtcaggcacactctgcctgagctataatataggccctcaggagctataatataatataggagctataatataatataatataatataataaacaggagctataatataggccctcaggaggcacccaggctcagtatctgaggctgcactgcaagcaaccatgtacaggctggggccctaggagaggccagcagacagggttgtgcacaggttggacctgcctcatctcatataccagattttcctgctttgttcaagtccagcagttcccctgaggctaaagtctctgagggaaacaagactagctttgggggatgggcgtccctagccgtgctccactacagatgctcccacaccaagacccct

SEQ ID NO: 941533 - DNA, 814 bp, Homo sapiens
ggccaaagtgttccgggactgctggttacaatgctccaattggtgcattggagccaaaatgcttcactgggcagtgccagtgggatctgtgctcatatgcatgtgttagcaacagcaatgtggtagggtgcatgcttgtcaactgtgctggtgggcatggtggtgctggcctccatgtgggcattcacagtgatggcagtggtggttcagcacatggtggggtggggccctagcatagtgcatgtgttcaccctggtgatggtgtcagcttggtgtagggaaccggtgggttcagggctggtgctctccatgcactcattcattctgstggcagtggtggtacagggtggggtaaagggcccctgggttctgtgtgcagattcatactagtagcagtgtcagtgtgggagtgaggcactgatggccatggcactggagctctccagcagtcaggcacactctgcctgagctataatataggccctcaggagctataatataatataggagctataatataatataatataatataataaacaggagctataatataggccctcaggaggcacccaggctcagtatctgaggctgcactgcaagcaaccatgtacaggctggggccctaggagaggccagcagacagggttgtgcacaggttggacctgcctcatctcatataccagattttcctgctttgttcaagtccagcagttcccctgaggctaaagtctctgagggaaacaagactagctttgggggatgggcgtccctagccgtgctccactacagatgctcccacaccaagacccct

SEQ ID NO: 941534 - DNA, 696 bp, Homo sapiens
catgatgccacttcaccttgtcacacgaacagcctggctgctcacacaaagcctgttcgtggactctcttcacgtggacgcgcgtgacacaccttaagtgctttaatatgtactcctaagagcaaaaacattgtcttttataatcccagtgccattattacactcaagaaacctaacattgatattttaagggacactttttcaaaaaaaaggtaaaattatgactygtacagatactaaaaaaaaaagttaaagatttattcaattcattaataatgaggaaactgcaagacgctactgccagttcaaaagataatccaaagaagacacacatttattgataaggatactgaaaggaataagcaaactgaggcaaaactggctgcttcttgtctgtggtcaaggattgttttgcattgttatccatgatctacaatttattgagttgtaaaataactcaaaggccgtgaaaggtgcagagcccctataggatcaaaattagataaccctgaagggtgggtgggtgggttctagaccttttcctataaagggctagattgtaaatgtttttggttttgcaagccatatggtttttgtacagatactcaactgtcagtgaacatgcaagtaatcttagacaatatgtgaagggtgaatgctgctgtgtgccaataaactttatttacaaacacaggt

SEQ ID NO: 941535 - DNA, 696 bp, Homo sapiens
catgatgccacttcaccttgtcacacgaacagcctggctgctcacacaaagcctgttcgtggactctcttcacgtggacgcgcgtgacacaccttaagtgctttaatatgtactcctaagagcaaaaacattgtcttttataatcccagtgccattattacactcaagaaacctaacattgatattttaagggacactttttcaaaaaaaaggtaaaattatgactcgtacagatactaaaaaaaaaagttaaagatttattcaattcattaataatgaggaaactgcaagacgctacwgccagttcaaaagataatccaaagaagacacacatttattgataaggatactgaaaggaataagcaaactgaggcaaaactggctgcttcttgtctgtggtcaaggattgttttgcattgttatccatgatctacaatttattgagttgtaaaataactcaaaggccgtgaaaggtgcagagcccctataggatcaaaattagataaccctgaagggtgggtgggtgggttctagaccttttcctataaagggctagattgtaaatgtttttggttttgcaagccatatggtttttgtacagatactcaactgtcagtgaacatgcaagtaatcttagacaatatgtgaagggtgaatgctgctgtgtgccaataaactttatttacaaacacaggt

SEQ ID NO: 941536 - DNA, 696 bp, Homo sapiens
catgatgccacttcaccttgtcacacgaacagcctggctgctcacacaaagcctgttcgtggactctcttcacgtggacgcgcgtgacacaccttaagtgctttaatatgtactcctaagagcaaaaacattgtcttttataatcccagtgccattattacactcaagaaacctaacattgatattttaagggacactttttcaaaaaaaaggtaaaattatgactcgtacagatactaaaaaaaaaagttaaagatttattcaattcattaataatgaggaaactgcaagacgctactgccagttcaaaagataatccaaagaagacacacatttattgwtaaggatactgaaaggaataagcaaactgaggcaaaactggctgcttcttgtctgtggtcaaggattgttttgcattgttatccatgatctacaatttattgagttgtaaaataactcaaaggccgtgaaaggtgcagagcccctataggatcaaaattagataaccctgaagggtgggtgggtgggttctagaccttttcctataaagggctagattgtaaatgtttttggttttgcaagccatatggtttttgtacagatactcaactgtcagtgaacatgcaagtaatcttagacaatatgtgaagggtgaatgctgctgtgtgccaataaactttatttacaaacacaggt

SEQ ID NO: 941537 - DNA, 735 bp, Homo sapiens
agtccctttgcacaccaaggcatgggcagcaaaggcaagactggccacaaggctggggatgggctaaagtgacgggcttgctgacgtagtagctcccagacagatgacccctggaggcagtcactaaaccctgcttttttctctttgaaagaattacatacctccctgagattatcaggcctgagcacaattatgtgtttgctgggaccttggagtagagaggctgagaaggcactacagaaattgcaacaaggcgcctgtgatcccagcactttgggaggccgaggcgggtggatcacgaggtcaggagatcaagaccatcctggctaacacagtgaaaccccatctctactaaaaatacaaaaaattagccgggcgtggtggcaggcrcctgtagtcccagctactcaggagactgaggcaggagaatggcatgaacccaggaggcagagcttgcagtgagccgagaccacgccactgcactccagcctggggacagagcgagactccgtctcaaaaaaaaaaaaaaaaaaaacaacaacaaagaaattgcaacaagaaactccatgagacgtgggtggatggtggcaatgcctgtctctcccaaaacctgccctatctcccacaaagtgaggctgataggacccggctggtgtggaccccctgtgaggaccctcactcctctacctcaatagagtattcacttctgtccagcgaagaaacctaagaacagag

SEQ ID NO: 941538 - DNA, 777 bp, Homo sapiens
cataaatatttgtgtgcaagtttttgtgtggacataaatgtattgcttttaatgcattgggtaaatactaagagctacaattgctggattgcatggtaagaacatgtttagttttgtaagaaactgtccaattgtctcccaacctggctgtaccattttgcattcccacagcaatgaatgagagttcctgttgctccacatccttgtcagcatttagtgttgtcagtattctggattttagccattctaataaatatgtagtggcatctcaccattgttttaatttgcatttccttgatgacatatgatgtggagtatcttttcatatgcctgtggagtagctgggactacaggcgtgcatcatcatgcctggccaatttttgtatgtttttgtagagatggggttttgtcatgtttcccaggctggtcttgaaatcctgagctcaagcgctctgcccatgttggcctcccaaagtcctgggattacaggtgtgagccaactcacctggctataartatttgttgactgaataaatgaatgaatgtggttacatgtttgtcaattaattcactctgttttgtatggattttttaaagattatatttgttttctttatgagattgcacaatttaaaggcagagatcatgcctcatatgaactatgtccattcatatattcatacattgaacaagtatttattgagtggctactatatgctagctgggcaccgtgcaaggcataaaggatacagacagatttgttccctattcctgtga

SEQ ID NO: 941539 - DNA, 646 bp, Homo sapiens
gcaccatgctatgtatttggaatacagctatacaaagcattgtcacataattgaaatgaaaattttatattatttaagtcacaagaacaagctatttaattatattacttttagtttctcttttaataaaaaatagataatgctatcattctagatactaaataagtattttcttaacataatattactatccactttatcttgtagaagaaataactaaaatacatctgtcttcactcctgtatttgtttgcattttaaggrttaaagacagaaatagaaatgtaaacaactttattttgaaaatatttcaacactgcaaatatctctgggtctgatattctagtaatctaattggctagtaattgatgttagtgtgatttattgttgaaggctaaatgtgtttttcagtttcaagaaaattgcttttaataattgcctagaacaagaggttgatttggcagcaagatgttgacgggaagttagagaagtcaataaaggaagtttttagctgagagagagtgattattcactcccatagcctctgcattgttatccattagccacgataagaaccttagggaattctgagagtgtgtccaggaaaggatctgtcaaactagaatagtatctcctccttgagaaag

SEQ ID NO: 941540 - DNA, 845 bp, Homo sapiens
aagtttgctcatggaatgacaggaacttctaaaatacaactcaccattttgacagagattttaaactctacatatgtctgtgtgtatacacacacacacacgcacacacacacacacacacattttatacatgtgctgtacatacaaagtaggaagtttggagggatataccgaagtattaaccattaactctgggcaatgggataaaggatggttttaattttcttattttggcttatttgtattctctatgcttatctagttcttcatgatgaacttgcactacagatataacattttttgagtgattaagcagaataaaaatatscttattgatcatatctgtaacttttattcttttcattttatacacataatgtatctaaatgcatgtcagtaaaattaactttatgcctaaaagattattttacatgtttttctccccaggcataaattcctccacagccctccaccactccccctccactgctgccaaaatgcttcttcaaatcttatgcgtacaaacctgaaggttttcattcaaagccttgtcctgttgccagggtgctacggtggcgggcatgaaaaagacaccaacagtgcccaggatgctgagttctgtgatgtaggtaatttttataagaaccttagccttagggggtaagtttccaacacttacagtaaaaacgtcctgaaacagaaacatatgacttagcttccaacttgaaagcatacccattatatgccagctaactccacgtacttcttaagcaacttgaatgacaacctgccaaattcttcctcagaaaacagtaataaaacctaaaagacacattggtggggct

SEQ ID NO: 941541 - DNA, 810 bp, Homo sapiens
agtctatgacgttgctctgagctgccttgaggatgtgtgtatgggtcagagtgggcccaggggtggaggtcagctatatccaaactgctcttctcacccaacgccccgtctccccagattaaggtgatcactgaaatggaactaattttcctctacagggatcagaacatcatggcactgtacttgaacgttcttaatctcctcaaaggcctttatggttgttcaatgcaatcttcagagtcagaagctgatcatgaggccaaatcttagcaaaccaattcaattttagaaaaccaaaaacttaactttccaagctctaccactgcatctggccacttggcacccctgaaacgctgccttccatcctgtgactgtggatgatgaacctgctgcgagctcctggctgcggccccagcaccygcattagataaccctcctgtgatgcttgtcttttgctttgaccagttcttactcacttggtatttaatgctctttctgagcttcagtgcagataatttaataaggtgggattttctccttctctttcaacaccctgagttttttttttttttttttttttgagacagggtctcactctatcacccaggttggagtgcagtggtgcgatcttggctcattgcaacctctgcctcctccaacctgccctcctgtgactttgcccattctagtaatggcaagccatcctcccatctcgacctcccaagtagatgggactacaggtgtacgccactgcgctcagccaatttttgtagagatggggtttctccatgttccccaggctggtctgga

SEQ ID NO: 941542 - DNA, 822 bp, Homo sapiens
ctggagcggctgggacccagagcaccaagtccctatgctacacacagtacgtggaccctaggcccagtccatgaaaccattttctcctaggtctcggggcttatgatgatgggaagggctgccttgaagacctctgacacgccctggagacattttccccattgtctgggggactaacatttggctctttgttacttatgccaatttctgcagcaggcttgaatttctcctcagagaacgggtttttcttttcttttcttttcttttttttttgagactgagtctcgctctgtcacccaggctggagtgcagtggcgcgatctcgrctcactgcaagctccgcctcccaggttcacgccattctactgcctcagcctccagagtagctgggactacaggcgcccgccaccatgcctggctaattttttgtatttttagtagagacagggtttcaccatgttagccaggatggtctcgatctcctgaccttgtgatccaccggcctcggcctcccaaagtgctgggattacaggcgtgagccaccacgcccggccctgcgtttttcttttctatcacagtcaggctgcaaattttccaaacttatatgctcttcttccctcataaaactgaatgcctttaacagcaccaaaagtcaccccttgaatgctttgctgcttagaaatttcttcctccaggtaccataaatcatttctctcaagttcaaagttctacaaatctctagggcaggggcaaaatgccaccagtttccttgctgaaacataacgagactcacctttgctccagttcccaactatttcctca

SEQ ID NO: 941543 - DNA, 677 bp, Homo sapiens
acacagaaaaaaaacccactgatatataggcaactgattattgacaagtgtgccaagaaatacacaatggggaaaggacaacctcatcatcaaatgatgttgggaaaactggataatcatatgcaaaagaatgaaatttggcccctattttccaccatctccagaagtcaactgaaaacagactaaaatataagacattaaattgtataaattcttttttttaatttttacttttagacggagttttgttcttgtttcccaggctggagtgcaatggtgcaatctccgctctctgcaacctacacctcctgggttcaagygattctcctgtctcagcctcatgagtagctgggattacaggagcatgccaccacccctggctaatttttgtatctttagtagagacggggtttcatcatattggtcagactggtctcaaactcctgacctcaggtgattcacccacttcggcctcccaaagtgctgggattacaggcatgagccaccatgcccagccgtataaattcttaaatatatgacatcaaactgtataaattctagaagaaaagaatgaggaaaagcttattggtcttggcaatgatttcttaaatatgatcccaaaagcaaaggcaacaaaagcaaaaatacacaagtgggactatgtcaaactaaaaagc

SEQ ID NO: 941544 - DNA, 554 bp, Homo sapiens
aaacaagagaaagacatcagggcatcaaaatcagtaaagaggaagtcaaactgtcactgtttgctgatgatatgattgtatacctagaaaaccctaaagactcatccaaaaagctcctagaactagtaaatgaattcagcaaagtttcaagatacaaaattaatgtacacagatcagtagttctgctatacaccaacagcaatcaagctgagaatcaaatygagaactcaacccctttcacaatagctgcaaacaaaataaaatgcttaggaatatacctaaccaaggacatgaaagatccctacaaggaaaactacaaaacactgctgaaagaaatcatagatgatgcaaacaaatggaaacacatcccattctcatggataggtagaatcaatattatgaaaatgaccatactgccaaaagcaatctataaattcaatgcaattcccatcaaaataccaccatcgttcttcacagaatcagaaaaaaaatccaaaaattcatatggaaccaaaaaagagcccacatagccaaagcaaaactaagcaaaaaga

SEQ ID NO: 941545 - DNA, 531 bp, Homo sapiens
tctgtgcaagcccaaaatccaacagggcagtcattcaatcttaaagctccaaaatagtctcctttgactccatgtctcacatccaggtcaggacgatgcaaagggtgggctcccatggtcttgggcagctccacccctgtggccttgcaggatacagcaccctcccggctgctttcatgggccggcgctgagtgttttttgcttttccaggcacacagtagaagctgttggtggacttaccattctggggtcaggaggacagtggtccttatctcacatctccactaggcagtgtccccacatttccctyctgcattgccatagcagaggttctccatgagggctccacccctgcagcaaacgtctgcctggacatccaggcatttccatatatcctctgaaatctaggcagaggtttccaaacctcaattcttgacttccatgcacctgcaggctcaacatcatatggaagctgccaaggcttggggcttgcaacctttaaggcaatgtcctgagctgtacactggccac

SEQ ID NO: 941546 - DNA, 719 bp, Homo sapiens
ttccttagtggccgcactgtaacctttccctgcacctccttgctgcttgagcctctagaaccttcccccagcccagccaacttctcggcatcctctcacttcttcttgtactctttcttccttttacattatttttctcccaagtctcaccttctgtgtctctctttgatctctggcttttccagtctttctctctctctcttactcatttttctttttctttttttttttttttttgagatggagtctcgctctgtcgcccaagctggagtgcagtggcgtgatctcagctcactgcaaactccgcctcccaggttcaygccgttctcctgcctcagcttcccaagtagctgggacaacaggtgcccgccaccgtacctggctaatttttttgtatttttagtagagacggggtttcaccgtgttagccaggatggtctcgatctcctgacctcgtgatccgcccgtctcggcctcccaaaatgctgggattacaggcgtgagccaccgcgcccagccccttactcatttttcttcttctgtctctctctctgtcatcccgtttcctttctccctcatactcagtttcttcctctttctctctctgggcacgagctgagccgtgctgtaccctggctccccactttctgtctgcaaagatgaacagctctggctctcttctttttctctgggcaccagtgcacctgcacagtgtctta

SEQ ID NO: 941547 - DNA, 870 bp, Homo sapiens
agaaacatacctcccaactagctggtctcacttaaattcatgaccttcaaatgctgtttgtgttgatcaccaatactctcggatttccttagctctgtacactcctccacccaccccaacaattattttattctcctctctcctccaacctccaccccctcctcctctctgctcactctgttgatggtcttgctctcaacttcatggagaaaatagaagcaatctgaaagaatttccacacgccccctccatctacctgcatctgtctccatatattctgacatccctcttgttactgtacgtgaactgcctgtgctcttacctaagtgaactccttcacctgggcactagttcacatcctctctcatcaggtctctctgatttctctccttctcttctgcatcatcagtttgcttgcctctaygagagcattgtcatcaacctctctcagatcttaaataaataagtaaatcacctccctcaaccccctacatttgtctgctcttctttactgaaaactcttcaaaaatattagtctatccttgctctcttcacctcctctcctcttattctctcttgaacccactctcaccccaccattccagaatcactcttgtaaagttcaccaatgccctcaccactgccaaatccaatgattaattctcagtcctcacctcactggctctgttaactgcatttgccacagtttactgggtttctgggatcactcactagcttcttcacctactgcaatggccaccccttctcggtctcttttgcatcctcctcatcttcccaacatgttcctcagccccagggctccatcctcagacctcttgtcttttctatcttcactccctcctttcatga

SEQ ID NO: 941548 - DNA, 670 bp, Homo sapiens
ctctattgtattagtctgttttcattctgctaaaaagaactgcccaagactcgttaatttacaaaggaaagaggtttaattgactcacagttcagtgtggctggggaggcctcaagaaactgacaatcatggcagaaggtgaaagggaagcaaggcaccttcttcacatggtggcaggaaggagaagtgcagaacgcagrgggaaagagccctttataaagccaccagatctcatgagaactcactatcctgggaacagcactggggaaactgcccccatgattcaattacctacacctggtctctcccttaacatttggggattatggggattacaattcaagatgaaatttgggtggggacacaaagcttaaccatatcatttcaccccagcccctctcaaatctcaagtccctttcaaatttcaaaaccaatcatgcttttccaacagtaccccaaagttttaatccattccagcattagcccaaaattccaagtccaaagtctaatctgagacaaagtaagtctcttccacctaggagcctgtaaaatcaaaagcaagttagttacttccaagatacattaggggtacaggcattggataaatgctccatcccaaatgggagaaactggccaaaacaaaggggctacaggccccacgcaactccaa

SEQ ID NO: 941549 - DNA, 592 bp, Homo sapiens
ctcagtgcgcatgtgtttcctcatccataatggaaggattgttggactgtggagagaactgcacaggtacttgatataaagcacttagacctgtgcacgccctacagcaagcagggtctaagtgctagctcttattcctgccaggtctctcacttctgctcatatgcctgtctcatctcgatcttcccaactctgtagtttctcacaataagcaattctatagctcttatctcaggcaatgtctgctttatcccttaaaagccagctctctttgatgctctccctcactcctcttggaaaagctagttattctttccttcgtagcaaaatagcattctgtacctgtattttgacatgaagcatttattttaatcatccatgtacatgcgcttccctaccagagcaaggactcttcaakgtcagggcatgcctatgataagcaaatccgccagtaagtgaacagatttcttaaagggttttctttagcctgcattgcgttatccttatgccatcaccaaagattagaagaaatcaaagcacagaccagaacacagaagtgagcttccagcaggacctgcagcatgggtggacc

SEQ ID NO: 941550 - DNA, 592 bp, Homo sapiens
ctcagtgcgcatgtgtttcctcatccataatggaaggattgttggactgtggagagaactgcacaggtacttgatataaagcacttagacctgtgcacgccctacagcaagcagggtctaagtgctagctcttattcctgccaggtctctcacttctgctcatatgcctgtctcatctcgatcttcccaactctgtagtttctcacaataagcaattctatagctcttatctcaggcaatgtctgctttatcccttaaaagccagctctctttgatgctctccctcactcctcttggaaaagctagttattctttccttcgtagcaaaatagcattctgtacctgtattttgacatgaagcatttattttaatcatccatgtacatgcgcttccctaccagagcaaggactcttcaagktcagggcatgcctatgataagcaaatccgccagtaagtgaacagatttcttaaagggttttctttagcctgcattgcgttatccttatgccatcaccaaagattagaagaaatcaaagcacagaccagaacacagaagtgagcttccagcaggacctgcagcatgggtggacc

SEQ ID NO: 941551 - DNA, 592 bp, Homo sapiens
ctcagtgcgcatgtgtttcctcatccataatggaaggattgttggactgtggagagaactgcacaggtacttgatataaagcacttagacctgtgcacgccctacagcaagcagggtctaagtgctagctcttattcctgccaggtctctcacttctgctcatatgcctgtctcatctcgatcttcccaactctgtagtttctcacaataagcaattctatagctcttatctcaggcaatgtctgctttatcccttaaaagccagctctctttgatgctctccctcactcctcttggaaaagctagttattctttccttcgtagcaaaatagcattctgtacctgtattttgacatgaagcatttattttaatcatccatgtacatgcgcttccctaccagagcaaggactcttcaaggtcagggcatgcctakgataagcaaatccgccagtaagtgaacagatttcttaaagggttttctttagcctgcattgcgttatccttatgccatcaccaaagattagaagaaatcaaagcacagaccagaacacagaagtgagcttccagcaggacctgcagcatgggtggacc

SEQ ID NO: 941552 - DNA, 675 bp, Homo sapiens
  misc_feature 645, 646, 647, 648, 649, 650, 651, 652, 653, 654, 655, 656,657, 658, 659, 660, 661, 662, 663, 664, 665, 666, 667, 668,669, 670, 671, 672, 673, 674, 675: n = A,T,C or G
gtttcccctattattaacatcttgccttagggtggtacaatagttacaattaataaaccaacattgaggccaggcacggtggctcacacctgtaatcccagaactttgggaggccaaagtgggcggagatcaagaccatcctgggcaacatggtgaaaccctatctctactaaaaatacaaatattagctgggcatggtggcacacgcctgtagtcccagctactcaggagcatgaggcaggagaattgcttgaacccagaaggcataggttgcagcgagccgagatcaygccactgttcttcagcctggcaacagagtgagacttcgtctcaagaaacaaacaaacaaacaaaacacacacacacacacacaaaaaacaaataaaccaacattgatacattattattaacaagttcatagttacattaaggttcactctttgtgttctacagttccatagattttcacaaatgcatgatgtcatgtattcaccattacggtatcatacagaaaagtttcactgttctaaaaattccctgtgcttcacctacttattcctctcccttttcccccatatacctagcaaccactgatctttttattgtctctatactgttgacttttccagaatgtcatatggttgnnnnnnnnnnnnnnnnnnnnnnnnnnnnnnn

SEQ ID NO: 941553 - DNA, 680 bp, Homo sapiens
  misc_feature 644, 645, 646, 647, 648, 649, 650, 651, 652, 653, 654, 655,656, 657, 658, 659, 660, 661, 662, 663, 664, 665, 666, 667,668, 669, 670, 671, 672, 673, 674, 675, 676, 677, 678, 679,680: n = A,T,C or G
tttcccctattattaacatcttgccttagggtggtacaatagttacaattaataaaccaacattgaggccaggcacggtggctcacacctgtaatcccagaactttgggaggccaaagtgggcggagatcaagaccatcctgggcaacatggtgaaaccctatctctactaaaaatacaaatattagctgggcatggtggcacacgcctgtagtcccagctactcaggagcatgaggcaggagaattgcttgaacccagaaggcataggttgcagcgagccgagatcatgccactgttcttcagcctggcaacagagtgagacttcgtctcaagaaacaaacaaacaaacaaaacacacacacacacacamaaaaaacaaataaaccaacattgatacattattattaacaagttcatagttacattaaggttcactctttgtgttctacagttccatagattttcacaaatgcatgatgtcatgtattcaccattacggtatcatacagaaaagtttcactgttctaaaaattccctgtgcttcacctacttattcctctcccttttcccccatatacctagcaaccactgatctttttattgtctctatactgttgacttttccagaatgtcatatggttgnnnnnnnnnnnnnnnnnnnnnnnnnnnnnnnnnnnnn

SEQ ID NO: 941554 - DNA, 471 bp, Homo sapiens
agctgtccctgtgcctggacacacttgtaacttgactttaaaagccatctgccagctcactagaaacacagacatgctgtctgtgctggggcttacatttgcatcaccgcggtacctcgatgctcaggacagatatttctactcaaatctataccttgcctgaatrgagctatgagggtgtgacccagaggaagtgctgtgaaactctgcataaagagattagttcagatgccctctcttttatgacacagggtaaccaatcagatactccacttcccagaagtggctggacacagactgccctgtagtagagagacaaagcagtgggatgagtgggtcctacgtagggatcctcagggattccttgggcacaagcaggatctctcttctcagaaagagccaacaataccatatgttagaagctcaaaaccaactgtattcttttcattctgttatcactgataattacta

SEQ ID NO: 941555 - DNA, 572 bp, Homo sapiens
aaccataatttcgaatctggtggctaatgttggtcctacaaaggcaatctagtccccaggcaagaagaaggtctgctttgggaaagggctgttaccatttttgtttaaactataaactaagtttctcccaaagttagttcagcctatgcccaggaatgaacaagaacagcttagagtttagaagcaagatggtgctggttaagttagatctctttcactgtctcagtcataattttgcaaaggtggtttcaacaatgcccccagcaccattgtggtttcttagttggtaatgatcccacaccctgttccatatggctcacacccttctgttcctsctgcctctttgctgctctgcatgtgacctgctgccctgctctcctgtcttccctgccctccattctctccccatctttagtgacatcgtgctgtcactgcttcactcccaagtttgtcctggtcccagtgtaaattagtccctgggtgccttctttgtggaggggaggcatatgcaaagacgaaatagagacagggacttcactgctctcccggagcctgaccgaagaccagccagg

SEQ ID NO: 941556 - DNA, 607 bp, Homo sapiens
gccaggctggtcttgaactcctgaccttgtgatctgcccaccatggcctcccaaagtgttgggattacaggcatgagccaccgcgcctggcccatatcccactttagtcagaaaacctttcgaatcaacttggtaggctaggaaatcttatagcttaataattgttattttcagtacaatcttttaggatttgagtatttaaaaagataactatgtttctttacacatttttaatatygtaaaaagacaatgcagtcatcaaaagttaaaataacaattaaaatgtgactttaaaatctggcatttttttatagtattcaattataacctataatttcaaagacaatatatattctttcatatcacctaaaaatctaaactccttaggagtgtatgtgtatatggagagcttgcttatgaggcaaatatatctcaataacaattacaaagatgcttttcaccatctgaatgtcttcagttacttctcccttgaaatgatgaatttgttatcaatcatctttatttctgagctactagtagtcccactgttatcacactaaaatagcaattacttagcatttattttgtgtcagccactgttctaagc

SEQ ID NO: 941557 - DNA, 617 bp, Homo sapiens
aatctgtctggtccagtgctttttatggttggtagttattctatcactgattcagtttcataattttttattgtttggtttgaggtttcaatttcttcctggttcagtcttaggaggtggtgtgtttctgagaatttatccatttcctcaaggttttctagtttgtgtacacagagatatttatagtggtcccttagaatcttttgtatttctgtggaatcagttgttgttatttttgtcacttctgatttcacttatttgagycttctctctttttttctttgttaatctggctagtggcctatcaatcttgtttatcctttcaaaagccaatttttcatttcattgattatttgtatattgttttggtctcaatataatttagttctgctctgattttagttgtttcttttcttcttctatctttaggttaagttcttgtttttctagctcctccagttgtgacattaagctgttaatttgagatccttctatcttcttgatgtaggcatttaccagtataaagtttcctcataacagtgcttttactgaagcccagaggttttgatatggtgtgagtcttttcattgtttcaaataattttttgatttctgcct

SEQ ID NO: 941558 - DNA, 634 bp, Homo sapiens
cgtgtatgtatgtttgtgtttgtgtgtttatacaccaagtgtaaaataaaataaagtacaagtcataaaattggacatgttacggatagttttgtattgtcataaacacatttacactcaataaatgtggaacgaataaatcaaaggacaaaaagctttgaatacctaatggaacctgagggtgttcatcctgaaggtaactagaagatataagttatttctctctttgtggccagaaaggctagaattccttttatagacagagcaatgttactagttttcagacagatgggaattgaaacaacttttatctttaaagacaaaatcctacccaacattgtacatatttaaatttatgtgaagttgcccacaggcagtggaatgagttaatcaaatgataaagaaatgtcaaaacatcttatacttgtatataaacctggtagttcagtatcctataaagtamaaccaatccatctgtccgaaagcctaataccactatttttggtgacactaaatgctttaaattttgtcagcaagatttgaggcaatgtcaaatgctagagtgatcaatatcaaatactagagtgataaaaccccaatattattatatataattatatgtgtgtatgtatat

SEQ ID NO: 941559 - DNA, 610 bp, Homo sapiens; identical to SEQ ID NO: 936311

SEQ ID NO: 941560 - DNA, 750 bp, Homo sapiens
aaataaataaatagatgagtcagggaagagtgaacccgggaggcagaagttgcagtgagctgagatcacaccactgcataccagtctgggtgacagaatgaaactccttctctagataaataaacaaacgattaattaaatgatacacaaactcactgggagtcagaaatgtgaattaaattgaaaatgacatattatacacctaattagattggccaaaataataaaatacccatatctccctaatatttgtggtggtgtagagaaaagtatttccaaatattgctagtggatatgtgaggtactatattttttggacagaacatttagcaataaatattaaaataaaaaattttwaaaaccctcatataccctttgatccagaaatcccaaaccaggtatttaggctatagaattaaagtaccagtatgtgagcataagtataaggatgtttaataacttaattattgttcatactagcaaaaaatggaggaaaatgaatatccattgtaatagttaacttatggtacctgcatataatgaattattttgcagctattaaaacttgtcactgtttgctgatgatatgattgtatacctagaaaaccctgaagactcatccaaaaagctcctagatctgataaataaattcagtaatgtttcaggatacaaaatcaatgtacacaaatcagtagcactgctatacaccaacaaatgaccaagctgagaatcaaatcaagaactcaatcc

SEQ ID NO: 941561 - DNA, 638 bp, Homo sapiens
agaccctcatatggcagagggacctacctttgcagatgggactgagttgaggatctggatgggaggttatcctggcatatccaggtgggcccaacatgatcacagggtccttataagagggaggcaggagggtcagagggcggggaggaggagatgtgagcgtggaagcagaggtcggagggaggcagggattggcaggtgctgtgctataggctttgaggatgsaggaggggccacaagaccaggaatgcaggcggcctctataaagctgaaaggggcaagagacagactctcccctagagcctccagaaggagcacagccctgcccacgccttgattttagccctctttggactgggcctcgcaggactgtcaggtaataaatccgtgctgtcctaagtgctgagtgtgtggttatttgttaccgcacccacggggcacaactgcagaagataccactgtcgtctcaggagtcacagacactcggaccatctgggctggaaatcggggctcccagtgccagctctgccagaccggccccccgactcctgtgcctctgtggggctggtcacacagccaggttcacgggagccgcgtgccctgcagaagcttgctccctgggttccctcctttgcaga

SEQ ID NO: 941562 - DNA, 638 bp, Homo sapiens
agaccctcatatggcagagggacctacctttgcagatgggactgagttgaggatctggatgggaggttatcctggcatatccaggtgggcccaacatgatcacagggtccttataagagggaggcaggagggtcagagggcggggaggaggagatgtgagcgtggaagcagaggtcggagggaggcagggattggcaggtgctgtgctataggctttgaggatgcaggaggggccacaagaccaggaatgcaggcggcctctataaagctgaaaggggcaagagacagactctcccctagagcctccagaaggagcacagccctgcccacgccttgattttagcccwctttggactgggcctcgcaggactgtcaggtaataaatccgtgctgtcctaagtgctgagtgtgtggttatttgttaccgcacccacggggcacaactgcagaagataccactgtcgtctcaggagtcacagacactcggaccatctgggctggaaatcggggctcccagtgccagctctgccagaccggccccccgactcctgtgcctctgtggggctggtcacacagccaggttcacgggagccgcgtgccctgcagaagcttgctccctgggttccctcctttgcaga

SEQ ID NO: 941563 - DNA, 624 bp, Homo sapiens
tattgttagactgcctgatgcctgataccgtctcaaggtgggcaaggctcggtttctgccttttccctaggtttttcctctgcgtgcttcagtctgagtaacttgtcctggcttcaagtttactgattgttttcctctgtagtttcatctgctgttaatctcatccaatagattttttgtttcctacactgtatattttcatctttaggatttccatttgattcattattatactttccatctctcctttgactgtgatcatmgtttcctataaatccttgggtggtgtgtgtgtatatattatatatatatgtgtgtgtgtgtatatgtgtgtccgtgtgtgtccgcgtgtgtgtgtgtgtgtgtgtgtgtgtgtctgcacaaatagactgagagtcagggtctggctgtgatactcccaggctggatgacaacggctcgagctcagctcactgcagcctacagatgctgcgctcaaggaatcctccgacctcagtgtactgagtagctcacctacctaattttctgtattttttgtagagatggggtttcaccacgttgcccaggctggtcttgaactcctggactcaagcaactcaccatctcagccttcccaagtgctgg

SEQ ID NO: 941564 - DNA, 651 bp, Homo sapiens
cttccactcctcagtaagacagtaaaagcttttccaaaatctgaccctagccttgcttttcagcttcatccccgctacttcccttcttgtgctccagatacttggacttccccagcaatcgcctccctgtgcttttgttctggtggtttttttccccactgacctcactcctcttctcctccctttcccagcctcctgaactcattctcatcctcaaaggccaatgcaaatattaattctctgcaggtttctctggacagaatcaatcatcctctctatggtgttcccatagcattttgtctaactgctagagaaacatttagcatggtatcagatgcctcctgatagactgggatttcactgaggacatggaatgtgtcatatttatcttggataccaatggyatagctgaattccaggcatataggaggggcttagtaaatattggttgaattggattaagtcagaaatacatccaggtcactgactcttatccaatgtcttttttttttttttttttttttagacagagtcttgctctgttgcctaggctggagagcagtggtgcaatctcggttcactgcagcctccgcctcccaggttcaagctattgccctgcctcagcctcctgagtcactgggattacaagtg

SEQ ID NO: 941565 - DNA, 560 bp, Homo sapiens
aatattcccttattgggttccaaaatggtggcatagaagcaagctggctttacaactcacccccacaaaaagccccaaaacaagtatacagtaccaagactatcaccagccatatatcagaactgaaatatgagaatgagactcttcttggggccacagagaagtgaaaaaactgagaagatgataaaagaatcaaacttacacatccacaatgcctctcacctcagtctgcccagcactaaccatgtggaaaatttcccctgactcacagtttctacactggaataagtgaggtcaagttgggcaattagtttcctcattattttgggttccctggcaggtgacctgtctctacttcaacccatgggaagaattgcaagtgtctgaggtgagaaatacccctaaggtcacccagaacaatgrgggatataggactaccattcccagccctggaaactctgttctgtaacttgtgcaaaggagatgccaagtcagagtggctgttcagcagcaccatgctgtaggagttctcctaggcatgaactcctagttagtctccc

SEQ ID NO: 941566 - DNA, 607 bp, Homo sapiens
attgtcttggggattaacattaggctccttgctacttatgcaaatttctgtagccggcttgaatttctcctaagaaaatgggtttttcttttcgactgcatcatcaggctgcaaattttctgaacttttatgctctgtttctcttttaaaatgggatgcttttaacagcacccaagtcaccttttgaacactttgctgtttagaaatttcttctgccagataccctaaatcatctctctcaagttcaaagttccacaaatctctagggcagagacaaaatcctgccagtctttttgctaaaacataacaagagtcacctttgctgcactctccaagtttctcatctccatctgagacyacctcagcctggactttactgttcatatcactatcagcatatttgtcaaagccattcaacaagtttctaggaggttccaaactttcccacattttcctgtcttcttctgagccctccaaactgtttgaaccgctgcctgttacccagttccaaagtcacttccacattttcgggtatcttttcggcaatgtcccactctactggtaccaatttattgtattagtctattttcatgtggctgataaagat

SEQ ID NO: 941567 - DNA, 607 bp, Homo sapiens
attgtcttggggattaacattaggctccttgctacttatgcaaatttctgtagccggcttgaatttctcctaagaaaatgggtttttcttttcgactgcatcatcaggctgcaaattttctgaacttttatgctctgtttctcttttaaaatgggatgcttttaacagcacccaagtcaccttttgaacactttgctgtttagaaatttcttctgccagataccctaaatcatctctctcaagttcaaagttccacaaatctctagggcagagacaaaatcctgccagtctttttgctaaaacataacaagagtcacctttgctgcactctccaagtttctcatctccatctgagactacctcagcctggactttaytgttcatatcactatcagcatatttgtcaaagccattcaacaagtttctaggaggttccaaactttcccacattttcctgtcttcttctgagccctccaaactgtttgaaccgctgcctgttacccagttccaaagtcacttccacattttcgggtatcttttcggcaatgtcccactctactggtaccaatttattgtattagtctattttcatgtggctgataaagat

SEQ ID NO: 941568 - DNA, 696 bp, Homo sapiens
gaattaaacaatgagaacacatggacacaggaaggggaatatcacactctggggactgttgtggggtggggggaggggagagggatagctttaggagatatacctaatgctaaatgacaagttaatgggtgcagcacaccagcatggcacatgtatacatatgtaactaacctgcacattgtgcacatgtaccctaaaacttaaagtataataataataaaatttaaaaaaaaatgaaaaaaagaccccccaaaatactctcttatgactttggaatgggacaccctgccatgggagagagtgagctccctgttagtagaggtrtgtaaggaaaggtggaagaggtgggaatcactgggtgcagatgcactgaggggcaaggatttctactgactataggggctgccgtctcctgggggccagtgggtctctataaatggagctgaaagcttcctgaaaaatgcctgtcttgtgatctctgttgtccctctgctttgagcgtttggccaagaggacagagatccacataaagtggcctgattttaaatggggtgccttgagctgcctcgagaggtagagaaaagccccagagtcataaagaatcctgcccccaacacagtcctgcgcctctacacacgtgtgcactctagcttaccaatggagaaactgaggtgcagagagggggagcaaggggcc

SEQ ID NO: 941569 - DNA, 696 bp, Homo sapiens
gaattaaacaatgagaacacatggacacaggaaggggaatatcacactctggggactgttgtggggtggggggaggggagagggatagctttaggagatatacctaatgctaaatgacaagttaatgggtgcagcacaccagcatggcacatgtatacatatgtaactaacctgcacattgtgcacatgtaccctaaaacttaaagtataataataataaaatttaaaaaaaaatgaaaaaaagaccccccaaaatactctcttatgactttggaatgggacaccctgccatgggagagagtgagctccctgttagtagaggtatgtaaggaaaggtggaagaggtgggaatcactgggtgcrgatgcactgaggggcaaggatttctactgactataggggctgccgtctcctgggggccagtgggtctctataaatggagctgaaagcttcctgaaaaatgcctgtcttgtgatctctgttgtccctctgctttgagcgtttggccaagaggacagagatccacataaagtggcctgattttaaatggggtgccttgagctgcctcgagaggtagagaaaagccccagagtcataaagaatcctgcccccaacacagtcctgcgcctctacacacgtgtgcactctagcttaccaatggagaaactgaggtgcagagagggggagcaaggggcc

SEQ ID NO: 941570 - DNA, 696 bp, Homo sapiens
gaattaaacaatgagaacacatggacacaggaaggggaatatcacactctggggactgttgtggggtggggggaggggagagggatagctttaggagatatacctaatgctaaatgacaagttaatgggtgcagcacaccagcatggcacatgtatacatatgtaactaacctgcacattgtgcacatgtaccctaaaacttaaagtataataataataaaatttaaaaaaaaatgaaaaaaagaccccccaaaatactctcttatgactttggaatgggacaccctgccatgggagagagtgagctccctgttagtagaggtatgtaaggaaaggtggaagaggtgggaatcactgggtgcagatgcactgaggggcaaggatttctactgactataggggctgccgtctcctgggggccagtgggtctctataaatggagctgaaagcttcctgaaaaatgcctgtcttgtgatctctgttgtccctctgctttgagcgtttggccaagaggacagagrtccacataaagtggcctgattttaaatggggtgccttgagctgcctcgagaggtagagaaaagccccagagtcataaagaatcctgcccccaacacagtcctgcgcctctacacacgtgtgcactctagcttaccaatggagaaactgaggtgcagagagggggagcaaggggcc

SEQ ID NO: 941571 - DNA, 751 bp, Homo sapiens
aatataccttcactctcctacctcaggggtatatcaactctccagctttgtgtcataatcttgtttggagagaccttgatctcttttcacttctgaaagatatcacactgatccattacactgatgacattatgctgattggatccaatcagcaagaagtagcaaacacattggacttattggtgagaamtttgtgtgtcagaggatgggaaataaatctgactaaaattcagggaacttctacctaagtaaaatttctaggggtccagtggtgtggagcctgtcaagatattccttctaaggtaaagaataagttgctacacttggcccctcctacaaccaagaaagaggcacaatgcctactgggcctatttggattttggaggcaacacattcctcactgggtgtgttcccctagcccatttatcaagtgacccgaaaggctgccagttttgagggaggtccagaacaggagaaggctctgcaacaggtacaggctgctatgtaagctgctctgccacgtgggccataagacccaacaaattcagtggtgcttgaggtgtggcagatagggatgctgtttgtagcctttggcaggcccccctaggtgaatcacagcggaggcctctaggattttggagcaaggccctgccatcttctgcagataactattctccttttgagagacagcccttggcctgttactgggctttggtggaaactgaacgtttgactatgggtcatcaagtca

SEQ ID NO: 941572 - DNA, 578 bp, Homo sapiens
atgagcatccaccctgctgcaccgctactgcaactggcgtgtacaaacaaggacagattttgctgtcacattacaaaacactttgataccacccattggagtgtagtgaccagtggtctgagagcacctcagccccaacccagggcagtggattcttaaggagccagagaacaaatttggggcccaatacaagtcccccagagttaaagcacacagaccaggagttgggagctgagcwttggccccctaaaatcttccagaaacaaagccagttggccaaatccatcttataccacaatcaaacccccaaggtcatcaaataagataaaaatatcgaagggcagcaactttaaagatcgaaggaacataagccaacgcagatgagaaagaaccagtgcaaaaccctgacaactcaaaaagccagagtgccttctttcctccaaacaactgccccatctctccagtaggggttctgaactgggctgagatggctgaaatgacagaaatagaattcagaatatggagaggtatgaagaccattgagatgtaggaatatatcgaaacccaatccaaggaag

SEQ ID NO: 941573 - DNA, 685 bp, Homo sapiens
tatgttggacaaaggacataattttattatttttatggctgcatagtattccatgttgtatatgtaccaaattttctttctttaatgcactgttaatgggcacctaggttgattccatgtttttgctattgtgaatagtgctgcaatgaacatactaatagatgtgtctttttggtacagcgatttattttcctttggggatatacccagaaatgggattcctggggtcaaatggtagttctattttgaattttttaaggaatctccaaactgcctttcacagtggctgaaataatttatatttccactatcagtgtataaatgttcccttttctatgcagcctcgccaatatctgtgggtttttttattttttaataaccattctgattggtgtaaaatgatatcatgttgtcattttgatttgcatttctctgatgattagtgatgttgagtgttttttcatatgttttttggccacttggatgtcttcttttgagaagtgtctgtagaagttttatatcctgagacttkactttcctatcctttgcctgcttcttaatgaaattgtttgttttttgcttgttcaactgtttaagttccttatagattcttaatattagacctttgttggatgcatagcttataaatatttttcctgttctctagttgtctgtttactctact

SEQ ID NO: 941574 - DNA, 628 bp, Homo sapiens
tggaaaaatttacaatgagattcagtttgctaataataaataaataagaataaattcctcataaacagtaaaaaggaaccatttacttaagcatttcaaaggattttgccactagatttttaatggttaacagtcacaatattatagaggcaaattgcattgtttatgtgttttatttttatmaacaaatatttataagcaccaattttatggtagatgctgcaccaggcactgagcattcaagagccatgtttcctggcctcgagttcattatcattgtattctcctacctatataacactaagcatgtaacctaatctgaaaattttctatcttcttcctttgcaatttccttgaaattcctgctctgtaatctgaaaagtcttccacatttttaacatgtttaaacatttccatcactttcctgcctgaaatgaaacctgactattacagatgaaattgctgaccctggccgggcgcggtggctcacgtctgtaatcccagcactttgggaggcccaggcaggcggatcacgaggtcaggagattgagaccatcctggctaacacggtgaaaccccgtctctactaaaaacacaaaaaattagccgggcgtggtggtgagcgcct

SEQ ID NO: 941575 - DNA, 628 bp, Homo sapiens
tggaaaaatttacaatgagattcagtttgctaataataaataaataagaataaattcctcataaacagtaaaaaggaaccatttacttaagcatttcaaaggattttgccactagatttttaatggttaacagtcacaatattatagaggcaaattgcattgtttatgtgttttatttttatcaacaaatatttataagcaccaattttatggtagatgctgcaccaggcactgagcattcaagagccatgtttcctggcctcgagttcattatcattrtattctcctacctatataacactaagcatgtaacctaatctgaaaattttctatcttcttcctttgcaatttccttgaaattcctgctctgtaatctgaaaagtcttccacatttttaacatgtttaaacatttccatcactttcctgcctgaaatgaaacctgactattacagatgaaattgctgaccctggccgggcgcggtggctcacgtctgtaatcccagcactttgggaggcccaggcaggcggatcacgaggtcaggagattgagaccatcctggctaacacggtgaaaccccgtctctactaaaaacacaaaaaattagccgggcgtggtggtgagcgcct

SEQ ID NO: 941576 - DNA, 749 bp, Homo sapiens
ttaaatcttaaagctccgaaataatcttctttgattccatgtctgtcatccagggtacactagtgcaggaggcaggttcccaagaccttggcagctccaccctagtgactctgaagggtatggcacccacggctgctttcatgagctggtattgatgcctgtgacttttctgggtacacggtgcaaactctcagtagatctaacattctggcattctggtccctggaagacagcagtcctcttcccacagctccactaggcagtgccccagtgggtactcagtgtgaaggctccaaccccacatttctcatcccctccacactgccctagtagaggttctctataagagttctgcccctgaagcagaattcctgctggatatccaggtgtttctatacagcctctgaaatctaggcggaggttcctgaacctcaattattggcttctatgcacccggagacacaatgccacttggaaactgccaaggcttcatgattgctctctctgaggcaatggcccaagctgcaccctggcccattttagttataccaccttagmtggagtgcctgaaacacaaggtgccatgtcccaaggctgcacagagcagtggggccctggaccccgaccatgaaaccatgtttccctcctaggtcttcaggcctgtgatggaaggggatgccatgaaaatctctgaaattccctgaagacattttccccattgtcttagctattaacatctgctcctcaat

SEQ ID NO: 941577 - DNA, 529 bp, Homo sapiens
tctttagtagagaagagatcttcttgcgttacacaggctagtctcaaactaccagctttaagtgatcctcttgccttgttctcccaaaatgttggaattacagacatgagctgctgtgactggccctctctttctttataatcacgtttcaatattttgttgtctattcttgcttgtgtaaaattgcatttgaattttagaaattttagaatgagattgttatgtcagaagatttgaaggttattttaaatttataaaattgttgggggcaatgaaccgacagtttaacaagatgactctttccattcrtaaatctgtcagcactccatttatttagagtttcttttatgtctattgatttatttacagtattatctatatgattattgcacatttgctgtttagtttgcaccatggtaaattttaggtatgctgcttttgtaaatgagatccattatgtttaatattatattaaaaattttgagttctaatgaatactgactttatgaaaactaacgtatatcttgcc

SEQ ID NO: 941578 - DNA, 627 bp, Homo sapiens
agtccgtagttggctgaatcccaagatgtaaatctgggtgcttccttattccaaaagataacctacaattaaggaattaacattaacatctatagacgttttcactcaaaatctttataaatggtgaaagtttgccaccatctacaaatttaatagttttagttctctttcagaaaacaaagaaaatctgatccctcacagtccacggttgggtttcaatccacagttgattgaatctggtaatgatcttttygcaaagaatttcccaggtattctttgaacttcttgtatttggatgcctaaatctctagcaaggccagggaagttttcctcaattattccctcaaatcagttttccagacttttagatttctcttcttcctcaggaacaccagttatttgtaggtttttccattcaacataatcccaaatttcttagaagctttgtttattttgttttattcttttttctttgtctctttctgattggattaattcaaaagccttgtcttccagctctgaagttctttcttctacttattgtagtctgttgttgaaactttccactgcattttgtatttatctaagtgtgtctttcatttccagaaattgtggttgctttttctt

SEQ ID NO: 941579 - DNA, 563 bp, Homo sapiens
accagagtgcacactccagcatggcagtctcagggtagtcaggcttcttacagagaggaccagggctctcagagagtgtttagagccacctggaaggaagctgcaagctttcttattacacaacttgaaagttccagaatatcacaactgccatattccattggttaagcaagccactaaagccaacccagatctcaaaagaaggaatagcaaagattttgggccctcttgaatttaccacatatccccattttctagaaggaataagtggggcccacagtgctyaccgacagcttctcagtcacagggtccttagatactacattcatttctgatggctcctgtaacatattaccacaaacttagtggcttaaaacaacacacatgtattctcttatacttctggaggtcagaagtccaaaatatgccttaaaggaggaaataaagagctgagtttcttctggaggttctagggtagaagctgtttcctggtcttttccagcttttagaggctacctgcattccttggcttgtggccccatcctccgtcttcactccaacct

SEQ ID NO: 941580 - DNA, 470 bp, Homo sapiens
tgcaccatccgaagctcatccagttcctgctccaggactcccaggccagggccctgtaacccaacaaagcagggggtcactctcctacttgagaagcatcctgccccattgctgcattcctaatcatgtatagtcacagcagactcacctcacattctcctgccagccccgatgggaggcattttatatacctttatttctcacaactctgaaaggagtgctgttttgtgctcattttgctgataaggaagctgaggttcagagaggttaaaggaacttgctcmatatcacatagctggtcagtttattgagttgagacagtagtctaactccaaagcccataactgaattacaatcactgtggtttgaatgtttgtcccatccaagacttatgtgaaacttaatccccaatgcggcagtatggagaagtgaggcctgtaagaggtggctgggtcatgaggactctgccc

SEQ ID NO: 941581 - DNA, 669 bp, Homo sapiens
gggatcagagtgctaatgggaactgtgaaattcccttccatgaaagcctttagaagtaaaccaggtagccaggtgcggtggctcacgcctgtaatcccagcactttgggaggccgaggcaggcggatcacgaggtcaggagatcgagatcatcctggctaacacggtgaaaccccgtctctactaaaaatacaaaaagttagctgggtgtggtggcaggcacctgtagtcccagctactcaggaggctgaggcaggagaatggcgtgaacctgggaggcggagcttgcagtgagccaagatccggccacagcactccagcctgggcgaaagagcaagactccatcttaaaaaaaaaaaaaaaaagaaagaaataaaccaggtacctcycccccgcaatctggtgacaatgataatgatagcaaaaatcaaggcactaagctaagtactttaattacattctctcatttatcctcccaataaccctacaaggtaggcatgactataattcccattttacagatgaagacaccaagatacagaggccctaacccttccaaagctccagagtttagtaagtatcagaaccaggttgcaaaggcaggacaccaacctgggatcccagggccttagccagataccccactggggactagatggagacaggcccc

SEQ ID NO: 941582 - DNA, 635 bp, Homo sapiens
aagaattaagtaagtctttctatagcccttctccctcaaaatacgtcctggcaattacttggtcctcttcccccatcaggttctggcggagcaaatcatgatgactagatagatgagaaatgagataatgtactaatctaggtaagtagctgaaaactagaaaaggcaagacttcaggtaaacctggtaggagatgacttagaacctaggcaaatgtgagacttcatatcttgaatctaaattttgaattctttatggggaggtgtcctatggaaaggagagaaactatgtctgcatctgtagggctcctgggcacaggtagaacaacaggtagtttgccctgctccctgcaattgtggttccataaatttctctgaccaatcagattagcgactctgtattaraggggatgaagggagtccccacctgggggagagagttcctttatgggctggggaataaaagttggacatgaaggacagaggtcaaggatgttcttccttgtcttctctttctgacaaagactccaacccattttagagtcccccatgactggattcttcagcccaagtggttcaattttttcctgaacaaaatcttcatttcaataaaaatgtaaatgtcacaaattgtac

SEQ ID NO: 941583 - DNA, 598 bp, Homo sapiens
  misc_feature 1, 2, 3, 4, 5, 6, 7, 8, 9, 10, 11, 12, 13, 14, 15, 16, 17,18, 19, 20, 21, 22, 23, 24, 25, 26, 27, 28, 29, 30, 31,32, 33: n = A,T,C or G
nnnnnnnnnnnnnnnnnnnnnnnnnnnnnnnnnctctttgtctggattagttccaacgatgctttgttcctgaagtcaggaaataccttgccagtaagggagtgcctttcaaagttcctttgataatggacaatgcccctggccactcagagcctcatgccttcamcattgaaggtgttgagtggtctacttgccccgaagcacaatgtctctaattcagtctctagatcaaggagtcataggacctttaagcctcattacacatggtaccctttgcaaaggactgtcaatactgtggaagagagcccaagagaacatcatgaaggtctggaaggattacaacattgcagatgccattgttgttatagaagaagccatgaaagccatcaagcttgaaacaataagtttctgctggagaaaactgtgtccagatgttgtgcatgacttcacaggatttatgatggaaccaacccaggaaatcataaaagagactgtggataaggcaaaaaaggtggaagatgaagggtttcaagatatggatcttgtttctccaattatccaattctatagctaatagacaccacatcagagaaattaa

SEQ ID NO: 941584 - DNA, 598 bp, Homo sapiens
  misc_feature 1, 2, 3, 4, 5, 6, 7, 8, 9, 10, 11, 12, 13, 14, 15, 16, 17,18, 19, 20, 21, 22, 23, 24, 25, 26, 27, 28, 29, 30, 31,32, 33: n = A,T,C or G
nnnnnnnnnnnnnnnnnnnnnnnnnnnnnnnnnctctttgtctggattagttccaacgatgctttgttcctgaagtcaggaaataccttgccagtaagggagtgcctttcaaagttcctttgataatggacaatgcccctggccactcagagcctcatgccttcaacattgaaggtgttgagtggtctacttgccccgaagcacaatgtctctaattcagtctctagatcaaggagtcataggacctttaagcctcattacacatggtaccctttgcaaaggactgtcaatactgtggaagagagcccaagagaacatcatgaaggtctggaaggattacaacrttgcagatgccattgttgttatagaagaagccatgaaagccatcaagcttgaaacaataagtttctgctggagaaaactgtgtccagatgttgtgcatgacttcacaggatttatgatggaaccaacccaggaaatcataaaagagactgtggataaggcaaaaaaggtggaagatgaagggtttcaagatatggatcttgtttctccaattatccaattctatagctaatagacaccacatcagagaaattaa

SEQ ID NO: 941585 - DNA, 588 bp, Homo sapiens
aaaaagcagccaaactgcttctttaagcagatctctgatcccattcctcctgactgaaagaccgggatctctagccacttcctacaggcacattcaggctggcaacaggtcagtaccctctgggatggaggaccttccagaggaaggggcaggctgccatctttgctttttcacagccttcaccggtgatacctccaggtwagggaaaaaccaaggtgactagagtccagaatggacccacagaaaactgcagcagcctatgaaagagtggccagactgttaaaagaaaaacaaacaaacaaacaacaaaagcaaaaaggcccacaaaaaccccatccaaaggtcagcaactccaaagatcgaaagtagataagcccacaaagatgagaaagaaccaacaaaaaaacgctgaaaactcaaaaagccagagtgtcccttttcctccaaatgagtgcagcacttctccagcaagcggtcagaattgggctgaggctggtatggctgaaatgacagaagtaggcttcagaatgtggataaaaatgaacttcactgagctaaagaagcatgttgtaacccaatgcaaaggag

SEQ ID NO: 941586 - DNA, 769 bp, Homo sapiens
gagaacaaagagcaaacacaccccaaagctagcagaagataagaaataaccaagatcagagctgaactgaaggagatagagacaagaaaaacccttcaaaaaaatcaatgaatccaggagctggttttttgaaaaaattaataaaatagaccactagctagactaataaagaagaaaagagagggccgggcgcagtggctcacacctgtaatcccagaactttgggaggccgaggcgggcggatcacraggtcaggagatcgagaccatcctggctaacatggtgaaaccctgtctctactaaaaatacaaaaaattagccgggcgaggtggcaggcgcctgtagtcccagctactcaggaggttgaggcaggagagtggagtgaaccccagggggcggagcctgcagtgagcggagagcacgccactgcactccagcctgggcgacagcgagactccgtctcaaaaaaaaaaaaaaaacaaaaacaaaacaaagaagaaaagagagaagattcaaataaacacaatcagaaatgataaggggaatactagcactgaccccacagaaatacaaacaaccatcagagagtactgtaaaaacctctatgcacagaaactagaaaatctagaagaaatggataagttcctggacacatacaccctcccaagactgaaccaggaagaaactgaacccctgaaccgaccaataatgagttccaaaattgaagcagtaataaatagcctaccaataaatgaaagcccaggaccag

SEQ ID NO: 941587 - DNA, 769 bp, Homo sapiens
gagaacaaagagcaaacacaccccaaagctagcagaagataagaaataaccaagatcagagctgaactgaaggagatagagacaagaaaaacccttcaaaaaaatcaatgaatccaggagctggttttttgaaaaaattaataaaatagaccactagctagactaataaagaagaaaagagagggccgggcgcagtggctcacacctgtaatcccagaactttgggaggccgaggcgggcggatcacgaggtcaggagatcgagaccatcctggctaacatggtgaaaccctgtctctactaaaaatacaaaaaattagccgggcgaggtggcaggcgcctgtagtcccagctactcaggaggttgaggcaggagagtggagtgaaccccagggggcggagcctgcagtgagcggagagcaygccactgcactccagcctgggcgacagcgagactccgtctcaaaaaaaaaaaaaaaacaaaaacaaaacaaagaagaaaagagagaagattcaaataaacacaatcagaaatgataaggggaatactagcactgaccccacagaaatacaaacaaccatcagagagtactgtaaaaacctctatgcacagaaactagaaaatctagaagaaatggataagttcctggacacatacaccctcccaagactgaaccaggaagaaactgaacccctgaaccgaccaataatgagttccaaaattgaagcagtaataaatagcctaccaataaatgaaagcccaggaccag

SEQ ID NO: 941588 - DNA, 769 bp, Homo sapiens
gagaacaaagagcaaacacaccccaaagctagcagaagataagaaataaccaagatcagagctgaactgaaggagatagagacaagaaaaacccttcaaaaaaatcaatgaatccaggagctggttttttgaaaaaattaataaaatagaccactagctagactaataaagaagaaaagagagggccgggcgcagtggctcacacctgtaatcccagaactttgggaggccgaggcgggcggatcacgaggtcaggagatcgagaccatcctggctaacatggtgaaaccctgtctctactaaaaatacaaaaaattagccgggcgaggtggcaggcgcctgtagtcccagctactcaggaggttgaggcaggagagtggagtgaaccccagggggcggagcctgcagtgagcggagagcacgccactgcactccagcctgggcgacagmgagactccgtctcaaaaaaaaaaaaaaaacaaaaacaaaacaaagaagaaaagagagaagattcaaataaacacaatcagaaatgataaggggaatactagcactgaccccacagaaatacaaacaaccatcagagagtactgtaaaaacctctatgcacagaaactagaaaatctagaagaaatggataagttcctggacacatacaccctcccaagactgaaccaggaagaaactgaacccctgaaccgaccaataatgagttccaaaattgaagcagtaataaatagcctaccaataaatgaaagcccaggaccag

SEQ ID NO: 941589 - DNA, 618 bp, Homo sapiens
cacatctgttagaatgactatttaaataaaaaagataacaggtattaccaaggatgtgagaaagttaaaacccttgtatgctgttggtggaaatgtaaaatggtgaagttgttctgaaaaatataggtttgttaaatgagattttcagaaaattaaaatggaactaccacatgatccagcaatcccacttctggatatatatccaaagaatctagatmagcatctcgaagagatatctgcactcaatgttcattgcagcattattcacaataatcaagacatggaaacaatttaaaacctgtaggacattatgctaaataaagtaaggctgtcatgatctcacctacatgaggactctaaaatagttaaagtcatagaaacagaggaaaatggtggttgccagtgactggggagagagagaaatggagagatgctctttcacaggtacgtagttccagttatacgatatgagcaaattctagagatctgctgtatatccttgtgcctatagttaacaataccatactgtgcacttaaaaatttgtcagaatagtagatattatgttaagtgttctcatcaaaattataaaaaaaatctttaatccatgggaatgtgtg

SEQ ID NO: 941590 - DNA, 592 bp, Homo sapiens
acactgaggctttagtcgtacatacaaagaaaatagccattcttcaccgctctcgtagtgttttacttaaacattacttaaacatttccagaaagtggcctcaggagattcaaatatggaaccaagttgcagattgttccacatccaaaagatgtgctaaacaattcattggcagccttattgcctccagccagaccaccaggttgcccattacccaatatgaccgtggcaaccagatatgcaaacctgcatgccctacccctgatgtcaattcctgcgctttgcctcataaaaaaagccctamatgctctttctggggagccagccagagaatccttccatctctgccatctccctcgcactcgagcacaagccccaaaataaagacttgtctgggaaatcttcttggcctcttgttaatttcagttacatgggaagcctaagagcctgtggtctctgaaaaatctactcaaatctcaccttcccttcaaggcaacaccattcctaccactctcataaagtctttataaacctgagacctctcacctcctccatgtcccctgctccctagaatactttatacttctctcaa

SEQ ID NO: 941591 - DNA, 798 bp, Homo sapiens
tgaaagtgccatctgctggctggaggccaaccaacacaaaaccagcacactaaacaaaaacacaaccaagcaccctcacagagtccacttcactcccttgctacccccactggagcaggtgctggtatccacggctgcaagacctgaagatggatcatatcacaggactctttgcagacactccccagtactggcctggagcccggtagctccactgggtggctagacccaagagagcaaaaacaattgctacagttcagctccaagaaagtcccattcctaggggaaaaaggagaacacacatcatgggagcaccccrtgggataaaagaatctgaacggcagcccttaaatcccagatcttccttctgacatagtctacttaaaagaaaagaaactagaaaaacaattctggtaatatgacaaaacaaggttctttaacacccccaaaagatcataccagctcaccggcaatggatccaaaccaaaacgaaatatctgaattgccagaaaattaattcaggtggtcaattactaagctaatcaaggagggaccagagaaagatgaagttaacatgatacaggatatgaaaggaaaactcttcagtgaaatagaaagcataaataaaaaaacaattacaacttctggaaatcaaggacgcacttagggaaatgcaaaatgcaccggaaagtctaagaaacaaaatagaacaaacagaacaaagaacttcatagctcaaagacaaggctttcgaattaaccaaatctgtcaacgacaaagaaaaaagaattttcaaaa

SEQ ID NO: 941592 - DNA, 769 bp, Homo sapiens
tgaggctccatgccaggtctccacttcctcctccaggcatgctacctcctcatccctttcagcagggtcatttagggctggtatgctggcttccctgtgcaagaatcgccaatttgccactcttgtcacttttcccttgtcatgttctgtctgtctctcacacacagacacctgccctactgttatttaaaacattgcttttggcactttccaggccaagctataaataaagggtggactgaccttgtcaactgttaaattggagccgtggtgcgttgcctagaacattgcggatgaccccgagcagcacagcagatcaacggctgagaaagagctcattcagctcatctaactaggatgctgtcctgccagagccctgggggttctcgtctcctggggcaaaagcagcatgcaacccttatgaacccatcttggaaggcattcggggagcccargacaagaccattgggagcctcagggtcacttgtgggggtctctgtgctggacggctgtacctctcatgaaatggacaactgaccataagaaggaggtaagttacgcatggacgggaaaataagaagctcctacttagggctgtgatatgtgcggtaaccatttaacgttaatagcatccatgtgagacaggtgctagtactgccccatttcatattggcggacattgaggcacacagactgtatgacttgcccaaggctgcccacctggttaggggagctccaggattccaatccagtccgaactcaacacgag

SEQ ID NO: 941593 - DNA, 599 bp, Homo sapiens
atgaaccagctataatttggaagatccccctcacctccttcccaggttcaataatttgctagcacagctcatagaaaacaatttacttactaaatcacaagtttattataagactacaactcaggaacagccagatagatgagctgcatagggcaaggtattggggaggggtgcggtgctttcatgcattctcctgggtgtgctaccctcccggtatgtggatgtgtttaccacctggaagctctgtgaacctcattcttttgggtctttagggaaattttattgattgcatcattggccatggtgattagctcaatctccagcccctctcccctccccaaaaggtagggrtggggatgaaattgcatctctctacacggttgggtcttctggcaactgatcccccatcctttgggcttttcaaaaatcacctcgtgaacagaaacagtgtaattggaagggacttgttatgaataacaaaaggtgttcctttcacctttattgctcttatctcgtaggaaattccaaaagttttagaagctctacaccaggaactgggatgaagaccaaatatatttctcattataagtcacaatatc

SEQ ID NO: 941594 - DNA, 758 bp, Homo sapiens
ctaggcacgggttccatctctgtagctctgtcctggcactgagctcagtatcaaagaaccccagataccccaggtcccctaatccaatagcccctcaccctacagctaagatttaaaaatgaagtatctgatgttgagagagacaaattaagttgtgcaatgatgtagtaaccagaacaagaaagggaagcaatccaatattcactaggtggtgagcagatagtgaaacctgacttaagagtggatgtttttaactctacataatagatgctctcttgtgaaaatgtgtagaaaacaaaataacagtctacatattgaagaatttgaattttaaaagaattgcagagtactccactgcttatgaaattcaagtaatcttacatgtttttcttatctagcttatgggtagaagcagaatgagcttctccagtgggatgaacacagacacttatattcaacaagttcacactgagcccatcatcattgcttggaaggctgctcctcttcctgtgttcttttttttgttcaatggcactgccatttccccatccagaacctgggatactgcagcagtcttttcactgcccctgtctacccctctccaakccattctctacacaactgcctacaggaatctttccaaaacattagttctgaccataactctacttttcttaagacagcactttggctccccattgacatcacagtctttagagtgatgtaatgttcatcattcggtcataagctgcaaatcc

SEQ ID NO: 941595 - DNA, 604 bp, Homo sapiens
catcaagtcatctcctattaattcctttcatgtgacgtctgctagttcttggagttctctaagatctatatcttgaaaccctttattcctaccctttttgccatagccacaatctcttttattattaccttgactgtctctgtcataaatcctatgaagtcatgtgcaacatctgggcacagttttttccaaatggaatttattatttcaggcttaatgacccaggattctttttatcccaataatagcatctttaatggcaggtaagcctttcagactttcataatgttctctctctcagatactcttccatagagacaatcctttccatagagtacagtgtgtaacgagccttaaaggtctttatgacccctgasctagagggtgaattagagacactgtgtttgggggcaagtagacacctttgacaccttccatgttgaactcatggggtttagtggccagggacattgtcaaatatcaaaagtacttttaagttcagtcacttactagcaaggtgcttcctgacttcagggacaaaccatcaaagggaccaatccagaaaaagggttctcattgtccaggccttcttgttgtacaacca

SEQ ID NO: 941596 - DNA, 681 bp, Homo sapiens
atgcgggctcttttttggttccatatgaactttgaagtagttttttccaattctgtgaagaaagtcattggtagcttgatggggatggcactgaatgtataaattaccttgggcggtatggccattttcacgatgttgattcttcctatccatgagcatggaatgttcttccatttgtttgtgtcctcttttatttccttgagcagtggtttgtagttctccttgaagaggtccttcacatcccttgtaagttggattcctaggtattttattctctttgaagcaattgtgaatgggagttcactcatgatttggctctstgtttttcttattggtgtataagaatgcttgtgatttttgcacattgattttgtatcctgagactttgctgaagttgcttatcagcttaaagagattttgggctgaggtgatgtggttttctagatatacaatcatgtcatctgcaaacagggacaatttgactacctcttttcctaattgaataccctttatttctttctcttgcctgattgccctggtcagaacttccaacactatgttgaatgggagtggtgagagagggcatccctgtctgtgacagttttcaaagggaactctgctgctgatacccggcaaacagggtctggagtggaccttcagcaaactccaacagacctgcag

SEQ ID NO: 941597 - DNA, 681 bp, Homo sapiens
atgcgggctcttttttggttccatatgaactttgaagtagttttttccaattctgtgaagaaagtcattggtagcttgatggggatggcactgaatgtataaattaccttgggcggtatggccattttcacgatgttgattcttcctatccatgagcatggaatgttcttccatttgtttgtgtcctcttttatttccttgagcagtggtttgtagttctccttgaagaggtccttcacatcccttgtaagttggattcctaggtattttattctctttgaagcaattgtgaatgggagttcactcatgatttggctctgtgtttttcttattggtgtataagaatgcttgtgatttttgcacattgattttgtatcctgagactttgctgaagttgcttatcagcttaaagagattttgggctgaggtgatgtggttttctagatatacaatcatgtcatctgcaaacagggacaatttgactacctcttttcctaatygaataccctttatttctttctcttgcctgattgccctggtcagaacttccaacactatgttgaatgggagtggtgagagagggcatccctgtctgtgacagttttcaaagggaactctgctgctgatacccggcaaacagggtctggagtggaccttcagcaaactccaacagacctgcag

SEQ ID NO: 941598 - DNA, 571 bp, Homo sapiens
atctgatgaacttaatctcccactcacctgaatgactatttctcattttctccgcttctcaaataaccaatatcttctcaccttcctccatctcaattgatagtcttgcttatttcactaaatagtagcaagcagaaaataatttttacatacatctactaccaaatctaccaacctacctgcaactgtacccatatactctgccttccctcctgttacaatgcctgaactgtttgtgccaaccttcctccccacttctgtgcattggatcccatccstttcatcaactcagagacttgacatctgccaattgtgccttccctcattatcaagatttttttttctttcattcgttgaatcattccccttaccacacaaacacattgaattacccctcatcttaaaacaaaaacctcccttgacccctaaatattgctcctgctccaactcaatgtacctgcttgcctttcataaaaactgtctttaacagaactcactttctctttaacagactgcagtcggactttgactcaactactccatcaaaacagtcccttcaaggtcatcagtt

SEQ ID NO: 941599 - DNA, 474 bp, Homo sapiens
attcaagatgagctttgggtggagagatagagacaaaccatattattcttctcctggcttcttccaaatctcatgtccttttcatatttcacaaccaatcatgccttcctaacagtctcccaaatttttaactcattccagcagtaactcagaagtccaagtccaaagcctcatctgagacaaggcaagtcccttccacctctgagcctgtaaaatcaaaagcaagttagatacccccaagatacaatgggggtacagacgttggataartgctcccattctaaatgggagaaattggccaaaacaaaggggccacaggccctatgcaaatccaaaacctggctgggcagtcattaaatcttaaagccccaaaatcttcttttgattccatgtgtcacatccaggaaatgctgatgcaaagggtgggctccctaggccttgggcatctctgactctgtggctctgcagggtaca

SEQ ID NO: 941600 - DNA, 628 bp, Homo sapiens
aagttacacatgtttatgagccttggttttctcattcataaaataacagcagccatacctgtgtcacaggtgtggataaaatgatactgcacatgtgaacacactgaacacagaacagttaccccaaagcccatttctgaagctatggactctagcacaatcttcctggattcttatcctctgtgattgtttgacagacttcccctcctccctctcccttcctcctctgtgtcctcctagattataaatgcaggctgaatccaccctctcagacacataagagacacgtgtgagtaggccgaaagacctttaagaaaagaccaatatttgcatatctattataactactcactgttcgacttgtttcattayaatttctatttggataatatgtaaggtcaatactgtcactgttctggaaaattcattttttattaaagcaaaatgcactgtatttatagagataacaccttaaatgctacgagagaaggtgcaccaattacactggttcccttgatggggcaggtttatgtgctacatgttttataatatgttacaaggaatgggaccttagcccgtgttgatgtgtcccaagtgtcattcctcgcttgaactcgaataggtctga

SEQ ID NO: 941601 - DNA, 779 bp, Homo sapiens
ctccagccatggctaaaagggaccaaggtacagctcaggccatagcttcagagggtgcaagccctattccttggcagcttccatatggtgttggtcctgcaggtgtgcagaagacaagaactgaggtttggaaacctctgcctagatttcagaggatgtacggaaatgcctggatgtccaggcagaagtttgctacaggggcggagccctcatagagaacctctgctaagagagatgtgtaagggaaatttgggttcggagcccacacagtcttcactggggcactgcctagtggagctgtgagaagagggccaccatcctccagacctaagaatggtagatccaccaaaagcttgcactgtragcccagaaaagccacagacactcaatgccagcccatgaaaccagccataagggaggctgtaccctgcaaagccacaagggcagagctgcccaaggctgtaggagcccacctcttgcaccagcatgacctggatgtgagacatggagtcaaaggagattattttggagctttaatatttaattattgcttcagtggatttcagacttgcaaggggcctgtagcccctttgttttggccaatttctcccatttgaaatgggtgtatttacccaatgcttgtacgtctattgtacctaggagataactaacttgctttggattttacaggctcataggtgaaagggacttgctttgtcacatatgagactttggacttggacttttggtctaatgctggaatgagctaagactttggg

SEQ ID NO: 941602 - DNA, 729 bp, Homo sapiens
gccagcactaagggaggcctggcctttctctctgctgcagccgtggtggcttctgtcttgttgctgcaacatgcatagcacagtgtcacctcagaacctgtgcctggctgttccttctgcccccctcagaggctcttgttcccaatatccacttggctgcctgcttagtccttcacgtctttgctcaaaagtcacttctcacggccaggagcagtggctcacactgtaatcaacactttgggaggccgaggcaggcctctaaatagattagaataagggaatccagaacactggtggaagaggtgggtcaccattataagcaggggaggtcttattgagaaggtgacttttttttttgcttgtttgttttttgagacagagtcttactctgtcgcccaggctggaatgcaatgacttggtcttggctcactgcagcctccgtctcctgggttcaagcaattctcctgcctcagcctcccragtaactgggattacaggcgcacgccaccacactggctaattttttgtatttttaatagagatggggtttcaccatgttgcccaggctggtctcgaactcctgacctcaggacaatctgcctgcctcagcctcccaatgtgctaggattacaggcctgagccaccacgcctgacctgattattacttcttgtatgtgaactcccattagagtgtcagctctacaagggcaaggatttgttcactgctgt

SEQ ID NO: 941603 - DNA, 615 bp, Homo sapiens
ttttagcccggatggtcttgatctcctgacctcgtgatttgcccacctcagcctcccaaagggctgggattacaggcgtgagccaccacaccgggcctgatttttatttttttaatgagctatctggatgcctgatgaagaataaactatgatgagaccaggataggagcaaggagaccagttcggagggtaccacagtaatgcagttgagatggcagtggcttggaccagtgtgttagtggtagaggctgtgaaaagtggttggattctatatatattttgaagtaaggttcatagttctyttctgagctactgaatgtgtagagtatgaaagacagaccaaaatgtatggatgattccaatgattttgccaaagcaactggaactggaggtatcaattgctaaaatgtggaaaaataaggaacaagttttggagaggattcaaattcttagttttggatatccagagagaatttaagatgcctgttacatatctaagagaaagatatgaaagatatgaaataggcagttggctataaaaacctgcaggttagaaaagaaacatggagatataattcacagtcgtcaaaccataattgccgtaagagtgaaaaa

SEQ ID NO: 941604 - DNA, 482 bp, Homo sapiens
ctttagtcagcgtatcttaaatttactctattcatttgtatattgcataggataatagctggtatgtagttggtgctcaataattacttgtggaataaattaatttttcttaacatacagcagggagacttggagaggaaagggcctagggagagtttcctatttcttttttttttttttttttttttttttttttgagacggagtctcrctctgtcgcccaggctggagtgcagtggcacgatctcggctcactgcaagctccgcctcccgggttcacgccattctcctgcctcagcctcccgagtagctgggactacaggcgcccgctacaacgcccggctaattttttgtatttttagtagagacggggtttcaccgtgttagccaggatggtctcgatctcctgacctcgtgatccgcccgcctcggcctcccaaagtgctgggattacaggcgtgagccaccgcgcccggccgagtt

SEQ ID NO: 941605 - DNA, 619 bp, Homo sapiens
actgaaaaatcaaagccaataagtattcactttccaagtttccattttctaatattttcccctcttattggagcagtaatcaaatgaatgctcaaataaaaataagtctatatgtgacggtaagtgtcttatgacatttacttttaggtttatctttcaattttaaacatagtttcagtgtctatattcatggaggggaggactaggagaaggagtaaaagacaggggttagatagacctgggaattaatctyattccaccacattctagctaaccttggatgggttattcaattttgctgaatctcaggttctttatctatagaacaaggatacctgtctgaagaatcattacatgagttagagataatatatgtaaagaccttaatatgttgcctaaaacaaaataaaaaaccaataaatagtactactattacatacggttttcccactcttctaggtttctaccatatgctataaattaaaaatttccattaaatgagactggtctcactagctataatttgagcaatacatcttccagatggaatttgaatcctggcatcaagcataatgtccgtagcacctaagaaaatgcctgatccataacaaatctcaat

SEQ ID NO: 941606 - DNA, 645 bp, Homo sapiens
tttgttctcattagtttcaaagaacttcttgatttctaccttaatttcattacttacccaggagtcattcaggagcaggttgttccattactatgtagttctgtggtgttcatatcttaatcttgagttttaatttgattgtgctgtgatctgagagactgttattattttagtttttttgcatttgctgaggagtgttttacctctaagtatgtgatcaattttagagtaagtgccatatggcactgagaagaakgtatattctcttgttttggggtacagagttctgtgatatctatcaggtccacgtgatccagagctgagtttaggtcctgaatatctttgttaattttctgtctcaacgatctgtctgatattgacagtgggatgttaaagccttccactattattgtgtgggagtctaagtctctttgtaggtctctaagaatttgttttataaatctgggtactcctgtattggctgcatgtatatttagggtagttagctcttcttgttgaattgaccctttagcattatgtaatgcccttctttgtcttttttgatctccgttggtttaaagtctgtttgccagatactaggatggcaacccctgtttttttctgttttacgtttgcttggtaaat

SEQ ID NO: 941607 - DNA, 610 bp, Homo sapiens
atctggctggtcagagaatctgaggcttgacttgggaagaacattgagtctgacctccctttcccctgccaagttttgtagatggacaagctaatttcatttattcattcaacatgttctttggaaactctttccaagtaccattttagacacagataatacatcggtgaacaaaacagacaagtttttgcagtatggagcttaacattcgttctgttgggaagacagtacccataggtaatgtacaagaaagtgctcggtgctgggtgcrgtgagagggtaggatgggaagagtagagcagggtaggggagatctgaagcttgggtggtggggaggggtggggatgtacttttaaatggaagatatcagagtgggtctcccagagacggtgacctttgagcgaatgttagaaggagtcgagggagtgagtcccaaggatttctggggaaagagcatctcagacagaagtaatggccactgtgaaggtcctgaaagttggccagagtgagcaaggagtgtataggaagagatagataactaggagccaagtaggcctcgtaagcctctagagattttggcttgtgtttttggatgagatggaaagccatg

SEQ ID NO: 941608 - DNA, 679 bp, Homo sapiens
gggtacgtgtctgggggctgcatgcaccggtaattacatcggaacaaaacaggatagggattttcacagtgcttttctatccaatgtctgtaatctatagataacataaccaattaggtcaggggtcgatttttaactaccaggcccagggtgtggygccgggctgcctgcttgtggatttcatttctgtcttttagtttttactttttctttctttggaggcagaaattgggcataagacaatatgagcggtggtctcctcccttattccccccctttgagaatctcactcaatagtgggagttctcactttcttttttacttcccatgtcttcttgcaagacagatcgatagtgattcacatagtacattgtgctgaagcattttggtgaactaaggtagtgatgaagctttttatcatttgaagaagtacaggtagcaaacaagggagcagtaagcaggttcctattactattataactcttattataagagttttaaatcctcttagtgctgggaaccattttccaaacatggccccaggatcaaatctatgccacacttgtacgggcacatgtgccagttttgtcatatctctaactatgtcttcaactacttacccttgattatctatgtgtaggcagcaattagtaaggttaaatttcctgcagacctctcc

SEQ ID NO: 941609 - DNA, 681 bp, Homo sapiens
acctcgcttcctggtcagggaaccaagaaatgtagcaggatgagctgcagacaaaactcctcagactccgagttaaagaaggaaggggtttattcggctgggggcattggcaagactcctgtctcaagagccaagctccccgagtgagcaattcctgtcccttttaagggctcacaactctaagggggtgcgtgtgagagggtcgtgatcgattgagcaagcagagggtacgtgtctgggggctgcatgcaccggtaattcgatctgaacaawacaggatagggattttcacagtgcttttctatccaatgtctgtaatcgataacataaccgattaggtcaggggtcgatctgcccagggtgtggcaccgggctgtctgcttgtggatttcatttctgcctttcagtttttactttttctttctttggaggcagaaattgggcataagacaatatgaggggtggtctcctcccttaatgcctctaaccccagcactttgggaggcccaggcatgtggatcatctgaggtcaggagttcaagatcaacctggccaacatggcaaaacctcgcctctactaaaaatacaaaaaaattagcctggcgtggtgacgggcacctgtaatcccagctactcaggaggctgaggcaagagaatcgcttgaacccagaaggcagaggt

SEQ ID NO: 941610 - DNA, 681 bp, Homo sapiens
acctcgcttcctggtcagggaaccaagaaatgtagcaggatgagctgcagacaaaactcctcagactccgagttaaagaaggaaggggtttattcggctgggggcattggcaagactcctgtctcaagagccaagctccccgagtgagcaattcctgtcccttttaagggctcacaactctaagggggtgcgtgtgagagggtcgtgatcgattgagcaagcagagggtacgtgtctgggggctgcatgcaccggtaattcgatctgaacaaaacaggatagggattttcacagtgcttttctatccaatgtctgtaatcgataacataaccgattaggtcaggggtcgatctgcccagggtgtggcaccgggctgtctgcttgtggatttcatttctgcctttcagtttttactttttctttctttggaggcagaaattgggcataagacaatatgaggggtggtctcctcccttaatgcctctaaccccagcactttgggaggccsaggcatgtggatcatctgaggtcaggagttcaagatcaacctggccaacatggcaaaacctcgcctctactaaaaatacaaaaaaattagcctggcgtggtgacgggcacctgtaatcccagctactcaggaggctgaggcaagagaatcgcttgaacccagaaggcagaggt

SEQ ID NO: 941611 - DNA, 602 bp, Homo sapiens
agcttctacctcctgggctcaagtgactctctcacctcagcctacttagtagctaggagtacaggtgcaggccaccacgcctggctaatttttttgctttttgtagagatgagtatctcaatatgttggccaggctggtcttgaactcatggcctcaagcaatcctcttgcctcagcctcacaaagtgcagcatgagccactgctcccatctgccttttttagtgatactttttaaaagtagcttggaagagtgtagggagaattggcctcagagaaagtgasttcaaatcttgactttgccatttattgcctgagtgattttgaacaaatcacttaatctctgcaaggttcaatttcctcatctgtgaaagaagtataatggcagtgtattagtccattttcatgctgctgataaagacatacccaagactgggcaatttacaaaagaaagaagtttaaaggacttacagttctatgtggctggggaggcctcacaatcatgctggaaggtgaaagtcacatctcacatggtggcagacaagagaagagaacttgtgcagggaaactccccttttaaaaccaccagatcatgtgagactta

SEQ ID NO: 941612 - DNA, 584 bp, Homo sapiens
  misc_feature 558, 559, 560, 561, 562, 563, 564, 565, 566, 567, 568, 569,570, 571, 572, 573, 574, 575, 576, 577, 578, 579, 580, 581,582, 583, 584: n = A,T,C or G
tagctcttatgcacattgatgcaaaaatactaaaaaaattactaacaaaccaaattcagcagcatactaaaaagattatacactatggccaagtagaatgaattcttggaaggcaaggatggttcaacatatgaatatcaatcaatgtaatacattacattaacagaatgaaggaaaaaacatataatcatctcaatggatgcagaaaaggcatttaacaaaattcaaaaccgattcatggtaataacacttaacaaactaygaatagaaggaaattacctcaaaataacaaaagccacatatgaaaaaaaccccagcaaacatcatattcaatggtgaaagactaaaagtttttctctaggattgggaacaagacaaggatgtccactttcaccaattctaatgaacatagtactagaagatatattcagagaacctaggcaagaaaaaaaaggggcattcaaataagaaaggaagaagtaaaattatctctgcagatgaccagatattatattcctaaagatttcacacagttgttagaactaataaatgaattcnnnnnnnnnnnnnnnnnnnnnnnnnnn

SEQ ID NO: 941613 - DNA, 631 bp, Homo sapiens
tgatagacacaaggactgatagagagaaaaagcggtaggctttattgagcagagtgaaagtacaaagcttccacagcgtggaaggggtccctcccgaatgggtagccagagttagattatacaactgccttttaaactctttaaggtgggaaatacgtgcagcgggaagatgttaccagagcragaaaaaaagacaaccatttgtgacatgtcttagatcttaaggaaaaccggaattgcaacttaggttttatttattttatgacctcgcagcggcatggcaaaggagacagcatcttacaggactttacaaagtatgttcacaaggaattgggattgggagtatagataaggtccactggtcacagaaaaatggccagttaacattctttttactttagtttcgggggagggggaaggggagagagggagagaggacacagagaaacgtacaggaaaattttcgctgtttatggctttcttggggaagaaaacacatgcagaaatcctggtgttaggaatagtttaagcatgtatcttcaatattatccatccaggaccaaagtaagtcctgatgcaggaaataagggagtttcacagctttctgagcccctactcgacccaggaagcc

SEQ ID NO: 941614 - DNA, 642 bp, Homo sapiens
tatcatattaagcagaagttttgcttcacaaactctcagccaaatacaaaatactatgaatagtatttaccttgtgtctctttccaaagaactcatagtggtttgcagctattgcagatatcctggccatgaggtatgcagttcctttttttttttttgagacggagccttgctctgtcgcccaggctggagcatagtggcgcgatctcsgctcactgcaagctccgcctcccaggttcgtgccattctcctgcctcagcctcccgagtagctgggactacaggcgcccaccaccacacccggctaatttttgtatttttagtagagacggggtttcaccgtgttagccaggatggtctcgatctgctgacctcgtgatcctcccgcctcggcctcccaaagtgctgggattacaggcgtgagccaccgcgcccggccgcagttcctttttctagctgtttgaataggaaagatgacttggaaaatgctggattctgagcagatttatgtgcagccttaaaaagtgtagtttttctctatcaataatgagtgtgggttgtaattgcttagtaagtaattttgtttatgtaaacgtacatttgttaaattttttttcttaggtaatcccgtttgttggcacca

SEQ ID NO: 941615 - DNA, 642 bp, Homo sapiens
tatcatattaagcagaagttttgcttcacaaactctcagccaaatacaaaatactatgaatagtatttaccttgtgtctctttccaaagaactcatagtggtttgcagctattgcagatatcctggccatgaggtatgcagttcctttttttttttttgagacggagccttgctctgtcgcccaggctggagcatagtggcgcgatctcggctcactgcaagctccgcctcccrggttcgtgccattctcctgcctcagcctcccgagtagctgggactacaggcgcccaccaccacacccggctaatttttgtatttttagtagagacggggtttcaccgtgttagccaggatggtctcgatctgctgacctcgtgatcctcccgcctcggcctcccaaagtgctgggattacaggcgtgagccaccgcgcccggccgcagttcctttttctagctgtttgaataggaaagatgacttggaaaatgctggattctgagcagatttatgtgcagccttaaaaagtgtagtttttctctatcaataatgagtgtgggttgtaattgcttagtaagtaattttgtttatgtaaacgtacatttgttaaattttttttcttaggtaatcccgtttgttggcacca

SEQ ID NO: 941616 - DNA, 711 bp, Homo sapiens
gctaccccgccatattaaaataggaggctatgttgccatatcacttacatgtagaacacttttctggaagatcagttagcaagaggcacgtaaggaataaagtgatttttctctaggaaaaaagatacagggatgaattacattatcctggattgatcagaacgatttagtcaggagggaaagaactatcggtttaactagaaatgagaaactaaagttaaacccatttggaggatagtgaataagtttggggtaacagtctttcrtgagttacttgatagaggctatttaaaattagacagatgcctccaaaaagaggtttaatggggcctctgaggggaataatcaagtttctggtttagctatgagactatattaaactataagttaatggttctaactgacttttctcgagtagaaactcaacttcaagctagattttggccagagactattcagagatgtttttgtctttccttgcaatattttctctgatcagactaacttctaatagattgtttgaaaaccaggaaaactaaatctgcagaaataggttctgtagaattactcttattctgaaaagaagtttcatggtaaaatatgggaaataggttttgctccctttgaaggcataccatgttaatataaacagtcccagaaaccctgctagagagaatctggcaagtcctaggtagaggcttaagtatcagg

SEQ ID NO: 941617 - DNA, 584 bp, Homo sapiens
atgacaggatcaaattcacacataataatattaaccttaaatgtaaacaggctaaatgcccaaattaaaagacacagactggcaaattggataaagagtcaagacccattaatgtgctgtatgcaggagacccatctcatgtgcaaagacacacatgggcttaaaataaagggactgaggaatatttaccaagcaaatggaaaacaaaacaaaacaaaaaagcagggattgcaattctagtctctgataaaacagactttaaaccaacgaagatcaaaagagacaagggcattacataatggtaaagggatcaatgcaacaagaagagctaactatcctaaatatatatgcacccaatacaggaacacccagatkcataaagcaagttcttagagacctacaaagagacttagactccccaaaataatagtgggagactttaacaccacactgtcaatattagacagatcaatgagagaaaattaacaaggatatccaggacttgaactcagctctggaccaagcagacctaacagacatctacagaactctccaccccaaatcaacagaatatacattcttct

SEQ ID NO: 941618 - DNA, 584 bp, Homo sapiens
atgacaggatcaaattcacacataataatattaaccttaaatgtaaacaggctaaatgcccaaattaaaagacacagactggcaaattggataaagagtcaagacccattaatgtgctgtatgcaggagacccatctcatgtgcaaagacacacatgggcttaaaataaagggactgaggaatatttaccaagcaaatggaaaacaaaacaaaacaaaaaagcagggattgcaattctagtctctgataaaacagactttaaaccaacgaagatcaaaagagacaagggcattacataatggtaaagggatcaatgcaacaagaagagctaactatcctaaatatatatgcacccaatacaggaacacccagattcataaagcaagttcttagagacctacaaagagacttagactccccaaaataatagtggragactttaacaccacactgtcaatattagacagatcaatgagagaaaattaacaaggatatccaggacttgaactcagctctggaccaagcagacctaacagacatctacagaactctccaccccaaatcaacagaatatacattcttct

SEQ ID NO: 941619 - DNA, 663 bp, Homo sapiens
acctcacatcctaccactctctccctttgtagttcaatacaacatactggccttatgctgtttctcacctgtgcctggctctccaaggccccacccatctgcaaggctcaactctcattttccttagatagttgtcaaatatcatcttctacgaaagttcttcctctacccaatgtacttacaattgcaatctctataggactttctattctctttgactcatttacttttcttcataaaacttagcaccttctaatatctaatatcttacatataatgtattagtcagggtgctctggagagacagaattaacaggatatgtgagtatatgaaggggagtttattaagaagtattgactcacatgatctyaagtggaagtctcataataagctgtctgcaagctgaggagaaagaaagccagtccaagccccaaaacctcaaaagcaggtaagcaaacagtgcagtcttccatctgtggccaggcagaggcctgagagcccctggcaaaccattggtgaaagtccaagagtccaaaagctgaagaacttggagcaaaatgtgcaagagcaggaagcatccagcacaggggaaagatgaaggccagaagactcagcaaatctgctctttccagcttcttctacctgctttactctagccacac

SEQ ID NO: 941620 - DNA, 560 bp, Homo sapiens
aaaatagaagcaacggatttttaattaatatctgaaaaaattacagatttaaaaaataaacaataaaaacacatgaccttgatttgacccagattgagaagaagttgctagtttagaaaaatcaggggtttaacttttgacacgtatatataacacaactaattagatcttgtatgaactggaaagtagaaaaaggagattgttctaatagtataagacttctaaacctacaccttataagaaaaagattgattaaaagtgaccttaataaacaattcataattattagcctgtgctaaggatgtttttaaaaaagacttgaaatttgaatatgccaccttgaatatactctgaagcacattgtcatmtaaattaagagtgaatataaagggtcctataataagtatagattttgttcatcaaattgaaaatttaacattccagtgataaactcccaggagcctacagaagtaaatctaacctttcttggacaaacaggtgctctactcagactatgcagaattatttcaaatacagtttctgttaaagatagctttgta

SEQ ID NO: 941621 - DNA, 757 bp, Homo sapiens
gaatattactattttaacaaattgttatctgcttgctcaattaagagtaaaaaatgtttttattttaccttcacttatttcttcccttatgttttccttttctttatgtagatccaatttctgacctatactgttttccttttctttgaagttttttaaacatttcttgcaagacaagtctattggcaaaaaagttcctcaatttttgtttgagagtctttatttcttcttaacttttgaaggataatttcacagggtaaaaattgtgggttagtggggcttttttcccttaatattttaaatattatactctccctttgcttgcatagtttttgaggagaagttsgatataattcttctataagcatgttgggtttatttcttctggcttttttttttttttcaaaactggtctttattttttactttcttcagtttaaagttgatatgcatagctgtatcataataaactatgcatttgttggcattcatcctgtttggtgttctctgagattcctggacctgtggtttggtgtctggcatttatttgggcaaaattctcagtcattattatttcaaatatttcttttgtcctctccctgtctcttcttcttctccttctgggatttcctttattaatattttaccttttgtagttatcctaaggtacttggatgtttggttcttttttcctcagtctttgttctctttgatttcaactttggaggtttctcttgagacagttgtaagctcagtg

SEQ ID NO: 941622 - DNA, 556 bp, Homo sapiens
tctacatcagcacttgctgcttcatcttgcacttttaagttatcatgatggcttcttacctttaacaccatcaatcaacctttgatagcttcaaacttttcttctgcagcttcctcacatctgtcatccttgataccattaaagaaagttaggaccctgctgtaaattagggtttgggttaagsgcatattgtggctggtttgatctattcagactgctaaaattttctccatatcagcaataaagttgctttgcctttttatcatttttgtgttccctggagtagcacttttaattttcttcatgaactttttctttgctttcacaagtgggcgatttggagcaaaaggcttagctattggcttatctcagctttcaatatgatttccttagtaagtttaatcattttaatcttttgatttaaagtgagagatgtgtaactcttcctttcatgtgaacacttaaaggccattgtagggttgttaattggcctaatttcaacactgttgtgtctcagggaagaggaaggcttaaggagaaggagaatatgagagac

SEQ ID NO: 941623 - DNA, 584 bp, Homo sapiens
ttaactgcactgtcatgttggttgttttttgtaaacataagttttcaactcctttgagtaaatactaaggtctatgattgctggatcacatggtaagaatatgtatacttttgtaagaaactgccaaaatattttccaaagtggctgtgccattttgcatttccaccagcaacgaatgaaaattcacattgctctacatccttgccagcatttagtggtgtcagtcttccrgattttgggcattctagtagccgtatcatggtattttattgttttaatttgcatttccttgatgacatcatgcacagcatctcctcataaacataatttccatctgtcttctttggtgaggtgtctgttaaggtctttggcccattttaaaaatcaggtcatttattttcttattattgagtttttagagtttttgtatgttttcagtaacaatcatttattagtatgtcttggcaaatattttctcccagtctgtagtttttcttttcattttcttgactgtgtctttgcagaacaatgaaaaaataatttcaatagagtcccgcttaaaagttacttctttcaataattat

SEQ ID NO: 941624 - DNA, 680 bp, Homo sapiens
agttatacagctcctacctagcacagaccattccaaccacaggcatatcttagagacattttgggttcaattttggaccacctcaataaagcaaacgtttcaataaaacagattacagacattttttgggtttcccagtgcatataaaagttatatttacactatactttagtatattaggtgtgtagtaatattatrtctaaaaagaaacaatatacatatctcaatttaaatatatattattgcttaaaatcccgacaatcatctaacctttcagcaaattatgtaatctttttgactgctgagggtcttgcctcaatgcggatggctgctgattgatgagggtggtggctgctaagtctggggtaactgtggcatttttaaaaaaaataagacaacaatgaagtttgtcacatcaactgacttttcctttcacaaaagaattttctgtagcataaaatgctatttgatagcattatacccacaataagcttccttcaaaattggagtaaattctctcaaaccctgccactgctttatcaaacaggtttagtggacccttgaacaatttgtgggttaggagtactggcacccctcctcgtgcagtcaaaaatctgcatctaattttgactcctgtaagttttaattactaattgcctactgttgaccagaaactttac

SEQ ID NO: 941625 - DNA, 716 bp, Homo sapiens
gagatttctcaaatgtgagatgggaatggtaactgaacccacttcccagggtggctgtggagactgagaccacacatggccatatcacggcatccagcacacgtgggaccctagccgtgttgcccttgatgggaatccttctatgcmccctctgccaccagggccaactcccaacagtagctgtggagggtgtgtcctctattcccactccacccacctcccattgctccacgcagtgacctgccacgtagcggccaccagcaaacccagccccactgtacaggctcctgtggataccacccccccacccccacccctgcttggggcgtcttccacttgcggttccgaaggaggctgagaaaccaccctcaagggcgctcacctgctccttgttgcacgtaatgacctgccacgcagggcaaccagcaaacccagctccaccatccaggctctggtgggtaaccgcccccccagccccaggtgtctgggaggctcaaaaactgccctccaagggcactcatctgttccttattgcactaatacctcgtttacagaaatccactttgacttccctgcactgcaggtgtgacaatttaggaatcctgcttgcttgtgagctccaagagcttgaggtcacgtccacctcaccagcatcccaggacccagtactgtcccactctgtgattgtgtgtttaaaattccaaaatactctttca

SEQ ID NO: 941626 - DNA, 716 bp, Homo sapiens
gagatttctcaaatgtgagatgggaatggtaactgaacccacttcccagggtggctgtggagactgagaccacacatggccatatcacggcatccagcacacgtgggaccctagccgtgttgcccttgatgggaatccttctatgcaccctctgccaccagggccaactcccaacagtagctgtggagggtgtgtcctctattcccactccacccacctcccattgctccacgcagtgacctgccacgtagcggccaccagcaaacccagccccactgtacaggctcctgtggataccacccccccacccccacccctgcttggggcgtcttccacttgcrgttccgaaggaggctgagaaaccaccctcaagggcgctcacctgctccttgttgcacgtaatgacctgccacgcagggcaaccagcaaacccagctccaccatccaggctctggtgggtaaccgcccccccagccccaggtgtctgggaggctcaaaaactgccctccaagggcactcatctgttccttattgcactaatacctcgtttacagaaatccactttgacttccctgcactgcaggtgtgacaatttaggaatcctgcttgcttgtgagctccaagagcttgaggtcacgtccacctcaccagcatcccaggacccagtactgtcccactctgtgattgtgtgtttaaaattccaaaatactctttca

SEQ ID NO: 941627 - DNA, 615 bp, Homo sapiens
gcacctattggcatcttcttcattaacaagatgttttctaaccaagcaggtcggtcacaaggacttgaagccgccacagtgtttttgaaaaaggagtgacaaaggctaagggaagaagcaaaaggtgtgaaacctgcagaaatccagaagacaagagaaaggtgcttgtggtgaggcaagaatccacatgttaaagctcacagacagccacggacgcgcagcagccatgcctttcctggagccagcgcaagcacacaggacaaagccacctcatcgacacacagaggcccttcccattcacaagctccagcacacacagaatactcattcgctgttcatttttttggatctgttgtattgttttctaagactgatcaaaccataattccaagaagagtgaaaaattcaagctttaacaaaaatatagcaaatgaatgaaaagttatcaaggtacacacacaagctggtcaactcrcttttcctagtgaaaggcgggcagtctcggatgctgcctctgcctccacggctgcctccaccaactcacagctcatgatacaggttctcgtctcccccacggaacacaaggctgacgtctcaacacggagccaagaacca

SEQ ID NO: 941628 - DNA, 487 bp, Homo sapiens
agaaaaacaagaagagaacaagatggaagcaggtctttttgccacctaatctcagaagtgagactccatcacctttactgtattctattcactagacacgactcattaggtccaacccacacttaagcctagaaggtttgcattagttatctattgagcataacaatattaccaaaaacttagcagcttaaaaccacacacattgattatttcatggtttctgtgggttgttgagttgggccattgctgagctgtgccttctgttcagggtctcgcaaagctgcagtgaaggtgttggccacggctgyattctcatctgaggcttgcccggggaagagtccatgtccaagctcatgcaggttgctggcagaatgcagctccctgtggttgtgtgactgagcactttggtttcttgctagctccctgatggaggcctctcttggctctggagggtacccacagttgactgttatggggggctctccca

SEQ ID NO: 941629 - DNA, 564 bp, Homo sapiens
gcatggggcctgtagccccttggttttggccaatttcttccatttggaatgtgcatgtttaaccaatgcctgtactccattgtgtctaggaaataactcactttattttgattttgcaggctcataggtgaaagggacttgctttgtctcagactagacttggactgtggacttttgagttaattcttaaatgagttaagactttggaggactgttgggaagtcataattgtatctgaaatgtgaggacatgagattttggaggggccaggggaggagtaatatggtttggctgtgtccccacccaaatttcatctttaattgtagcgcccataatgaccaggtgttgtgggagggacatttttgggaggtaattgaatcayggtggcaggtttttcgcatgctgttctcatgatagtgaataagtctcatgagatctgctgcttttataaagggtagttccctttcacatgctttcttgtcttccaccatataagacatgcccttgctcttcctccacattctgccatgattgtgacacctccccagccacgtggaactgtgg

SEQ ID NO: 941630 - DNA, 604 bp, Homo sapiens
gcctcccaaaccaaagtgctgggattacagacataagccatcatgcgcagccttaatagtggcttttcaattggggtcctgacaggagaaaaaaaaatggcaactcaaattgagtatttagcaaggattaattcagagactacttacaaatagatggatgaggtgtagcaaaacaagatacagtgaaatagcaagtctggtaagaatggggtgcttatatactataagtactactactactactaaggacaaaagtgagagtgtgtccggaattgatgggttcttggtctcactgacttcaagaatgaagccgcgttccctcgcagtgagtgttacagctcttaaggtggcgcgtctggagtctgtcccttctgatgttcagatgtgttcrgagttttttccttctggtgggttcgtggtctcgctggctcaggagtgaagctgcagacttccgcggtgagtgttacagctcttaaggtagcgcgtctggagttgttcattcctcccggtgggctcgtggtcttgctgggctcaggagtgaagctgcagatcttcgcggtgagtgttacagctcataaacgcagcgtggacccaaagagtgagc

SEQ ID NO: 941631 - DNA, 580 bp, Homo sapiens
actctacaatcccaaatagactctttggcaggagtgactctccaaaaccaccaaggcctagacctcctcactgctgagaaaggagaactttgcaccttcttaggggaagattgttgcttttatactcaccagtcagcgttagtatgagacaccacccggcgtgtacaggaaaaggtttctgaaatcagacaacacctttcaaactcttctaccaacctttggagttgggtgacatggcttctcccctttctagttgccatgacagccatcttgctattactcgccttcaggccctgtatttttaacctccttgtcaaatttgtttcctccaggatcaaggccatcaagctacagatggtcttagaaatggaaccccaaatgaggtcaactaacaacttctgccgaggacccctgaaccgacccactggccctttggstagcctagagtgttcccctctggaggacactaccactgcagggccccttctttacccctatccagcagggagtagctagagttgtcattgctcaattcccaacagcagagaatgttgggatgtcctgtttagaggggaaattg

SEQ ID NO: 941632 - DNA, 579 bp, Homo sapiens
actaaaggtaacatcctaacatatgtcactgagttgtttttcaaaaacccggatccccaccaaatggatccattggcacttaggcccagataaggaggaaatgaggactgaaccctgaccgctgttctttgttctaaatttcttcctaaggggcctggaggaggtcacacccacgagccagagctgacgttcttttatagagacaaaactttgcctcyttaaccaattgcaaatgagaaaatctttgagtctgccaccaacctatgggctcctgctttgagatagcccacttttataggtcaaaccaatgtatagcctccgtgttttgctttatgactttgcctgtaacctctgcctcttcacctttagaaactgttacccgtaagtcatctgggagttccggtcttaagcatgagctgcccgattcttcttgcttggtgccctgcaataaatgcctcactttctcttgatgctatgccaatgtcagcatgtggctttgctgccccaggcaagtggaccccagttcagtttgataacaaagataagtaaatcaaaaccaatatcatatcctcgggggta

SEQ ID NO: 941633 - DNA, 833 bp, Homo sapiens
aactgtaccatgtgctacaggggccagaagatgaacagactgaccttgatgagctgtgcacaaagtggcataaaaaacatgtggttacacagtgtgaataaagtgctgcggagcaagaggaggccgttgattcacttcacgctttcagcgaatgacaaaatcatctttgtgaaggcctcgcaggaagacscaacacatgggacctataactgcccagcggacagtggcaggacaggaaaaacccgtcaatgtactaggatactgctgcgtcattacagggcacaggccatggatggaaaacgctctctactctgctttttttctactgttttaatttatactggcatgctaaagccttcctattttgcataataaatgcttcagtgaaaatgcagctttactaagctttatttcagcagtcaagcttgtaatggcaatttagtcatcagtaaatcagcaggttgcccttgggggaggaggggagcaaaactgctgattctcaggagagaacaggacagttcctgggaacgagcacatgagcacaggtgcatcctgcggcccggaatgcggcaatatgggtggtgtcacacacggcaagtgggccgggcatcccggctgggtggctgtgccttagacagagagagtggggcttggtgcaatacaatgtgtcaggatgggcccagtcttatgccagaaacagagagggctatgggaaaggagccctgcagcacggcaccagcttgtcaggtgcaggaaaacaagcgcgaaaggctggcctggcacccaggcatcagaatagacagcgtgtgagcagaaggtgtccggaagttatg

SEQ ID NO: 941634 - DNA, 614 bp, Homo sapiens
atgtaggagagccaatggtttagttccagactaaaggctagaaggtttgagacccaggaagagccagtatttaagttagtgtctgaaggcaagaaaaaagccaatgtcccggttcaaaggcagtcagtaaggaaaaaattctgtcttattggagggaggggtsagccttttcgttctattcaggccttcagttgattggctcaggcccacccacgttagggacgacaatctgttttactcagtctaccacattaaatgttaatctcatccaaaaacactctcagagaaacatccagaataatatttagctaaatatctaagcactctattgccaagtcaacttgacatataaaattcgccatcacaagctggaagccaccatcctcagcaaactaacacaggaacagagaaccaaacactgcatgttctcactcataagtgggagttgaacaatgtgaacacatggacacagggagaggaacaacacacactagggcctgtggagggtgggggaaagggaagggagagcatcaggacaaatagctaatgcatgcagggcttaaaacctaggtgatgggttgataggtgcagcaaaccaccatggcacacgttta

SEQ ID NO: 941635 - DNA, 738 bp, Homo sapiens
tgaaccaggtgtaccataagcagcttcgatggctgtattagtccactctcatgctgttataagaacatacccaagactgggtaatttacaaaggaaagagtcttaattgactcacagttccacatggctggggaggcctcacaatcatggcggaaggcaaaagagaagcaaaggcacatctcacatagcagcaagcaggagaacgtgtgcaggagaactgccctttataaaaccatcagatctcgtgagacttattcactttcaagataacagcatgggaaaaactcacccccatgattcaattacttccyaccagttccctcccatgatatatggggattaggataggaacaattcaagatgagatttgggtggggacatagccaaaccatatcattccaccccagcccctcccaaatctcatgtcctcacatttcaaaacaaatcatgccttcccaactgttccccaaagtcttaattcatttcagcattaactcaaaagtccacagtccaatgtctaatctgggacaaggtaagccccctccacctatgaacctataagatcaaaaacaagtcagttacttcctggatacaatggggttacaggcattgggtaaatacacccattccaaatgggataaattggccaacataaaggggctacaggcctcatgaaagtctaaaatccagcaggacagtcaaatcttaaagctccaaaatgatctcctttaactgcat

SEQ ID NO: 941636 - DNA, 738 bp, Homo sapiens
tgaaccaggtgtaccataagcagcttcgatggctgtattagtccactctcatgctgttataagaacatacccaagactgggtaatttacaaaggaaagagtcttaattgactcacagttccacatggctggggaggcctcacaatcatggcggaaggcaaaagagaagcaaaggcacatctcacatagcagcaagcaggagaacgtgtgcaggagaactgccctttataaaaccatcagatctcgtgagacttattcactttcaagataacagcatgggaaaaactcacccccatgattcaattacttcccaccagttccctcccatgatatatggggattaggataggaacaattcaagatgagatttgggtggggacatagccaaaccatatcattccaccccagcccctcccaaatctcatgtcctcacatttcaaaacaaatcatgccttcccaactgttccccaaagtctyaattcatttcagcattaactcaaaagtccacagtccaatgtctaatctgggacaaggtaagccccctccacctatgaacctataagatcaaaaacaagtcagttacttcctggatacaatggggttacaggcattgggtaaatacacccattccaaatgggataaattggccaacataaaggggctacaggcctcatgaaagtctaaaatccagcaggacagtcaaatcttaaagctccaaaatgatctcctttaactgcat

SEQ ID NO: 941637 - DNA, 692 bp, Homo sapiens
tgggacaaggtaagccccctccacctatgaacctataagatcaaaaacaagtcagttacttcctggatacaatggggttacaggcattgggtaaatacacccattccaaatgggataaattggccaacataaaggggctacaggcctcatgaaagtctaaaatccagcaggacagtcaaatcttaaagctccaaaatgatctcctttaactgcatgtctcacaaccaggtcatgctgatgcaagaaggggttcccatggtcttgggcagctctgcctctatggctttgcagggtaaagtccacctcctggctgctttcatgggctagtgttgagtgtctgtggcttttccaggcacacagtgctagctgttggtggatctaccattctgagatctggaggatggtggtcctcttctcacagctccactaggcagtgccccagtggggacgcwgtgttggggttcccaccacacattttccttctgcactgccctagaagaggttcttcatgagggacccacccctgcagcacacctctgcctggacatccaggtgtttctatgcatcctctgaaatctaggcagaggttcccaaacctcaattcttgacttctgtgcacccacaggcccaaaaacacgtggaagccaccaaggtttggggcttgaccctctgaagcaatggtctgagctgta

SEQ ID NO: 941638 - DNA, 692 bp, Homo sapiens
tgggacaaggtaagccccctccacctatgaacctataagatcaaaaacaagtcagttacttcctggatacaatggggttacaggcattgggtaaatacacccattccaaatgggataaattggccaacataaaggggctacaggcctcatgaaagtctaaaatccagcaggacagtcaaatcttaaagctccaaaatgatctcctttaactgcatgtctcacaaccaggtcatgctgatgcaagaaggggttcccatggtcttgggcagctctgcctctatggctttgcagggtaaagtccacctcctggctgctttcatgggctagtgttgagtgtctgtggcttttccaggcacacagtgctagctgttggtggatctaccattctgagatctggaggatggtggtcctcttctcacagctccactaggcagtgccccagtggggacgcagtgttggggttcccaccacacattttccttctgcactgccctagaagaggttcttcatgagggacccacccctgcagcacacctctgmctggacatccaggtgtttctatgcatcctctgaaatctaggcagaggttcccaaacctcaattcttgacttctgtgcacccacaggcccaaaaacacgtggaagccaccaaggtttggggcttgaccctctgaagcaatggtctgagctgta

SEQ ID NO: 941639 - DNA, 372 bp, Homo sapiens
gaatgtcatgtctggattttctatttagaccactaaaactttctccatatcagtgataagattgttttgccttcttatttgtgtgtttactggtgtaacacttttaatttccttcagtaacttttgttttgcatttacaacttggctaactgtttygcacgagaggcctggctttcagcctatcttggcttttgacctgctttcgtcactaagtaatcatttcttgcttttgatttaaaatgagagacatgcaactattcctttcacttgaacacttagaggccattgtaggcttattaattggcctgatttcaatattgttgtgtgtcagggaatagagaggccccaggagtgaggagtggaagagatatg

SEQ ID NO: 941640 - DNA, 605 bp, Homo sapiens
gcagtcagaacatatacaacatttattgattaagtttgctgtattatatgggcatggttcatggtatcccaaacaattataaaaacttcaaagatcacagatcaccataacagatataataataataagagcatttgaaatgtttcaagaattaccaaaatgtgacacasagacgcaaagtgatcacctgctgttggaaaaatggtgcccatagactcgctcaatgcatagttgccacaaatcttcaaatttgtaaaacatgcagtatctgtgaagcacaataaagcaaagtgcaataaaatgaggtatgcctctgcctgtgtgtcttcttctagaggaagatggacaataaataataagtaaaatatatattaggtaattgtattttcttttttctttctttttttttttttttttgagacattgagacaaggtgttgctctgttgcacaggctggagtgtagtggcatgatcatagctcactccagccttgtactcctgggctcaagcaatcctcctgcctcaacttcccgagtagctgggactataggtgcccatcacaatatctgactactttttaaatttttatttctgtggagatgggg

SEQ ID NO: 941641 - DNA, 594 bp, Homo sapiens
acgttccttggagaagggacagtagatccaaagaacgggacacagacagagcttggtacatccaaggaatggcaggtagttgctggagtggtcagcaatggaatgacacaattatgagagacaaggccagagaagtaagaggaggtcayatcataaaagactctctaagctaaattaaggaagttgaactttatcttatagtccaaggaaaacaggtaaagggtttgaagctggagagtagcatcatcaaatatgaactttgaaagatacttctgctgggtggcagaggttaggtcagaaggacacaacactaggggaagggagactaggtgagaagctcttgcatcaatccccatgaaagataatggtggcctggactactgtcatggaagtgggaaagaaaaagtgtagaaggaatcaagaatccttttattatataaaattactgattagatagaggatttgaaagggtgaaaagaagcaaggacaatgtcctgatttcagacttgggcaactgggtgcatggtgatgtttttcaatgagattaagaatcaatgaaaaggaatcaatcagagaaagtaatgactaatgaat

SEQ ID NO: 941642 - DNA, 737 bp, Homo sapiens
gggaaaaatagagctagggtgtttcacacttgaaaacttaacagtggcctataaagaaaggattgggccaggcgctgtggctcacgcctgtaatcccagcactttgggaggctgaggcaggtggatcacctgaggtcaggagttcgagaccagtctggacaacacggtgaaacctatctctattaaaaattcaaaaattagctgtgtgtggtggtgggtgcctgtaattccagctacttgggaggctgaagcaggagaaacccttgagcccaggaggcaaaggttgtagtgagccaaaatcatgccactgcactccagcctgggcgacaagagcaagactccgtctaaaacaaaaaaaaaaaagaaaargaaaaaaaaaggattggagcccccttaaggtagcacagttttagccaagttaaattcttaaaaatacataatacagcacttgactttgaaaatgacctgcagtttgcttgtggaagtggacatccgaaagattgcagcttgtgagttattttatttttattttttgagatgaagtctcaatctgtcacccaggctggaatgcaatccagctcactgcagcctccacttcccaggctcatgtgattctcctgcctcagcctcctgagtagctgggattccaggtgtgcaccaccatgcctggataaaatttgtatttttagtagagatagcctttcaccatgttgcacaggctggtctcgatcttctga

SEQ ID NO: 941643 - DNA, 474 bp, Homo sapiens
tgctgcaggtgtaggattccctggcctggggagaagtccacttatatgtctctgagtactacgcaaaaatttttttgtttcctggaggattttcaaaattcaaaatatcaagtcactttgagacatattgagtctgatgttaaaaaggaaatgwtctagagtcaactgaaacacacactttaagtacaagtgaggtcaggcctagagaaagattttgggagcatagtggcaacagtttaacttgtgaaagcaaatgtggtcactgatggaagaagtctgaagcatagatcaaggtcttggggaaacctagaagccatgggggtgggaaaaagaaaagtatctgttggaaaatagaatgatagaaagatagggaaaaacctaagggagccaaaggaagagatatttcaagaagaaataggtggccaaagctgcccaatgctaaacaaaacaaaacaaaacaaaacaaaacccaca

SEQ ID NO: 941644 - DNA, 474 bp, Homo sapiens
tgctgcaggtgtaggattccctggcctggggagaagtccacttatatgtctctgagtactacgcaaaaatttttttgtttcctggaggattttcaaaattcaaaatatcaagtcactttgagacatattgagtctgatgttaaaaaggaaatgttctagagtcaactgaaacacacactttaagtacaagtgaggtcaggcctagagaaagattttgggagcatagtggcaacagtttaacttgtgaargcaaatgtggtcactgatggaagaagtctgaagcatagatcaaggtcttggggaaacctagaagccatgggggtgggaaaaagaaaagtatctgttggaaaatagaatgatagaaagatagggaaaaacctaagggagccaaaggaagagatatttcaagaagaaataggtggccaaagctgcccaatgctaaacaaaacaaaacaaaacaaaacaaaacccaca

SEQ ID NO: 941645 - DNA, 587 bp, Homo sapiens
aaatctgtaaattactttaggtagtaatttaccctatcatttttacaatattctttcaacccacaagcatggactatctttccatttttgggggtcctcttcaacttttttcatcagagttttatagttttccttgtatggccctttcacttctttggttagagtgattcctgggcattttatattttttgtagttactataaatgggatttcttgattttttttcagattattcactattggcatatataaatgctactgatattttgagacaggatctcgctctrttgcccaggctggagtacagtggctcgatcttggcttactgaaacctccccctcccaggttcaagtgattctcatacttcagcgtctcgagtagctgggactacaggtgcacaccaccacacctggctaatttttgtactttttttagagacgaggtttcaccatgttggccaagctggtctcgaactcttgacctcaagtgatctgcccaccttggcctcccaaagtgatgggtttataggcatgagccactgcacctggtcatgctactgatttttgtatgttgattttgtatcccgc

SEQ ID NO: 941646 - DNA, 760 bp, Homo sapiens
gaagaagatagtttggatttgaatcaaatatgttctctgcagacctcagtttataaagttaagactgtattctttggtaatggaaaagattttttattttttatttttttggagactgtgtcttgctctgtcgtcctgcctggagagaagtggtataatcacagstcactgcagcctcaacttctatggctcatgtgatccttccatctcagccctaccccaagtagctgggactacaggcatatgcctgactgatttttttcttttctgtagtgacgggggtcttcttatgttgcccaggctggtctccaactcctgcctcggcctcccaatgtgctgggattataggcgtgagctgccgtgcctggctggaaaagatttttcagtggctcctatacttgacacctagggcacagcatctctgcctccttgactgatttatagagacaagggtctcacagttctgcccaggctggtcttgaattcctgagctcaagcagtcctttctcagccttctgagtagctgtgattacaggtgcatgccacacctgtgagcatcaggttcctgctcaaagttttcactcatataggttcataatcaaagtttggagaccactgctctagagtatccttctgcagaaattttgacatttaattctacttacttttatcatctgtgcacatgtattttctagagcaattatgagtcaaaagttcaggcagtctgggctcctgtaggagttgatgcttggttttgaga

SEQ ID NO: 941647 - DNA, 498 bp, Homo sapiens
ccagaatgagcctatgctaaacagaagaggatttgctgttgtggctgaagactgagggcaagtgtgagaaggctcatacaggactgaagaaaaggcatcagctctgtttgtgtggtgcttcccttcttctctcttaaaaaatttgctgcactcactctyccctgtcactctcactcttactggtctcagctcctaccttatcccttctactcacccactgctgtccgtagctgtcctccaggtcattcaagtatttatcttcccagtggaggcggatgcccagcagatcaacaggcctaaaaccattctcagccaggattacaaagtaggtaaagaatccagccagagcctggatcatccctgtgaatgacagagttgcaggacaggggagcctggttcagagaagggccccaaaaggtaggccaggggagggctgggggctgggacttgcttctggctgggctggtgtgtgtctgaagagtaatgcggaagaatctt

SEQ ID NO: 941648 - DNA, 601 bp, Homo sapiens
actgagttttttttcatatgctgttggctgcatgtgtaccttcttttgaaaagtgtccatgtcctttgcccgctttttaatggggctgtttttttttctctagtaaatttgtttaagtttctcatagatgctggatattagacctttgtcagatgcatagtttgtgttttttttccatactgtaggttgtctgtttactctattgatagtttctttcactatgcagaagttcttaaatttaattaratcccacttgtcaatttttgttcttgttgcaattgcttttggtgtctttgtcatgaaatctttgttcattcctatatctaggatggtattgcctaggatgtcttccagggattttagagttgtgggttttacatttaagtcttgagttgatttttgtatataatgtaaggaaggagtccagcctcaatcttctgcatatggctagccagttatcccagcaccatttattgaacagggagagaaaaaccctatagtcttggccccaatgctgcttcagctgagaaacaacttcagcaaagtttcaggatacaaaatcagtgcacaaaaatcaatcactagcattcctatacaccaa

SEQ ID NO: 941649 - DNA, 605 bp, Homo sapiens
ttgtcatttatgtacttttcccaaaccatctattgcattctagcagatttttcagtatcttcaacttcttcaactactttccttattcttattccctcccactatcacttaaccctcttggctcctcagtgaccgtactactggtgttaatacgtgtctggaatatagaaagggttcatttaagtgcacaattatgccattcacaactgttgttatatactagaacatagcttaagcttagaatatgcaaatgcagtagaacctctcttaagcaaatttcatttaaacaacatgccagattaatctcattttctaatttcaaatatactaaccagtcaggtgtggtggcatgctcctgtagtcccagctactagggaggctgaggcaggaggatcacttgaggccaggaggttgtggcttaagtgagctgagattgcaccrctgtactctagcacagttgacagagtgacatcctgtctcaaaaagaaaaaaaaagttagattgcaccactgtactccaacctggtagacagtgtgacatcctgtctcaaaaaataaataaataaataaaaataaataaaactaaccactgccaacaatgtaatt

SEQ ID NO: 941650 - DNA, 558 bp, Homo sapiens
ctcctgtctcagcctcccaagtagctgggattacagtcacctgccaccacgcccatctaatttttgtatttttaatagagacggggttttaccgtgttgtccaggctggtcttgaactcctgacctcaggtgatccgcccacctcgacctcccaaagtgccttttctcagttctcaatattttttttcttttcaaacgctatgactccatatccatcaagatagtgtgtccggaattggtgggttcttggtctcactgacttcaagaatgaagccgcggaccctcaagatgagtgttacagttcttaaaggcggcgtgtccggagtttgttccttctggtgtttggaygtgttcagagtttcttccttctgagggggttcgtggtatctctggctcaggagtgaagctgcggaccttcgcggtgagtgttacagctcttaaggtggcgtgtctggagttgttcattcctccccgtgggtttgtggtctcgttggcttcaggagtgaagctgcagaccttcgcagtgagtgtcacagctcataaaggcagtgtggaccc

SEQ ID NO: 941651 - DNA, 638 bp, Homo sapiens
cttgttgccaggctgcagagcaatggcatggtctcggctcactgcaacctctgcctcctgggtttcagccatcctcctgtctcagcctcccaagtagctgggattacagtcacctgccaccacgcccatctaatttttgtatttttaatagagacggggttttaccgtgttgtccaggctggtcttgaactcctgacctcaggtgatccgcccacctcgacctcccaaagtgccttttctcagttctcaatattttttttcttttcaaacgctatgactccatatccatcaagatagtgtgtccggaattggtgggttcttggtctcactgacttcaagaatgaagccgcggaccctcaagatgagtgttacagttcttaaaggcggcgtgtccggagtttgttccttctggtgtttggatgtgttcagagtttcttccttctgagggggttcgtggtatctctggctcaggagtgaagctgcggaccttcrcggtgagtgttacagctcttaaggtggcgtgtctggagttgttcattcctccccgtgggtttgtggtctcgttggcttcaggagtgaagctgcagaccttcgcagtgagtgtcacagctcataaaggcagtgtggacccaaagagt

SEQ ID NO: 941652 - DNA, 779 bp, Homo sapiens
tctgtggccagtggcacctttgcccaagttttgcttgggcccactgggctcattccacccattcgacctggcagactgcgctgggctttcactaccagcctggataccatgcctgccaagggtaagccaggaatggtgtggtgaggcttgcatgagcagcgagtacagggtctggccactgcacacagccagacactctggctgcagtggggcaggcagctccaggcaccagcgtaagcactgtctccctgctgcaactggaccagacataccgcaagcggcttccactgtggtcactgggaaatgtggcagcacccagaagcttggagatgccaggaaccacagaaccccaaagagggtctcacagccctggctcagggagctcctatgtctgggctccccaaagggccacagtgcttctgtccttctctcttttctccttcttgttgcctgcaatgtggcaagcgaggggaaggtgtgttycagcactgtttgtgttacagctctttcagccctgccatttagcaggtcctgagttcttgtcccatgtccaggaaaaataagagatgtggactactagagggtgagcaaggtgaagtgatgctttactgagtgacagtacagatttcaggagagccaaagtgagtaccttctatgtgcaggcaggtcatcccaatgagtgtgcagccctcagcagagaggagatccagagtgggtagctcctctccacaagcaggtcatcctgtcatctgcccgagtctgactgaatccagagtttt

SEQ ID NO: 941653 - DNA, 584 bp, Homo sapiens
cattcacctgctgaaagacatgtgggttgtctcctgttttagtacatcatatagaaagctgctatgaactttcatgtactcatttttgtgtgaacataggttttcccttttctgggcgaaatactcaggagtgaaattgctgagtcacatggtaaatatatattaatttatttaattaattaattcattaatttatttattttggaggcagagtctcggtctgctgcccaggctygagtgcagtggtgcgatcccagctcactgcaacctctgcctcctagattcatgtgattctcccacctcagcctcccgagtagctgagattacaggcgcacaccaccatgattggctaaatttttgtatttttaagagagatggagtctcaccatgttgaccaggctggacttgaactcctgagctcaggtcatctgcccaccttggcctcccaaagtgctaagattacagtaatggcttgagccactgtgcctggccaaatgtatattaactttataagaaactactaaagtgtttttccagagtatgtgtaccattttacatccccaccagcttttctggcgggaata

SEQ ID NO: 941654 - DNA, 642 bp, Homo sapiens
gatggggcccgtccacattagggagggcaatttgctttattcagattactaactcaagtgttaattcatccagaaacaccctcacagacacacccagaataaggcttgccaaaatgcctgtgtaccctgtgtcaagtcayattgaaacatacagttaactacacctatcctagccacccttcctttgttgccccttgtgtcctgaaggcctttccatttcttctgatccatgtctttatcctggccactgcgtgatatcgcatgtaattttgaatgaacagaattgtctgggattctttactggttgtttgtgttgtgtcatttactaaattctaaacttgtatatggtgatggcagagattttatttactaaacaggagatgtatattttctatatcctcctcaatggaaagcaggtggatgtgcaacaaatgtttatttatgtatttatttatttttttgagatggagtcttgctctgtcacccaggctggagtgcagtggcctgatcttggcttactgcctcccgggttcaagtgattctcctgcctcagcctcctgagtagctgggactgcaggtgcgtgccaccacgcatggttaattttttgtatttttagtagagatgggatttcaccatattgg

SEQ ID NO: 941655 - DNA, 629 bp, Homo sapiens
aattgtctgggattctttactggttgttygtgttgtgtcatttactaaattctaaacttgtatatggtgatggcagagattttatttactaaacaggagatgtatattttctatatcctcctcaatggaaagcaggtggatgtgcaacaaatgtttatttatgtatttatttatttttttgagatggagtcttgctctgtcacccaggctggagtgcagtggcctgatcttggcttactgcctcccgggttcaagtgattctcctgcctcagcctcctgagtagctgggactgcaggtgcgtgccaccacgcatggttaattttttgtatttttagtagagatgggatttcaccatattggtcaggcaagtcttgaactcctgacctcgtgatccacccgccttggcctcccaaagtgctgggattacaggcatgagccaccgcacctggcccaacagatgtttattttatttaattaattaatttatttattttgagacagagtcttgctctatcacccaggctggagtgcaatggcacagtctcagctcactgcatcctccgcctcctgggttcaagcaattctcctgcctcagcctcctgagtagctacatgttcaatccatttgg

SEQ ID NO: 941656 - DNA, 735 bp, Homo sapiens
ggtccctatgattatcattatgattgtgaatatccgtgattattttcactggtggcattgagcatacaggaactctgtaatataaaacaggaggctgggtcaggtggctcacacctggaatcccagcactttgggaggccgaagcaggaggatcacctgagcccaggagtttgagaccaccccgggcaacatagcaagaccccatctctctacaaaaaaaaaaaaaaaaaaaaattagtggagccgggcrcagtggcttgtgtttgtcctcctagctgtttgggaggctgaaggaggagggtccgttgagcccaaaagtttgaggttgcagtgagctatgatcacaccattacactccagcctgggcaacaaagccagaccctgtctcaaaaaaaaaaaaagaaaagaaaaagaaaaaggtgttgaattttttttctttttaagtttaagaaactgaaaaagaagggctcaagcttcagtcctggcttgatcctgccccactcttgacctgtgtgtgacctggggcaggtgacggttcccctcagagtctcggtttcctcatctgtgaggtgagagccaaccttacaccctcctttcagacccctgagtgggcctggacaaatgagctgagattgttaacaccacaggacgtcctgagcactggccatgccccaagccctgatctacgacctccacaaacaccagagccagtggccagggacagcccaacccccg

SEQ ID NO: 941657 - DNA, 446 bp, Homo sapiens
atgatgtgattattacgtattgcaagcttgtatcaaaacatctcatgtaccccataaatatatacacctactatgtacccacaaaaatttaaaaaaaaagtcaattggttatctatgtatagatctatttctggactctgtcctgttctattgacttatttgtctttcctcttgcctttcccatgctgtcttaattactgttgctttggaataagacttcaagacttscaggcagtagaagtcctctgacctggttcttttgtgtctcttgaagacacatgagtacacactctttcatggcccgttggccaaaattgcatcaaatgcccattcccagcccagtcactggcaaggggaatgggattacagggtgacctagtccatcagggtttcctttggggagagaaaagggttacccttcctcaagttgtgtggaggaagaatag

SEQ ID NO: 941658 - DNA, 571 bp, Homo sapiens
tacatccctttatctggatcctgatttttttacatatgaaatgggcctattgaagacagcataccattgggtcttgcttttttatcgcaacttgccactctgtgccttttaagtggggacattataacccatttgccaaggcatttagctcatttaccagttagctgttagtaaccagctaatagcacaatgacaggatcaaatccatgcatatcaatactaaccttgatatcaatacaaaccttgatacrtgtggatttgatcctgtcattgtgctgttagctggttactacattggcttgttcatgtggttgctttgcagtgacactagtctgtgtgtttaagtgtgttttcatattagctggtagcagtctttcctttgtatgtttagtgctcctttcaagatctcttgtaagacaggtctggtggtaatgaagtccctcaacatttgcttatctgaaaaggatcttatctcttcacttaggaagcttggtttggttggatatgaaattcttggttgaagatttttttctttgagaatgttgaatatgggctcccaatctcttctgtc

SEQ ID NO: 941659 - DNA, 580 bp, Homo sapiens
agcaagacccacctaagaagacatggctagccccacccccacttcatggtccttccctctccaccttggtagtggaagacaaagggcatgtaatcttgggagttctagggcaccacccaccaccgctccctctccacactactatagctgatgctttctggaaagtgccatctcttggcaggaagccaaccagcacaaaaatagagcactaaatcactaaagctaaaaactctcaaggagtctattgcaccctcygccacttccacccaacatgctctggtatccctggctgagagactcatagatggttcacatcacaggactctgtgcaggcaacccccagtaccagcccagagctgggtagtctcactggatggctagacccacaagaaagacaacaatcactgcagttcaactcacaggaggccacatccataagaaaagggggagagtactacatcaagagaacaccccatgggacaaaagaatctgaacaacagccttcagcactagactttccctctaacagagcctacccaaataagaaggaaccagaaaatcaaccctggtaatatgacaa

SEQ ID NO: 941660 - DNA, 615 bp, Homo sapiens
agatcctacttaacccagtggtgacccaaacctgcaacgttgaagggtttgaattctcaatgatcctgcttttattgaaaggccatagttttccattaacattcaaacattacctttattaaagcataacttatataaataatatgcactcatttagtatagagctctataagatttgaaaaatgaacataactcaagtaaccaccactgtaaaatcaaatatagaacacttccatcactccagagtctctcatgccctttkgcagtgatgcctcacctgagtaacagacaactgctggtttgcttgttaaagtttttcatgtaaatagaatgacacaggatgtactatctggggcctggcttctcatatcagcaaaatgtttttgagatgcatctgtgttgttatgcacatagtagttcattcctttttatttctgagtagtataccattgtaaagatgtaccacctgctggtggacatttgtgtggtttctactttggggcatgtgccagttatcaatttattgcctcatagctgtggatttgctctaagagtaccttttccatattagtggcctggatttcccttttacagtgagcaaaatgttaagcattg

SEQ ID NO: 941661 - DNA, 613 bp, Homo sapiens
aattggaattcccatcggttacatttatgacaatccgtgaccactcttcaaggttcatctggcttctgcacaggctaaactggtaagttaaatgggagatattatagctatcaccacctctgcttgtttcaaggttttgatagtggcatttacttctgcagctctcctaggaatgcagcactgcttctggtttacyatcctggtagggaagttccaggtgctaccacttagcctttcctaccatagtgatcttcactgcatgggtcagagaaccaatgtgggaatgtgccagttgccatgtgtgtctgttccatgtatgtctgctctgtagtgtgtacctactccctttgatcttgctgagatctgtcctgacgtatagatctctctacatttaggagctgggaaacaactgcagggtgggtctgtggactaatttggtccactgttagtgagacgtaggactccatctatcatctaaccaccataagcctctactttgacttgctgaccataataacattttgaagccctaggaattagcaccaattcagagtcagtttccagctttccctaaaaggtctgggcatttcttgttctccaatgcacagtcact

SEQ ID NO: 941662 - DNA, 733 bp, Homo sapiens
taccggttgttcctttccatgcttagtgcttccttcaggagctcttttagggcaggcctggtggtgacaaaatctctgagcatttgcttgtctgtaaagtattttatttctccttcacttatgaagcttagtttggctggatatgaaattctgagttgaaaattcttttctttaaaaatgttgaatatcggcccccactctcttctggcttgtagagtttctgccgagagatccgctgttagtctgatgggcttccccttgtgggtaacccgacctttctctctggctgcccttaacattttttccttcatttcaactttggtgaatctgacaattatgtgtcttggaattgctcttctcaaggagtatctttgtggcgttctctgtatttcctgaatttgaatgttggcctgccttgctagattggggaagttctcctggataatatcctgcagagtgttttccaacttggttccattctcccygtcactttcaggtgcactaatccgatgtagatttggtcttttcacatagtcccatatttcttggaggctttgttcatttctttttattcttttttctccaagcttctcttctcacttcatttcattcatttgatcttccatcactgataccctttcttccagttgatcgaatcggctactgaggcttgtgcatttgtcatgtagttctcgtggcttggttttcagctccatcaggtcctttaaggact

SEQ ID NO: 941663 - DNA, 747 bp, Homo sapiens
aaattcatcccaaaccaattttccttgatgcttgatcccatcttggggcaaatgtatctatgtaattatgaactgaaagatctgtaccattaaagacttattcttcagagcacaagccacttcgctgtaggaaactgtctcagaatagcaaaacagagagtattctagctttcttcacatcagctattgatgaccacgtgatcaatgaattcagtgacacaaagacactgacagggttctactgaattcagccaacaaccaatgatcttggaagagggyatcaggtgggtaataggtataaagtgaaacttccagaaggacccggtcattctccctctacatacagataagtactagttgcagatatatatatatatatatatatatactcttaagaattttcaagaatatttagagaatagagtcctcatcaaagatttagatggtgtcaaagacctcaaacagagatgggtcagacctctttgatccttctgggctggctcaaaatgaggcagaaaggtacatacaggttctggtacctgatggaagattgatgagtggaacctgcacatgaaggctctatgtgttattaatcttgtttactaaggataaagtgtgtaaaatacatggatgagcatctggcgtatggtaagttttcagtaaatattaggtttttaaaaaatcctttttacgaaagtaactatgtacatgtaaaactttgctaaattttgtaaataattacaataa

SEQ ID NO: 941664 - DNA, 667 bp, Homo sapiens
tgctgcagaggttttgtttatggccagttttggagccagtatatggccagattttggggggtttgttcccaacacatagtcccatatttcttagaggctttgttcatttctttttactcttttttctttaaatttctcttctcactttatttcattaattttatcttcaatcactgacaccctttcttccacttgatcaaatcatgtattgaagtttgtccatgtgtcaccaagttcttgtgccatggttttcagctccatcaggtcatttcaggtcttctctacactgtttattctagttagccatttgtctaatcttttttcaaggtttttagcttccttgcaatgggttwgaacaacttcctttaactcggagaagtttgttattacagaccttctgaagcctacttctgtcagcttatcaaagtcatactccatccagctttgttccattcctggcaaggagctgtgatactttggaggagaagaggcactctggtttttagaattttcagcttgtctgctctggtttctcccatctttgtggttttatctacctttggtctttgatgctggtgacctaccgatggggttttggtgtggatgtcctttttgttgatgttgatgctattcctttctgtttgttagttttccttcttagagacag

SEQ ID NO: 941665 - DNA, 667 bp, Homo sapiens
tgctgcagaggttttgtttatggccagttttggagccagtatatggccagattttggggggtttgttcccaacacatagtcccatatttcttagaggctttgttcatttctttttactcttttttctttaaatttctcttctcactttatttcattaattttatcttcaatcactgacaccctttcttccacttgatcaaatcatgtattgaagtttgtccatgtgtcaccaagttcttgtgccatggttttcagctccatcaggtcatttcaggtcttctctacactgtttattctagttagccatttgtctaatcttttttcaaggtttttagcttccttgcaatgggttagaacaacttcctttaactcggagaagtttgttattacagaccttctgaagcctacttctgtcagcttatcaaagtcatactccatccagctttgttccattcctggcaaggagctgtgatmctttggaggagaagaggcactctggtttttagaattttcagcttgtctgctctggtttctcccatctttgtggttttatctacctttggtctttgatgctggtgacctaccgatggggttttggtgtggatgtcctttttgttgatgttgatgctattcctttctgtttgttagttttccttcttagagacag

SEQ ID NO: 941666 - DNA, 735 bp, Homo sapiens
tttgagcttccccagccactttgtttacctagtcaagcctcagcaatggtggacaccccttgccctgccaggctgctgccttgcaggtctatctcagactgctgtgctagcagtcagcaaggctccatgagcatgggacccaccaatccagatacaggatataatctcctggtgtgccgtttgctaagatcattgaaaaatcacagtattagggtgggggtgtcccaattttccaggtacagtctgtcacggcttcccttggctaggaaaggraaatcccctgaccccttgtgcttcctgggggaggtgatgccccaccctgctttggctcaccctccatgggctgcacccactgtccaacaagtcccaaagagatgaacctgataccccagttggaaatgcagaaaccaccatcttctgcattgatcacgctaggagctgcagaccagagctattcctattcggccatcttggaatggactgatttctgcatttccaactggggtaccctgttcatctcattgggtccagcccacagagggtgagcaaaagcagggtggggagttgcctcacccaggaagtgcaaggagccaggggcctccttttcccagccaagggaatctgtgaggaattgtgctacctggcccagatactatgcttttcccatggcttttgcaatccacagaccaggagattccctcgtgtgcatatactaccagggccctgggtttcaag

SEQ ID NO: 941667 - DNA, 662 bp, Homo sapiens
gctgccttgcaggtctatctcagactgctgtgctagcagtcagcaaggctccatgagcatgggacccaccaatccagatacaggatataatctcctggtgtgccgtttgctaagatcattgaaaaatcacagtattagggtgggggtgtcccaattttccaggtacagtctgtcacggcttcccttggctaggaaagggaaatcccctgaccccttgtgcttcctgggggaggtgatgccccaccctgctttggctcaccctccatgggctgcacccactgtccaacaagtcccaaagagatgaacctgataccccagttggaaatgcagaaaccaccatcttctgcattgatcacgctaggagctgcagaccrgagctattcctattcggccatcttggaatggactgatttctgcatttccaactggggtaccctgttcatctcattgggtccagcccacagagggtgagcaaaagcagggtggggagttgcctcacccaggaagtgcaaggagccaggggcctccttttcccagccaagggaatctgtgaggaattgtgctacctggcccagatactatgcttttcccatggcttttgcaatccacagaccaggagattccctcgtgtgcatatactaccagggccctgggtttcaagc

SEQ ID NO: 941668 - DNA, 842 bp, Homo sapiens
tggtggtgtacatgctttgtgatctttgtggattcatatttctctatgtttaatctgtggggatcctgtccacattgtggatgctttcctctggagaggcttcatgtcagtttctgctgtgagccagtggcactactaacctgggatccctctagccccttcaggtgttctgccttaaggtagagactcagggttggcatcctgaatggaactactattaggttgatctatgtgaaaatgttgcttttttggggtcaaaccagttgaatatccacaattttatatggtccaacctacgctagcaacacttgcactaaggacaaaagcctgttcttcctgcttgcttactgtttgcctctcctagctagttttgactmaatgtttgtttccctttttttggtggggaaggtggctttggagactttcccaatttcctgtaatcccagtaaagcattaaaaaattatattttattcaggaggaaataaattcgcagaattatattgcagagaagaggagaggtgctacgagtagctaagccaactgctagaggctaaaattcaggacaggtgtatttttcccagtgaggaaaccaaggctcaaagagatgaaatgacttactcaaggtcacacagctagtaatgggcagggctaggactttctagaaacccaggctctttccactttccctctgtcctgccctgcctccagagagctgtttgggcctgggggtgtccttacctggtgcagggggatgacgaggaaggcccctccaccagcacactcagtcacaactgcaatgaagtgggggttcacggcacagaagtggttgtcgtgaacgctg

SEQ ID NO: 941669 - DNA, 557 bp, Homo sapiens
ggggtttcgctgtgttggccgggctggtctccagctcctaactgcaagtgatctgccagcctcggcctcccaaggtgcggggattgcagatggagtctcgttcactcagtgctcaatgttgcccaagctggagtgcagtggcatgatctcggctagctacaacctccacctcccagccacctgccttggcctcccaaagtgccgagattgcagcctctgcccggccgccaccccgtctgggaagtgaggagcatctctgcctggccgcccatcgtctgggatgtgaggagcccctctgcccggctgcccagtctgggaagtgaggagcgcctcttcccggscgccatcccaactaggaagtgaggagcgtctctgcctggccgcccatcgtctgagatgtagggagcgcctctgccccatctgggatgtgaggagcgcctctgcccggctgcgaccccgtctgggaggtgaggagtgtctctgcccagcagccccgtctgagaagcgaggagcccctccgcccagcagccgccccatctgagaagtgaggagcccct

SEQ ID NO: 941670 - DNA, 578 bp, Homo sapiens
cccagattaggggtgggtctgcctttcccagcccactgactcagatgttaatctcctttggcaacaccatcacagacatacccaagattaatactttgcatccttcaagccaatcaagttgacactcagtgttaaccatcacaagtccaccccttatcaacttgaacccatatatatctcctgagatcatacataatctttaaataaagrcaatgataaagtcataattatgcctaacataatacaactatccttcgcacaacctgaaaggcaccaatccccaacccaaatactactacataaagttaacatacttaaatgctgatatgaagtcaataaatctcatgtcacgtgataaataaaatgaagatatttttctttacttttttttttctttttttgttttttgagatgaagtcttgctcgtcacccaggctggagtgcaatggcatgatcttggctcactgcagcctccgcttcctgggttcaaaggattctcctgcctcagcctcccaagtagctgggatcacaggtgcctgctaccacgcccagctaatttttgtatttttagtagagac

SEQ ID NO: 941671 - DNA, 765 bp, Homo sapiens
tttctctttcatatttgaaggatgtttttgccactataataatagtgggatgttatcccactattctgggataaaagtctttttccttcagcagtttgaatatatcatgctaccctcttctggcacgtaaggtttccactgaaaagtctgctgccagacctattggagttccattttatgttatttctttcttttctcttgctgctggttattcaggccaaagggctcttcagtaagcaggtgatgaatcctgtcgagtgggtccttcttttcaaagcagcaggttcccttccagcccaggatgtatctagaaatgtcatccaggagctagggcctggaaagggtgcttcacgactgtctggtgccctgtcttgctgtgactgagctggtatcccagatgcgagacaaagtcctcaacattcttccctctcctctccttgagcagaaggaaggggtctcttttggagtggtgagctatgcagtctggggttaacggaggggtgatgccagcagccccttaagccatcctggttggtgtctcagtaggtcatatatctgccygccatgtccattggctctgagtccagttcagccctaagacttgccaagaagttgcagttcttgtggcctacactgcctttcaagtttatttaggggcccagagcactgtggcacaaggtggtaatgtttgccagaactcaagttctgactgctgagatgggtgattttcctctggcttgggctagtttaaatactccctccatg

SEQ ID NO: 941672 - DNA, 737 bp, Homo sapiens
gagaaccactgctctcttcaatgctgtcagacagggacatttaagtctgcagaggttactgctgtctttttgtttgtctgtgccctgcccccagaggtggagcctacagaggcaggcaggcctccttgagctgtggtgggctccacccagttcgagcttcccggctgctttgtttacctaatcaagcctgggcaatggcgggcgcccctcccccagccttgctgccgccttgcagtttgatctcagactgctgtgctaacaatcagcgtgactctgtgggcataggaccctccaagccatgtgtgggatatwatctcctggtgcaccgttttttaagcctgtcagaaaagcacagtattagggtgggagtgacccaattttccagttgctgtctgtcacccctttctttgaacaggaaagggaactccgtgaccccttgtgcttcctaggtgaggcaatgcctcactctgctttggctcacacatggtgcgctgcaccactgtcctgtgcctgctgtctggcactccctagtgagatgaaaccggtatctcagatggaaatgcagaaatcacccatcctctgcgtcactcacgccgggagctgtagaccggagctgttcctattcggccatcttggctcaactgggtgcaatttagttattttctagatacaatgggggtataggcattgggtaaatacaccctttcaaaatgggagaaattggccaaaatgaagga

SEQ ID NO: 941673 - DNA, 562 bp, Homo sapiens
tggcaaagaagttaaaaacttggaaaaaaaaattagatgaatggctaactagaataaccaatgcagagaagcccttaaacaacctgatggagctgaaaaccacggcacaagaactatgtgatgaatgcacaagcctcagtagccgatgcratcaactggaagaaagggtatcagcgatggaagacgaaatgaatgaaatgaatcgtgaagagaagtttatagaaaaaataataaaaagaaatgaacaaagcctccaagaaatatgggactatgtgaaaagaccaaatctacatctgattggtgtacctgaaagtgacagggagaatggaaccgagttggaaaacactctgcaggatattatccaggagaacttccccttttctagcaaggcaggccaacattcaaattcaggaaatacagagaacgccacaaagatactcctcgagaagagcaactccaagacacataattgtcagattcaccaaagttgaaacgaaggaaaaaatgttaagagcagccagagaaaaaggtcaggttacccacaaagggaagcccattagac

SEQ ID NO: 941674 - DNA, 500 bp, Homo sapiens
ttacattgtaatatatgattaaataattatataacacagcataatgtagaatcagcgggagtgtgagcttgttttcctgcaactagaggtcccatctggggacagatcatcgacattaggttctcataaggaacatgcaactagattcctcgcatatgcagttcacagtagagttcgcgctcctgtgagaatcggatgctgtggctgacctgacaggagccagagctccacgggaatgtgagagatgaggaatggtgtggattcaggtgaagcttcccttgctggcccaccactcacctgccatgcagcccrgttcctaacagatcgcagactggtaccagtccatggcctgggggttggggacccctgctctaactgtatactaggtcctggttaggaattgtacagactttctctcattccatcctcacaattaccctgtgaaggagacagtattaaccttaatttgcagagaaataaatgtgagcaaagagaggatg

SEQ ID NO: 941675 - DNA, 583 bp, Homo sapiens
aaatgggctgaactttgattatcttcatcactagggagaaagaaaatcaggattttattaatttttttcatttttatttattttttcttttattttaggatccagggtacatatgcaggtttgttacatgagtatattatgtgatgctgaggtttgtggtacaactgaacccatcactcaagtagtgagcgtagtaccccataagtagttttgcaactcttcccctcttcctacctcccctgtctagtagtctccagtgtttattgttcccatctttatggccstatgtactcaatgtttagctcccacttataagtgagaacatggggtatttggcttgcttttcctgtattagtttgcttaggataatgacctccagtgtcatccatgttgctgcaaagaacatgcacttgttattttttgtagtattccatggtagacatgtaccatattttctttatccaacccatcatgcatggccatctaggttgattccatgtctttgctattgtgaatagtgctgtaatgaatgtacaattgtatgtgtctttttggtagaatgatttattttcttttggaaaac

SEQ ID NO: 941676 - DNA, 575 bp, Homo sapiens
agtgggagtcagaacttttgtcattacccagtggtcctgggtagtacggctacccctctatttttccatgcagagtcagtggagtccgtgtggagagtagtaacaaggcactcctgcccctcccagccaggaaggtatcaatggaggccttgcggagagccagaaataccactcctgcccagcagtagtgaagagctcctcctactgtttgtcaaagaaggccaaggagggaacctagactattacctgcatctggcagtaagaaggcagtgcccccttctccttgcccaagtcatttcagaaaaggccagttaaaacaaaatttaaataaggtccagagtctcataacataataccaaaaacrcccaggttttaactaaaaatccttcatcatagtaacaaccaggaaaacttcagcttgaatgacaaaagaaaatgaatagatatcaacttcaaggtaatagtgatattagttatctttcaaagattctaaaggagccatgattgtaatgcttcagtgaacaattatgaacatacttgaagcaaataaaaaaaagaaagtcttagcaaagaaa

SEQ ID NO: 941677 - DNA, 592 bp, Homo sapiens
ctgccattcctacccacggcagctcctaaatctggctgcccattagaattgcctgggaaggctgttaaaatctaactcctgagacctgctgaattgtaatctgtcagaggacaaggttcaggaatctttattttaaggagcttcccgggagatttgttagcacccagcccaacatgcgttctctgcccctaatggagtggtttcagccagaggtaaagtcagctagagacatctggtctggaacaagtcaaatggaagctcaagccaaaaatgaaaagagcttttccaaactctgtgaattctccatgctttcccatcgccactctttatcccaggttgacagacaaggtgcagaatagtcagattaccctctatgctattcaactgttctcattcgacattccacacacccatccatccatccatccatccatccatccatscatccatccatgcatccatccattcattcaatcaaccaaacatctgttgagcttgggctgcatgtataagaccctgtgcaatagggtatgtaaagaggggacaccgtggatcctccttccatacagtaataagcccagccaagatcatg

SEQ ID NO: 941678 - DNA, 835 bp, Homo sapiens
cagctcccgcgagaggtggccttaggtcactcgcaaaaacaataaccaacgtgtcaatggcacttgtatttattttctaatttaaatttataacagatttcgcagatgggcttccactgaaataagcctttgagaaaaagaaaaacttttttttaacaagattaggaaataccaagaaatatgaagtaaagccatgccatctacccagctaaaaactttgaaaacttgaaattttatctaaggcaaatgtttgcataattttaagtcgtgccattatttaaagtcaatttcaattaacaatttcattgcaactaaatacatcttctataagaaaactaagatacatccctgataatctacctttcccctcctatattccgtccatcagcaaatcctactggtttttaccttccaaattttccttgaatctgtcctcttctacctcctccatcaccaccctagtctaggctaccttcacctggggagtgggggtggagggactactgacctagtctccttgtggtttacccatatcccctttatcgcctctctaatctcaacacaacaggcagagtggctttttcaaaatgtaatgtgaccctgtcacttcccagcccaaaccacttaaacaccttcccrttctcttagacaaaacctcctaactaaccaagccctgaatggccaggcgctttgcccacctctccatgtcttcttacaggtcagaccaattccatcctgctctctctgcttcagccaaactggcctcttttattccctatttactcagcttcctggactccacagagcttttgctcatgctttgctctgtgcctga

SEQ ID NO: 941679 - DNA, 716 bp, Homo sapiens
tatacctccaggctgttactgctcaggaaagacctgagaaggccctaagctcttacctctgactaacctttgggtcccaggaaagataaagcagaattggcaactgcctgcctgagtgtcaaaggcatgtcctgccacacacacacagcccctcagcaaaagctgggagacttattggttccaggcatttaagggaatctctgttcaatcataagctgaccattaaactaactgagcagaaactttattggccatgcataaataagaatatagactttactgaaaaagttactaaacaaactaagagtaacaacagtaaccaaccctgggggagggaggatctgattttcacagttgccacatttattattttaaatctccagtttctgactaaaaaaatatgagccatgaaaagatacaagaacatataactcatatacggggaraaaagcaatgaatagaaattgtctctgagggagcccagatgttggacttaatagacaaatacttgaaaccatctatttaaaatatgttcaaagaactataggacaccatgtctagataactaaagcaaagtatgagaacaatgtctcaccaaatagagaatatcaataaagatatagaaattataaaaatatacattttggagttgaaaaacataatagctgaaatgaaaaatttcacaacaggggctcaatagcagatttgttatggta

SEQ ID NO: 941680 - DNA, 609 bp, Homo sapiens
atggtatctcactgtggttttgatttgcatttctctgattagtgatgctgagcattttttcatgtttgttggccactggtatgtatgtcttcttttgagaagtgtctgttgtcctttgcccatttttaaaatggggttatttgttgtttgtttgttgaattgtttaagttccctgtagattctggatattaggcttttgtcagatgcagagtttatgaacatcttcttccattctgtagattgtctgtttactstgttgatagtttcttttgctgtgcagaacctctttagtttaactaggctgcagttgtctattttttgtttttgttgcaattgcttttgggaacttagccaaaaattctttgccaaggctatgtcaactagactatttctaggttgtcttccagaattttattttattttgaggtagaatttcactcttgtcacccaggctggagtgcagtggcgtgtgatcttggctcactgcaacctccacctcccgggttcaagcgattctcctgcctcagccttccgagtagccaggattaggtagcctgctaccacatctggctaattttttgtatttttagtagagatggggttgtgccc

SEQ ID NO: 941681 - DNA, 611 bp, Homo sapiens
ccaacagccagatacctgatatttttttactgacaagagccattttgtggcccaactgacctagctttagatgacatacatcctgggtagttcaggaagtctcaatatatgcctgccattttggagtaattataaatagtatttcctttcactctcagagctgtcctggttttgacgataaagtatatggttacctgatctatactacctctcataaaaatgcattttttctaacagaaattaaaaagaaacactgttatattttaatcatatgtcatgtaataatcccccactataaaagcccaggagcatttttattaatgagctgaattttgtgatttggatgggaaatgtgtttgctccgagatggcgtcacaaggtttgcatrtaccatcttagatgatgtgcaatgaagtgtgaggacgggctgaggtttatgaatttataataggtgccatgctgggaagggctgaaggcagagagttgtatctgactaaaaaaaccctacagaaacagctttcaaaaaagaaggtaccaactgacctgcgcttgacctgatccactgctaactgagaaaaagcagcaacttctagattcgactgagttcaaac

SEQ ID NO: 941682 - DNA, 557 bp, Homo sapiens
cctcatgaatgtcttggtgctgtcttctgacagtgagtgaactctcacgatacctggttgtttaaaagaatgtagcaccaggagttcgagaccagcctggccaacatggtgaaaccctgtctctactaaaaatacaaaaattacctgagcatggtggtgggcacctgtaatcccaactactcaggaggctgaggcagaagaattgcttgaaaccgaaaggcagaggttgcggtgagccaagatcgcaccactgcactccagcctgggcgaaagagaaaaactccgtctcaaaaaaaaaaaaaaaaaaaaagtgtagcacmtcccacctctcttgctgctcccgctctagctatgtgacatgctagttccttgtcaccttctgccatgtttgtaagcttcctgaggcctcaccagaaacagatgccagcaccatgcttcctgtaaagcctgcagagccatgagccaattaaaacaattttctttataaattacccagtctcaggtattccttatagtaatgcaaatgggctaataccccaagtttactaaaaagtatg

SEQ ID NO: 941683 - DNA, 612 bp, Homo sapiens
aactttgtgttgttattgtcattcattttacttatggagagccacctaatgttacctctagtggctaagcatgctttcctctgagatgtaaggaagccacaccagagctggtcttttctgctttgctcacttcttttttcttagtgcctggaatgtggcaggcacttagtaaataatgktaaatgttatgaagtatattagtccattttcacgctgttaaatgaatgaaatgtattagttcattttcatgctgctgaaaacgaaagacataccctagactgggcagtttacaaaagaaaggtttaatggacttaccattccacatggctagggaggcctcacaatcacagcagaaggcaaggaggagcaagtcatgtcttacatggatggcagcaagcaaagagagagagcttgtgcaggggaactaatctttttaaaaccatcagatctcatgagacttattcactatcacgacaacagcatgggaaagaagtgcccccatgattctgcccccatgattctgttacctcccactaggtccctcccacaacacgtgggaattcaagatgagatttgggtggagacacagccaaaccacatcatgaagtaaca

SEQ ID NO: 941684 - DNA, 612 bp, Homo sapiens
aactttgtgttgttattgtcattcattttacttatggagagccacctaatgttacctctagtggctaagcatgctttcctctgagatgtaaggaagccacaccagagctggtcttttctgctttgctcacttcttttttcttagtgcctggaatgtggcaggcacttagtaaataatgttaaatgttatgaagtatattagtccattttcacgctgttaaatgaatgaaatgtattagttcattttcatgctgctgaaaacgaaagacataccctagactgggcagtttacaaaagaaaggtttaatggacttacmattccacatggctagggaggcctcacaatcacagcagaaggcaaggaggagcaagtcatgtcttacatggatggcagcaagcaaagagagagagcttgtgcaggggaactaatctttttaaaaccatcagatctcatgagacttattcactatcacgacaacagcatgggaaagaagtgcccccatgattctgcccccatgattctgttacctcccactaggtccctcccacaacacgtgggaattcaagatgagatttgggtggagacacagccaaaccacatcatgaagtaaca

SEQ ID NO: 941685 - DNA, 602 bp, Homo sapiens
agtgaccagaagacaagagtgtgagccttctgtatgcccggataagggccgcttgagggctccttggtctagcggtagtgccagtgcctgggaaggcccccgttatttagcagactgggaaaaggagtctccctttccctggggggagtcagagaacactctgctccaccagctcttgtgggaggcctgacattagccaggcctkcccactgtcatccagaggcttgaacgtctccctgtgatgctgtgcttcagtggtcacgctccttgtccactttcatatcccacctgtacacctggctcctccttttaagttcttaaaagatagcagtaacagaattagtgaaagtattaaagtcttttatctctctgataagtgcatagaagaaatgctgacgtatgctgtcctccctctctgcttccgctaccacaaagggaaaggccccctgtcacgtggacatgtgacttgcttgaccttatcaatcatttgagatgactcacactccttaccctgcccccttgccttgtatacaataaatagcagtgcgtccaggcattcggggccactaccaggctccgcacattggtggtagttctcctct

SEQ ID NO: 941686 - DNA, 602 bp, Homo sapiens
agtgaccagaagacaagagtgtgagccttctgtatgcccggataagggccgcttgagggctccttggtctagcggtagtgccagtgcctgggaaggcccccgttatttagcagactgggaaaaggagtctccctttccctggggggagtcagagaacactctgctccaccagctcttgtgggaggcctgacattagccaggccttcccacwgtcatccagaggcttgaacgtctccctgtgatgctgtgcttcagtggtcacgctccttgtccactttcatatcccacctgtacacctggctcctccttttaagttcttaaaagatagcagtaacagaattagtgaaagtattaaagtcttttatctctctgataagtgcatagaagaaatgctgacgtatgctgtcctccctctctgcttccgctaccacaaagggaaaggccccctgtcacgtggacatgtgacttgcttgaccttatcaatcatttgagatgactcacactccttaccctgcccccttgccttgtatacaataaatagcagtgcgtccaggcattcggggccactaccaggctccgcacattggtggtagttctcctct

SEQ ID NO: 941687 - DNA, 638 bp, Homo sapiens
ataagaacatgagctatctctccatttattcatgctttatgttaataataattgacagttatagaaaaatatataaacaaaagacaagctaaataacatatttatttctaaatacgttataatttttttgtttttttgagacagagtctcactctgtcgcccaagctgaagtgcaatggcgtgatctctgctcactgcaagctccgcctgccgggttcacgccattctcctgcctcagcctcccgagtagcttggactacaggcacccgccaccacacctggctaattttttgcatttttcgtagagacgaggtttcaccgtgttagccaggatggtctcgatctcctgacctcatgatctgcctgcctcggcctcccaaagtgctgggattacaggcatgagccaccgcaccyggccaatatgttataatttttaatgtatgaatgaaatataaaactttttagcttccaactttttactactagctcaaagatattaattttgtaaattcacttttatctgcctatttaataaaattttcttatttaattctaatagtaggcttactttgatggtctggatatacaggcatgtcatctgaaatgaagacattgttgtctcttctgcctacagaacc

SEQ ID NO: 941688 - DNA, 638 bp, Homo sapiens
ggtctctattcaaacattgtacttttgtttcttgattacatcttcaattattttagttatttctgagattctcccctgcagtttctccagttatctagagaagagtgtggcaaggtacaaagagtgcctgaataacattatgaaggctgtgagacttcaaataaatgagtagcctctctgagcattaggtttgtcctctgtaaaccaggaataatttttactgaaccagggttgttctaaggrttagtgaaatgtatgtaaagcctttagcatttaataggtgatcaaatggtaagtgatgcttatagaatgtttttatcatggtaaaatatacaaaacataaaacttaccagccttttaatctaaattgtcttattgtgataggcttgcttatagtaaaacaaactctttttagtatctgtaggatctatagtgataactcttcactccttatattctaacttgtgcctaattagttaggcacaactctaattagttatctattgctgcataagaaattacctgaaacttaatgtcttcaaacaacaacaagtatttattatctgtgataggcagacttctaagatgtttcccatgatctcaatgtcctggtgttgtactctgtatgatctcttcct

SEQ ID NO: 941689 - DNA, 611 bp, Homo sapiens
ttaaaagttctctgataagtcattgccaccactacttccaaatagcatatgttaactttgagttaattttacataaacctgggttaatttacaaaattttggcaccaacaacatggttaggcaaggcagcatggatgggtattggaatcygtcaatctgggttgctgtataccagctctgggactgggggcaagttgtagcagccctgagcctcctgcttcacctgtatcaggggaggctgagacccaccttgcaggggtcttgtgatgttttattgcagtgctgtgggaatggtgggctacttcgtgcccggcctgtcaagaccaggcagcttacacaaaaacacttgatattgactatgaaacaagatccggaagagaacaaatataaatacagatggatcagctaaatgaaggactgtcgagtaaaaacacaaagaagatgtttgtgagtggagggggatggatctccttctccacccagcagtgaatatcatgggaatctctctctacctgaatctacctcttataattcttaaattaagaaccattagaactcttctaaactttctaagtactcattacagtatgaaaccctgcccgcctcccaga

SEQ ID NO: 941690 - DNA, 640 bp, Homo sapiens
actctactgcacctgagctggcacctaaccacaagacaaagtccttccttctttttcctcccattttcacaggcagaagattctcttcccatggccaccaccccacaggcccatggggaacactgccaggctaccactggyattcacttaaggcccaagggctctttagtcagcctgtggtaaattctgcctggtctaggattcaccctttggggcagtgggcttacctctggcccaatgcaggtccagaaatgccatctaagagccaaggcctggaatcagtgactgcaagagcccacttggtgttctttcccactgtggctgagctggtacctaacctacaagacaaaatcccctttactctttcctctgctattctcaagcagaagtctctcccatagccaccacatgtaggaatgttctgggtcacatctgaaaccagcacatttttggagtcttgccaaaggcccacggcaagtagtacctggctattgctggtgattatttagggttcaaggggtccttagtcaacagttgatgaatcttttgtggactgggtccttcccttcaaggcattgggtttccttttggccaaaggtgtgtctcaaaatgttatgcaggagctagggcatggaatggg

SEQ ID NO: 941691 - DNA, 592 bp, Homo sapiens
tctacttgtcttaggctgtttctggtttatagggtttttattattgactcaatatcaagactcattattggtcagttcagggttttaattcctggttaaatcttgggaggcttatgtgtacaggaatatatctatttcttttagattttctacttctgtgcatagaggtgttcataacagtctctctgtgttttttgtatatttgtggggtcagataatgttctctttttcatttctgattatgtttatttggatcatctctgttttattattagtctggctagcagtctatctactgcattgattctttcaaataacmagctcctggattcattgatattttgtatggctttaaacacctcaatttccttcagtttaggtatgattttggttatttcttgttttctgctagctttgatattggtttgctcttgtttatctagggcctctagttgtgatgttaggttgttaatttgagatctttctaaatttttgacgtgggcatttagtgctataaccttccttcttttttattttactttattttatttttttattattattatactttaagttctagggtacatgtgca

SEQ ID NO: 941692 - DNA, 552 bp, Homo sapiens
acagggttggcgaccttggcagtgacaatggcagagggcctttcgcttgttccttggggctctgccccaggcaaatgcagagctgctgtcagtcagaacgatcagcctaatgtggagtggctgtgttgcgggcccaagccagagttccctgcctggtgctgggcagaggaggtcagaggctcacagagaagtcattgtggcctcttcttcataggagagctgtggcatgctggaygtgtgagtgaagcactcaggatctttgttccttccccagtccgagggcagcaaggccggtagtactgtagtagcagtggcagaggctgaggggctgtcagtggccactgataaactccaccccagagaaacacagagccactaacaatgggaatgttcagccaagtgtggggaagctacgcgcagccccaagcccggggccctgcctggtgaagaggaggggtggggactcacaggtaagagaaattgggctcctctgtatggtggctgcagtgtcacggaggtatcagtgaagtgaccaggctcttttttccttct

SEQ ID NO: 941693 - DNA, 585 bp, Homo sapiens
aaaaagcgtagtttccttatctatgaaatagaagcaaaaggttgaccttatggagttactatgaaaatcaccaatgggttctttgtagaaaagagtagacattctaacacaaagtgactttattattaaaattatattttctattatagtgcttaagttgactccatcacttacgtatcatcaaagtattaaaactacttacgtagcaaactttaaatttgaaaaaaaaagtttccagcattttcatgtttgatgatttattacttggaaagtgtcatatgaaaagtataaatatcagtcagacattacagttttcttagcttccatgataatatgaggaccasaaaacaagttgaaaggattctttgagtttagtgagaatccaaaaacaatcctagaaggaaaaagagaagaggcaactgaagttgaaataaactgatgtactaggaaacaaagtacatcaagaaatagacttaacaaagaaatcaaacaatagactttcttgagacagtccacaagattttagagccagccaatgtgacgtaccacacagcccagacaaacagcccctgtcttgaatttgta

SEQ ID NO: 941694 - DNA, 447 bp, Homo sapiens
gccggccactcgggcagagagaagaccggggctgcccagggcctgccaatgaggggtggctttgcaccgaggccaccgggcttcagagctgtacctgggcagtttctactccaacttgtaagtggagagtcaccgtttacccaaatatacaagggcaagaggattttatagagatgggcaagaaagttttcagcttcaaaaccaaatcaggccgggcgcggtggctcacacctgtratcccagcactttgggaggccgaggcgggcggatcacttgaggtcaggggttggagaccagcctggccaacatggtgaaaccccgtctcttcaaaatatacaaaaattagccaggcatggtgactggtgcctgtaatcccagctacttgggaggctgaggcacgagaattgcttgaacccgggaagcggagggtgcagtgagccgagatca

SEQ ID NO: 941695 - DNA, 672 bp, Homo sapiens
aggctgtagggtatatttagtattcctagttaaaggtttgaactaatttgtatactagggcatgtttcttaatgggaagggggtgaaggttataataaaagtcacccctaatgcttgtttaaaattaaagaggaatttgtgggcctgggaccaaccttagacttatccaggccaaggtatgttgtttgacgaacaccgcaggtgatcctgatgtgcatccccgtctgagaactgttaactataaaagtttgactttggaaatgaagaaaaattaccttttagcctaatcatgaagactaggcgtcaaaccaaaacaagatgcatcagttactgtagcaacacattttttttaaaaaattgcttgttgtcacaatgaagggtgtgtrtctgtttccagtatgcaattctaatgccaaatgtctgccttaaaaatagcaaaggagaccatcaggttaacataaaggaaaactgtagttgtgtgactcatgtgtctgtagattgtaattttataattacaatttttataagataaaaaactaccagttgtaaattcaaccaaaaaaaatttaaagctttgatttagctttttgctttaacttgggtagtaactgaaatataaaggaagaaaatctattaaaaccaatgaggttttatatttttttaaatcttgat

SEQ ID NO: 941696 - DNA, 555 bp, Homo sapiens
aacaaaaaggagttaaaaagttgttttctcccatcagagctagagtgaaacccaggatttttcagttaccttacttaaattcaaagcctgatgtttcacatttggcactgactttttaagggttcacactaatcacaactgctttaaaaaaaaaaaaaaagtggattcagccgggtgcggccaagcactttgggaggctgaggcaggtggatcacgaggtcaggagttcaagaccagcctgaccaatatggtgaaaccccgtgtctaggctaaaaatasaaaaattagctgggcatggtggcacgcgcctatagtcccagctacttgggaggctgacgcagcagaaacacttgaacttaggaggcagaggttgcagtgagccaagatcacgccactgcactccagcctaggcgacagagcgagacactctctctcaaaaaaaaaaaaaaagtggattcttgtgaggccaaaaggacagggtgaagctatttccaggaatatacttttcaaaagggcttgttgcttcaaaagttttagagattctagagatgtttt

SEQ ID NO: 941697 - DNA, 555 bp, Homo sapiens
aacaaaaaggagttaaaaagttgttttctcccatcagagctagagtgaaacccaggatttttcagttaccttacttaaattcaaagcctgatgtttcacatttggcactgactttttaagggttcacactaatcacaactgctttaaaaaaaaaaaaaaagtggattcagccgggtgcggccaagcactttgggaggctgaggcaggtggatcacgaggtcaggagttcaagaccagcctgaccaatatggtgaaaccccgtgtctaggctaaaaatagaaaaattagctgggcatggtggcacgcgcctatagtcccagctacttgggaggctgacgcagcagaaacacttgaactyaggaggcagaggttgcagtgagccaagatcacgccactgcactccagcctaggcgacagagcgagacactctctctcaaaaaaaaaaaaaaagtggattcttgtgaggccaaaaggacagggtgaagctatttccaggaatatacttttcaaaagggcttgttgcttcaaaagttttagagattctagagatgtttt

SEQ ID NO: 941698 - DNA, 589 bp, Homo sapiens
gtaaaacatgttaatagattttcttttcaaatcactttggactgataaatattataggcaaattattaaaattaaatttacaaccttggttttacacccaattatagtagttcatattttacatatatggaataattcttatagtttgtaatgagactatacatttatccccatatatttacatattatgtgagcccatttcaaagatagtacttttaagagaggaaattatatgttgtgggataacattgtcaccttcaaaacatcattaacacttctgcaaaatatagttctatatagagagaaagcaagcatgcatcaatttttttttttwaaaaaaacagctaattatgttcctaaatatagtgaagaaaactcctagggttaccttagaggaagtaacttttctattttctttgcttccttttccttttttttttttttttttgacagagtctcattctgtcacccaggctggagttcagggacatgatctccactcactgcaacctccacctcccgggttcaagtgattctcatgcctcagccaccctagtagctgggattacgagagtgagccaccaccccg

SEQ ID NO: 941699 - DNA, 738 bp, Homo sapiens
ctcacgtatgtctttatcagaagtgtgaaaacagactaacacagtaaattggcactggtagagtggggtcctgctgtaaagatatcaaaaaatgtggaggcaactttggaactgggtggcaggcagaggttggaacagtttggagggctcagaaggacaggaaaaggtgggaatgtttggaacttcctagagactttttcattggctttgaccaaaatgctgataatgatacggacaatgaaatccagggtaaagtgatctcagatggagatgaggatactggagtaaaggtaacccttgctatgttttatcaaagagactggtggcattttgtccctgatgtagagatttgtggaaccttgaatttgagggagatgatttaggttatttggtgacataagtttctaagtagcaaaacattcaagatgtgacttcagtgccattaaaagcattcagttttaaaagtgagacagagcataaaaattcagaaaatttgcagcctgataatgcartagaaaagaaacacccattttctgaggagaaattcaagccagttgcagaaatttgcataagtaatgaggaaccaaatgttaatcaccaaggcatggggaaaatgtctccagggtgtgtcagagacatttgtggcagcccctcccatcataggccaggagccctaggagaaaaaagcggtttcatgggccaggtcctggacccccccttccgtgtgcagcctaggaa

SEQ ID NO: 941700 - DNA, 548 bp, Homo sapiens
tggaacagtttggagggctcagaagaaaacaggaagatgtgggaaagtttggaccttcctagagactttgtgaatgctttcaaccaaaatgctgatagtgatacggacaatgaagtccaggctgaggtggtctcagatggaggtgaggaacttattgggaactggagcaaaagtcactcttgctatgctttagcaaagagactggtggcattttgcccctgccctagatctgtggaacttggaacttgagaaagatgatttagggtatctggcaggagaaatttctaagcagcaaagtattcaagatgtgacctgtctttttctgaaagcatacagccataggcatatatgaagacattatgtgaaactggaacttatgtttaaaagggaagcaragaataaaactttaaagaatctgcagcctgaccatgtggtagaaaagaaaatcccattttctgggggaaaattcaagctgggtgcagaaatttgcataagtaacgaggaaccaactattaatagccaagacaatgggaaaaatgcctccaggg

SEQ ID NO: 941701 - DNA, 774 bp, Homo sapiens
caggctagtatcatttcactgagaactccactccattaatgccaccacagtttcattatctatcaactatccctcacttccctttttgtccagcttagattttatggtagaagtcataatcatgtccctacagacactctcacctcccttattcagttctgcgatgagcacactcatctgccacaactttagcactggttggacctatctaccttctttgtatttagatctgaacaaatgtgtatggctggagaaaaatcaataaggaggctgcctgtttcattaaataaattcatcatcatatttaggtgccttaaataggtactctgcactgcctgacagtgtttccctaataaacttaatcattctcaagagaactgttttatactttctcccctcccccttacatcttactcactctcactgatgacctcatttcttatttcattaacaaaataaaagtaatgagataggaactctttaaacttcccattgtcaggctctgtatggcagacacrcctgatagccgtaacttaagcatacactgagaatgatcctgtatggcagatgcacctgaatatgtgttcagagttacaagttaaggaaactgggagtggccaactcagaaattcatttcttatctatgaagaacatatgaacctccacctgtcccatggaacacgggctgtgcagggggttgaggccctttgttttgggttaaatgaaggctgtgaggtggaggttgctggaggaggatgctatgcaaaaatgcta

SEQ ID NO: 941702 - DNA, 566 bp, Homo sapiens
caaatcacttcaaataccttaataacctctaagttacagtacattaataaatattcatgataataatcctaagtcatcaaagtaagattaaatgtattcattttttgtgtttgagaaagcaragaaatgtataatacattttaaaagatcaccattcaagctggttaaaatgaaaatgtcttactccttaaattaaaaaagaaaaaaaaactagatttttcagatatctgaaaaaaaaatgtttttaaacgcagaacattgtgttccctgatgataggaggtatttattctgtatgagaaatactttcagaaaatgtggattcacatctttctgtcatttactttgggtgacatgtagagcctctttcttaccattaggtctgtgatgttccttctttctgactcactgattggcttaatttctcctcaaattggacaatactagatggaaaataaactgaccccaaagtggtggggaaaatcatttcatagcagtcagttgatttttagatcaaatgatccttctagaataagttctccgaaggtggcaaaattgttatagaaat

SEQ ID NO: 941703 - DNA, 566 bp, Homo sapiens
caaatcacttcaaataccttaataacctctaagttacagtacattaataaatattcatgataataatcctaagtcatcaaagtaagattaaatgtattcattttttgtgtttgagaaagcaaagaaatgtataatacattttaaaagatcaccattcaagctggttaaaatgaaaatgtcttactccttaaattaaaaaagaaaaaaaaactagatttttcagatatctgaaaaaaaaatgtttttaaacgcagaacattgtgttccctgatgataggaggtatttattctgtatgagaaatactttcagaaaatgtggattcacatctttctgtcatttactttgggtgacatgtagagcctctttcttaccattaggtctgtgatgttccttctttctgactcactgattggcttaatttctyctcaaattggacaatactagatggaaaataaactgaccccaaagtggtggggaaaatcatttcatagcagtcagttgatttttagatcaaatgatccttctagaataagttctccgaaggtggcaaaattgttatagaaat

SEQ ID NO: 941704 - DNA, 590 bp, Homo sapiens
cttgagacaaacagcaaggaaaacacaacataccaagcctatggaatgcagcaaaggcaattctaagacagaagtttgtagcaataaattcctacattaaaaaagaagaaagctccaaaataaatagtctaacataatgcctcaaggaactaaaaaataaagaaaaagctaaagccaaaattagcagaagaaaggaaaaaaaatcaaaatctgagcaaaaataaatcaaatagagaaaggaaaaactataaaaagaatcaataaaatgagtttcatttttgaaaaaataagattgacaaacccttaactagtctaaraaaataagagagatgactaagataagtaaaataaaaaatgaaagtagagaaattacaacaggtgtatcagaaataaaaaggatcatagggactattatgaacaattatctacaagcaatttgggtagcctggaagtagataaattcttagaaaaatacaacctaccaaaattgagtcagaaagaattagaaagcctgaacagaccaaaaacaaataaagaaattgaagaagtaatcaaaacctcccaacaaagaaaagcctaggataaggtgg

SEQ ID NO: 941705 - DNA, 642 bp, Homo sapiens
tgaagtattttaattatcattgtggctaaatgagtattatattcaaacacttgatcaaaaatgtgatcctatttttgatcaagtgtttgaatctttttgacaaacttcccaaaatgaaattctaagtctccttgtcttagtccctttagagctgctataaaggaatacctaaggctggataatttatgaagaaaagaggtttacttgactcacagttttsctggctggaagactgggcatctgacaaaagcctcaggaagcttccacttatggcagaaagcaaaagggagtcacagtacagagatcacatggccacagagggagcaagagaggagtggggaggtgacaggctcttttaaacaaccagctctcacaggaactaatagaatggaaactcactcatcgcaaagaagacaccaagccattcacgagggatccatccccatgacccaaacacctcccattaagccccacctccagcattggggatcaaatttcaacatgagatttgggggacaaacatccaaaccacagccacctggaagtccaaaagagagatattaaaccaattaggtttatttgatatgttaaattatataggaaatattgtcaataagagataacgtttaaccgtcttttcct

SEQ ID NO: 941706 - DNA, 604 bp, Homo sapiens
gcattaaacatatactttatgtaagaagaaatgtaaaatcgatgacctcaacttccaccttaaaattaggaaaagaagaccaaattaagtataaaataaagaaaagaaaagaaataataaagatcagattgaacataaataaaatacaaaacaaaaataatgatgaataaaaattcttgttcttggagaaaatcaacaaaattgataaacctgcagctagattaatcaagaaaaaaaagagaaaaataaattctcaatatcaagaatgagaaagatgacattaccatggatttarcagatataaaaagaaaagcaagtaaaattatgagcagctttatgtcagtaccttctacagattatatgaaatagaaaatgtttaaaaaatatttgaactatcaaagtttatttaagaagaaatagtctgacatccctttaccaaagaattatattttgtactaagaagccttccgcaaacaaactccatgccaaatgtcttcagtggtgaattctaccagccaattaaggaagatataataccaattctacacaagatataccagaatattaaagaggaaagaattatttcccagttcattctatgatg

SEQ ID NO: 941707 - DNA, 604 bp, Homo sapiens
gcattaaacatatactttatgtaagaagaaatgtaaaatcgatgacctcaacttccaccttaaaattaggaaaagaagaccaaattaagtataaaataaagaaaagaaaagaaataataaagatcagattgaacataaataaaatacaaaacaaaaataatgatgaataaaaattcttgttcttggagaaaatcaacaaaattgataaacctgcagctagattaatcaagaaaaaaaagagaaaaataaattctcaatatcaagaatgagaaagatgacattaccatggatttagcagatataaaaagaaaagcaagtaaaattatgagcagctttatrtcagtaccttctacagattatatgaaatagaaaatgtttaaaaaatatttgaactatcaaagtttatttaagaagaaatagtctgacatccctttaccaaagaattatattttgtactaagaagccttccgcaaacaaactccatgccaaatgtcttcagtggtgaattctaccagccaattaaggaagatataataccaattctacacaagatataccagaatattaaagaggaaagaattatttcccagttcattctatgatg

SEQ ID NO: 941708 - DNA, 805 bp, Homo sapiens
tttttcagttctagaatttctatttgggctttaaaaaaataatctcttttcttctgctgaaatttcccactttttattagctgtgagcatattttcctttttactactgagcatcattttaatatacagttttaaataattgttggccaacatctgggtcatcctagcttgttttctattaatctttctcctatgaattggtcatgttttcctgcttctttgaatgttgtataattttttttttgagatggagtctcgctgtgttgcccaggctggagtgcaataatgcaatctcagctcactgcaacctccgcctcccaggttcaaatgattctcccgcctcagcctcctgaatagctgggattacaggaacccaccatcatgcccagctaatttttgtatttttgtagagatgaggtttcactgtgttgggcaggttggtcttgaagtcctgacctcaggtgatctgcctgccttagccctctaaagtgctgggattacaggtgtgaggcactgcatccggcctgaatgttgcataattttggattgcatcctcaatattgtgaatgatgtgttgtaraaattccggaatctgaatgttcctctgaatagtactgattttaagcatatatttaacttttatagaatgaaactgtaacactgtatttccactgtgatgagtgtagctgaaattttacttcaattcctttaactttaactaatttgctttgagtctttccccaatagtcatgttcaaggatcactcagagatttgggaaaattttgtacctagaatatgagaccc

SEQ ID NO: 941709 - DNA, 538 bp, Homo sapiens
gctttgcctaataagtcatatatctggtctttctcaagaatgattactgtcactttttaaagtccatacttcattgtttgagtgtctcataattttgtgttgaaaggtggacattttgcacattataatacagtaactcaggaaattcagttctccacatccccatggtttgttgttgytgcttgtagtgggttgttgttatctgtctgtttagtgacttttctaaaacatttttctacagtctgtattctttgttatgtgtggtcactgaagtcggtgttccattagcttagtggtcagctagtgttatgacaatgatttccttaaacaactagagccaaaaatagaagctgaagaaagaaaaagaaaaattattcccctagtgttttcagattggctctgtgttgggacatgccttcaacgcatagcaaagccatttacaactctgctttggtcttcacttcctgcttgcatggaacttgaaagtcagccagaggtgaaagcctggggtcttctcaggacttttctgaacatgtct

SEQ ID NO: 941710 - DNA, 662 bp, Homo sapiens
actggaaaatacctcactttctagaatggaagaaagaaagggagggagacagagagaggaaagaaagtgggggaagctagggagagagggagggaagggaaaaagaaggaagagagggaagaagtgatcggtgaacaaactaagggaggagaaagggggagaaatctgtgctttccaaacctctctgcagccttmatacaaatatatcaggcttttgttgtgaataagttaatgcttatttagctttcaaaatacagctcagtggagtatacctaggagccctttgcagcctttgaatctggaagggaggaaagacatgtacgtcagcaacttctgtttaagaaagcaaatgaaacatccagagaaaaattgttagagaggactgacaatgtttttattttacatttgaaatactttctatttcattgattttgtgaactgttgaaatttatgaaaggcatttagcccagtgcctagtacttagcaagtgctcagtaaatgttgactataatttttcctaaagcggacttttggttcaggcaccagaaagtgtgtattctagacctctgaataaccatgtgaccttaagtaagtctctctgcctctctgggtttgttttctaatttgtgaggctgaactgaactagagggtgaataagagct

SEQ ID NO: 941711 - DNA, 668 bp, Homo sapiens
caagggttcagaaccagactgaggctaaggtgactgaaatgacagaaatagaattcagaatatggataagaacaaagctcacgaagctacaggagtaggttgaaacccaacgtaaggaaggtaaaaatcatgataatatattgcaggaactgacagacaaaataaccagtttasagaagaacataactgaccttatagagctgaaaaaacactacaagaatttcataatgcaatcacaagtattaatagcagaagacaaaaggtggaaagaatctcaaagtctaaagactgcctttctgaaataagacaggcagacaaaaacagagaaaaatgaataaaaagaaatgaacaaaaccatcaagaaatatgggattatgtaaagagaccaaacctatgactgacttgtgtacctgaaagagatgcagagaatggaaccaacttggtaaatatattccaggatatcatccatgagaacttccccaacctagctagagaggttaacattcaaattcaggaaatgtagagaaccccagtcagatagttcacaagaagatcatccccaatacacataatcatcagattctccaaggttaaaatgaaagaaaaaatgttaaaggtagctagaggaacagaccaggtcaccaacaagggaagctcatcaaactaac

SEQ ID NO: 941712 - DNA, 619 bp, Homo sapiens
cctcattgataatcctgagatcttgcactaacctccactgtctgttgggtttctgtactcgtaaagttggagtactgcaggggctactgcatgcttttactaggccttgggcttttaggtccttaacaatcttttggagtccttggtgggcctccrgtctaagggggtactgcctttggtagggaaaggaggcagaatcctttagtttaacttgaacaagatgggcattctttgctcatccgtattgtccttctgttgcccagacttcaggattaattccttcctccagcaggggacaacaaatgggtgttccttctcctatgttcaggtgtataatggcccctgcttttgctagaatgtctctccctaacaagggagtggggctttcaggtacaattagaaaagcatgtgaaaacagtaaagttccccagtcacaacttagtggctgggagaagtatctagtgactggctgtcctgggatagtgacagatatggaggccagttgtccgggacaggagagtaagactgagaaggccacaccagtgtccaggagacagttagcctcctggccctcaatggtcaagcatacccagggctctgtgagggtgatggcatgggc

SEQ ID NO: 941713 - DNA, 628 bp, Homo sapiens
atttgcttcttgtggctgtcatgacaaattaccacaagcttggtgacttaaaacaacagaaatttggctgggtgcggtggctcatacctgtaatcccagcactttcggaggctgaggccagtggatcacctgaggttgggagttcaagaccagcctgaccaacakggagaaaccccgtctctattcaaaatacaaaattagctgggcagggtggtgcatgcctgtaatcccagctactcaggaggctgaggcaggagaatcgcttgaacctgggaggcggaggttgtggttagccgagatcatgccattgtactccagcctgggtaacaagagcgaaactctgtctcaaaaacaacaacaacaaacacacaaacaaacaaacaaatcaacaacagaaatgtattatttcacagatctgaaggtaagaagtcaggaattggcagggcagtgctcgttctcaaggcactggaggagaatccttcctttcctcctccagcttctggaagctccaggcattccttgacttatggctataccattccaatctctgcctccatcttcacatgctgctatggtttgaatgtttgtcctctaaaaacttcatgttgaaacttcattgccattatca

SEQ ID NO: 941714 - DNA, 578 bp, Homo sapiens
catggtgaaaccctgtctctactaaaaatacaaaaattagccgggcgtgatggcgggcgcctgtaatcccagctacttaggaggctgaggcaggagaatcgcttgaacccaggaggtggaggttgcagtgagccgagatcataccattgcactccagcctgggtgacagagcgagactccatctaaaaaataaataaataaataaaaatgaaatatgcatattcacaaagacacgcaccacagggacacccactgcagtactgttgctaacaggcagtagttgggacaacttatatgtctagagcaaaagatcaagaaggattcaaatcaaattgttcagagtggtgaccctgaaggactaacagtgggagagagaaagaatagaagaggtgtggggagaattttcactttttagttgcataatcccttctgggttgtttatyttatgtctacatgcatttttaattttagaaattaaaaatattatattatttaaaattaaaaagttttttaacaacctgttctgtttggaggactgtttggaagaatcatcaagtctcagagttgaaattggtctc

SEQ ID NO: 941715 - DNA, 609 bp, Homo sapiens
acacacacagtgcttttgggcacattacaaaaaggcatctcttctaaacagatcaatttttttaaaagaaactctgcataccacagcctaatccaagccacagtgcttggccataggagcatggcaaaatttcagcccacatttacctccttgtctggaagtcctggtggaggactcccatgaagttacatgcagtccatgtaactctatgtgactgacggattsgccctggtctgttccttggaatctcaaataacaggtctaaattgcttttccaccacaagactctccaattattattattattattagtagtagtagtagtagtagtattagtattattagtattatttttagagtctcactcttgcccagcctggagtgcagtggctgatcatacctctctgaagtcttgtgtgttgaggctcaagcaatcctcctgcctcgaccttcccagtagctaggaccacaggcatgtcccactgtacttggttaattttttttttttaagagaaggggttttgccatgttgctcaggctggtctttaactcctgtcctcaagtgaccctcccacctcagcctcccaaagtgttgggattacaggcatg

SEQ ID NO: 941716 - DNA, 609 bp, Homo sapiens
acacacacagtgcttttgggcacattacaaaaaggcatctcttctaaacagatcaatttttttaaaagaaactctgcataccacagcctaatccaagccacagtgcttggccataggagcatggcaaaatttcagcccacatttacctccttgtctggaagtcctggtggaggactcccatgaagttacatgcagtccatgtaactctatgtgactgacggattggccctggtctgttccttggaatctcaaataacaggtctaaattgcttttccaccacaagactctccaattattattattattattaktagtagtagtagtagtagtattagtattattagtattatttttagagtctcactcttgcccagcctggagtgcagtggctgatcatacctctctgaagtcttgtgtgttgaggctcaagcaatcctcctgcctcgaccttcccagtagctaggaccacaggcatgtcccactgtacttggttaattttttttttttaagagaaggggttttgccatgttgctcaggctggtctttaactcctgtcctcaagtgaccctcccacctcagcctcccaaagtgttgggattacaggcatg

SEQ ID NO: 941717 - DNA, 567 bp, Homo sapiens
tgagtgccggcagtatgcttagcaggggaatgaggacccatttgagacatatggtcataaatttaaagggataccagtcagcatgattatgtgattttcccaatgtttagtttctcaggcacaagacaaagataggacaacgctggttggttgaggtggctcacrcctgtaatcccagcactttgggaggccgaggtgggtggatcacctgaggtcagaagtttgagaccagcctggccaacatggtgaaaccccatctctactaaaaatacaaaaattagctgggcgtggtggtgggcacctgtaatctcagctacttgggaggctgaggcaggagaatcgcttgaacctgggaggtggaggttgcagcgagccaagatcacgccattgcactccagcctggtgacaagagcgaaactccatctcaaaaaaaaaaaaaaaaaaaaaaaagatagaacaaggccaatatatggattcagttaaagttggaagttttgttgagaaagcggattcattgcaagggagtgtcatagtgaaggtacatggaatttgtactagttaaaagaa

SEQ ID NO: 941718 - DNA, 562 bp, Homo sapiens
gaagaaaccccatctctaataaaaatacaaaattagccgggagtggttgcgtatgcctgtaatcccagctactcgggaggcagaggcaggagaatcgcttgaacccaggaggcagaggtagtggtgagccgagactgtgccattgcaatccagcctgggcaacaatagcaaaactcagtctcaaaaaataaaaagtaaaacaaaacaaaacaaaacaaaaaacagctctcataaaacatgaggggatgtcattagaagaggggagatttaacatattattggagaatcccataaatgayttgaagccagtaagtcagaaaccttggaccaaacaaattcttagaaaaatatgatagaaagctgaagaagaaatagcaagcttaaatagcctaataaccatagaaataaaattagtgttaaaaattatcacaaaaaattaccatcccaaatgactttgtcagtaaattctatgtaactttgaaggaaaggattcccattattctgcattttccagaatatggtaaaaaatagaaataccctaatatcatgagaccagcagaag

SEQ ID NO: 941719 - DNA, 698 bp, Homo sapiens
ccaaaccaataaacatttctaaaacccaaaaataactttcgaaacacctgagcctctccctactcagtgtttcttgagtgaacaaatcttttacgaccaagagaaacaaactatggtagtgctttgaatcaatttcatgccaattcatcttttaggaagtgctggagaaaccaatataagtaagcagttcaagggcagagaacataatggccccaccatcatcaaacctcaacaaggggctgggcgcagtggctcacgcctgtaatcccagcactttgggaggccgagacrggtggctcacctgaggtcacgagtttgagaccagcctggccaacatggtgaaaccccgtctctactaaatatacaaaaattagctggacatggtggtgcatgcctgtgatcccagctactcgggaagctgaggcaggagaattgcttgaacctgggaggcggaggttgcagtgagccgagactgcgccattgcactccaacctgggcaacaagagcgaaactccatttaaaaaaaaaaaacaaacctctgcggaggagccaagatggccgaataggaacagctccggtctacagctcccagcgtgagcgacgcagaagacggtgatttctgcatttccatctgaggtaccgggttcatctcactagggagtgccagacagtgggcgcaggccagtgtgtgtgcgcac

SEQ ID NO: 941720 - DNA, 698 bp, Homo sapiens
ccaaaccaataaacatttctaaaacccaaaaataactttcgaaacacctgagcctctccctactcagtgtttcttgagtgaacaaatcttttacgaccaagagaaacaaactatggtagtgctttgaatcaatttcatgccaattcatcttttaggaagtgctggagaaaccaatataagtaagcagttcaagggcagagaacataatggccccaccatcatcaaacctcaacaaggggctgggcgcagtggctcacgcctgtaatcccagcactttgggaggccgagacaggtggctcacctgaggtcacgagtttgagaccagcctggccaacatggtgaaaccccgtctcyactaaatatacaaaaattagctggacatggtggtgcatgcctgtgatcccagctactcgggaagctgaggcaggagaattgcttgaacctgggaggcggaggttgcagtgagccgagactgcgccattgcactccaacctgggcaacaagagcgaaactccatttaaaaaaaaaaaacaaacctctgcggaggagccaagatggccgaataggaacagctccggtctacagctcccagcgtgagcgacgcagaagacggtgatttctgcatttccatctgaggtaccgggttcatctcactagggagtgccagacagtgggcgcaggccagtgtgtgtgcgcac

SEQ ID NO: 941721 - DNA, 698 bp, Homo sapiens
ccaaaccaataaacatttctaaaacccaaaaataactttcgaaacacctgagcctctccctactcagtgtttcttgagtgaacaaatcttttacgaccaagagaaacaaactatggtagtgctttgaatcaatttcatgccaattcatcttttaggaagtgctggagaaaccaatataagtaagcagttcaagggcagagaacataatggccccaccatcatcaaacctcaacaaggggctgggcgcagtggctcacgcctgtaatcccagcactttgggaggccgagacaggtggctcacctgaggtcacgagtttgagaccagcctggccaacatggtgaaaccccgtctctactaaatatacaaaaattagctggacrtggtggtgcatgcctgtgatcccagctactcgggaagctgaggcaggagaattgcttgaacctgggaggcggaggttgcagtgagccgagactgcgccattgcactccaacctgggcaacaagagcgaaactccatttaaaaaaaaaaaacaaacctctgcggaggagccaagatggccgaataggaacagctccggtctacagctcccagcgtgagcgacgcagaagacggtgatttctgcatttccatctgaggtaccgggttcatctcactagggagtgccagacagtgggcgcaggccagtgtgtgtgcgcac

SEQ ID NO: 941722 - DNA, 698 bp, Homo sapiens
ccaaaccaataaacatttctaaaacccaaaaataactttcgaaacacctgagcctctccctactcagtgtttcttgagtgaacaaatcttttacgaccaagagaaacaaactatggtagtgctttgaatcaatttcatgccaattcatcttttaggaagtgctggagaaaccaatataagtaagcagttcaagggcagagaacataatggccccaccatcatcaaacctcaacaaggggctgggcgcagtggctcacgcctgtaatcccagcactttgggaggccgagacaggtggctcacctgaggtcacgagtttgagaccagcctggccaacatggtgaaaccccgtctctactaaatatacaaaaattagctggacatggtggygcatgcctgtgatcccagctactcgggaagctgaggcaggagaattgcttgaacctgggaggcggaggttgcagtgagccgagactgcgccattgcactccaacctgggcaacaagagcgaaactccatttaaaaaaaaaaaacaaacctctgcggaggagccaagatggccgaataggaacagctccggtctacagctcccagcgtgagcgacgcagaagacggtgatttctgcatttccatctgaggtaccgggttcatctcactagggagtgccagacagtgggcgcaggccagtgtgtgtgcgcac

SEQ ID NO: 941723 - DNA, 796 bp, Homo sapiens
gtaaagggggggcagctgaacactgtgtgtttcataatgtgatatactccctctgaagtactgccaaacaaacttgaatctgatcaacactcagtagcagtgtagaggaaatccaagggacagaggaacaaaccaaacaataccatgaggaagcaatcaaccaaatcaaaaatgtagaacctccttcaggtcacataacccgatatctctaccaaatcaaaggtattaaaaagaggtggtagatattaaaaagaggtggtagataagggagtttttaaagaataaaaaagacttaggagataaaacgaccaaatacaatgtgtggaccttgcttggatcctgatttgaacaaaccaactgcaagaaggctataacaaatcaggaaactgacgatggactggctattactatttatttttaaatttttaaggtatgataatggcatggagatmtaccttaacagttggagatccacactgaattatttagggtgaattacataatgtctagtgtagtgggctgaataatgactcctaaagatgcctgtgttctaatccctggaacctgtgaatgtgttactttgcatggcaaaaggaacctggtggacatgattaaattaaggatcttcagatagatcggcctgggttatccaggtgcacccaatctaatcacataagtgatagagaagagaggccataacacaaaggatgcaggatgcgggctgtgggctgcgggatgcgggatgtgggctgcctcctgcagatggaaaaagcaaggaaacagattttcccccgga

SEQ ID NO: 941724 - DNA, 640 bp, Homo sapiens
gtattgggtaaatacctagaagtgggattactgactcatggtaagtgaatatttatttttataaaaaactaccaaaatgttttccaatgtagatgtaccatatggcactcccaccagaaatatgagatttctagtttctccatatcttcactagcttttggtatgatccagcatttggtgtattgcttatttattttgctttaattttagccattccagtaggtgcatagtgatatctcattgtggctttacctgcatttccctgatgaccaatgatattaagcattttccatgtgttcatttgccatctgtattttttctttgttgaagtgtttattcacatcttttgccccttaaaaacatggttgtttgtctctttacaatataagtgttatgtcttttagatacagatctattatcagaaatgtgcttttcaaaactttcaagtctggagcttgttctttcctaaagtkcccttggaaaagctgatatttttaattttgaataagtcaaagttatcaatttttattcttttatggcttatactgtatgtcttatgtaagaaaccttcatctaacccaagctcacaaaggctttctttctcctatgttttcttttagatatttaagttttgaatttt

SEQ ID NO: 941725 - DNA, 734 bp, Homo sapiens
gtatgtacctctgctatggtattagtcacactgttataattatttgtcacttgttggccgggcgcagtggctcacgcctgtaatcccagcactttgggaggctgaggcgggcggatcacgaggtcaggagatcgagaccatcctggctaacacggtgaaaccccatctctactaaaaatacaaaaagttagccgggcgtggtggcgggcgcctgtagtcccagctactcgggaggctgaggcaggagaatggtgtgaacccaggaggcggagcttgcagtgagccgagattgcgccactgtactccagcctgggtgacggagcgagcctccgtctcaaaaaaaaaaaaaaaaatgtcatttgtctgtcttagactgtgagttctttgggggtctaagaccagtgttggtcacacttttatcctcagggcctygcatagtgcttggcacatgccagatccttaataaacatttgtatgttgagtggatgagacaaaaacccatgcaagacaaggaatggtgatcttccacgcaggaaattctctttacaagcctgcttcactatctgagcccaacgttcctaagcaagattttccttcctggaggtgaggtggctgagactgtgttacagagcccagtgccatacacatattagctgatcaagaaatgttggatggaacaccaccaacagaatttactgaaggttctgccctggggaggagtgaattctgagggt

SEQ ID NO: 941726 - DNA, 578 bp, Homo sapiens
ccgcagagcgctgttaaagagattttacctgcttcataacccatccagttgtgtaaagcagagggtgtgagggcagccactgcaggggtgagtgcgtgggtcattctatgggtctcttcagaaagagagctgctgttatatcagacctacaagaagcaaggcatgtgtttcccaatgcaccaccctgtcattttacccccagagcctatttggcatcagccaccataagtaaggcaaatctgttgaaggcaagagacttgtcaggccaagttcccaccacggcttttagctcactgtagcctgaactggacatactgttgtgattgcamttcattctccttacttaaccaggatatcaagagcgatataaaggacatttactgaagtatcaaaatagtatgagatcagaaagaatctaaatatctaataacaaaagactgattaaactacagtacatctatatcatgggataccacacatccagttaaaaaaaaaaaaaaaagacatgggccgggcgtggtggctcacgcctataatcccagcactttgggaggttgaggcgggcggatcacttgagg

SEQ ID NO: 941727 - DNA, 722 bp, Homo sapiens
ctgggagaaccattgctctcctcaaagctgtcagacagggacatttaagtctgcagaggttactgctgtctttttgtttgtctgtgccctgcccccagaggtggagcctacagaggcaggcaggcctccttgagctgtggtgggctccacccagttcaagcttcctggctgctgtgtttacctaagcaagcctgggcaatggcgggcgcccctcctccarccttgctgccgccttgcagtttgatctcagactgctgtgctagcaatcagtgagactccgtgggcgtaggaccctccgagccaggtgcggaatatattctcctggtgcgccatttcctaagctcgttggaaaagcgcagtattcgggtgggagtggcccgattttccaggtgccgtttgtcacccctttccttgaccaggaaagggacctccctgatcccttgagcttcccgagtgaggcaatgcctctcctgcttcggctggcgcacggtgtgcggcacccactgtcctgcacccactgtctggcactccctagtgagatgaacccggtacgtcacatggaaatgcagaaatcacccgtcttctgcgtcactcacgctgggagctgtagaccggagctgttcctattcggccatcttggctcctcccgctctggctgaattctttagtacatccctttaattcactactttttctctttgactttgattagctccatatat

SEQ ID NO: 941728 - DNA, 722 bp, Homo sapiens
ctgggagaaccattgctctcctcaaagctgtcagacagggacatttaagtctgcagaggttactgctgtctttttgtttgtctgtgccctgcccccagaggtggagcctacagaggcaggcaggcctccttgagctgtggtgggctccacccagttcaagcttcctggctgctgtgtttacctaagcaagcctgggcaatggcgggcgcccctcctccagccttgckgccgccttgcagtttgatctcagactgctgtgctagcaatcagtgagactccgtgggcgtaggaccctccgagccaggtgcggaatatattctcctggtgcgccatttcctaagctcgttggaaaagcgcagtattcgggtgggagtggcccgattttccaggtgccgtttgtcacccctttccttgaccaggaaagggacctccctgatcccttgagcttcccgagtgaggcaatgcctctcctgcttcggctggcgcacggtgtgcggcacccactgtcctgcacccactgtctggcactccctagtgagatgaacccggtacgtcacatggaaatgcagaaatcacccgtcttctgcgtcactcacgctgggagctgtagaccggagctgttcctattcggccatcttggctcctcccgctctggctgaattctttagtacatccctttaattcactactttttctctttgactttgattagctccatatat

SEQ ID NO: 941729 - DNA, 629 bp, Homo sapiens
tttaacttgctttctgtatttctggcatttggcattttggggtcatttcctcctcctaaaacctctacccctggcttctactgctctctactaggtcttctctctctctgaatgctccttcttcacctccttcatgaactttctttctataagtctagacaatcccctaaggttctctcctcagattgcttttttttggtctgtataagatctcatctacttccatgatttcaattactatcaatacactgatgactcccagatattcctctccagctcagagctctaccctgagccccasacccgtatacaactatttactgaacattttcacctgcatgttcttccaatacttccctttcaacatattcaaactgaactcactatttaccactccaagctagctccaatcttatatttttatctttttaattttcatcaatttatgtataattgttagcgtcattatgaacttttgttttttagagatgaggtctcgttctgttaccaaggctggagcatagtggctgttcacaggcacaatcatagcgtactacggccttgaacccctgggctcaagcaatcctcctgcctcagcctcccaagtagctgggactacaggaacacag

SEQ ID NO: 941730 - DNA, 620 bp, Homo sapiens
ttccttatttctcataatacagtatttcatagtatgaatagatcacaatttgttatttatttcactcttgatagacatttaggttgtttccatttggagttattattcagtactgctatgaatattcttaaacatgtatactggtgcacataaacatatgttttatgagggtatataacttggaggtgaattkctgtgtcataaattatgcatatcttgtattttatttgataatgtcaatctgtttgctatagtaattgtgccaatttacacttccatcaacaacatttgagttcttgatgttctacaaccttgaaagcttggtttgatactctagtgaggtatagtggtgtatcagtatggctttagtgtacatttccctgctaacaaatgaggttgagaattaatgctcatttcatattcattatctgtcaaatcttctgcctgttttttttgttgtgttgtctgtttttgttttcttttgactggtaggttcgtaggaattctttatgtatcttagatatgaaccctgaaccccttgttgattacacacattgaaaaatggtgttccactttgaggtttgctttttctctcctttagtgatgcactttaatgaaca

SEQ ID NO: 941731 - DNA, 637 bp, Homo sapiens
tgatagtgaataattctcatgagacctgatggttttataaatgggagttcccctgcacaagctctgtcttgcctgccaccatgtaagacgtgactttgctcctcatttgcctttagctgtgattgtgaggcctccccagccatgtggaactgtgagtcaattaaacctctttcatttctaaattacccagtctcagttctgtctttattagcagtgtgagaacagactaatacaacctcaataaagttgatatcaaaaattaaataaatgtaaacagactatatactccaataaaacatcaaagattttcaggttaaaaattaaaaattcattatattrtttcgggatctttggggtgtcacatttctggctggaaacctgtggccagtggcaccattgcccaagttttgtttgggcctgctgggcttgttacacccacttgatctggcaggctaccctcagctcacactgccagcctggatcacatacgtccaagaaagactggagtcagatgtggaggagcatggggtgtgtgagggagtgtggtgaccacccaccgcacagtggggcatgctgactgctgccacggggtgggcagctcccatatgctggcaggggtgccagctctctgcagggc

SEQ ID NO: 941732 - DNA, 594 bp, Homo sapiens
gcctcccaaagtgctgggattagaggcgtgagccactgtgactggcctcctggctaattttaaactgagtacatttttatgactctcttctatcttgaccattggcttattacctatatttctttgttttacatttagtgattactttaaggtatacaatatatatctttaagttatcaaagtctccttgacattatattatactayttcatgattagtgtataaactttacaacaacatacttctattttctctctcttattctttgggctattattatcatgcattttacttctatatattttataaaccccatttaatgctgctatgatttttaatttaaattatgttatctttttataaaattaaaagtaataacttatctacgtatttgaatttacatgtacattacatttttgaagatactttttcttttatggagattcaagtttttatctgaaattatttttcttttatctgatgaaattcctttctatatctgataagataggttggctgctaatgaattatttcagcttttactaaaaatgtttttattgtatccattttctgaaaggtattttatttgggtat

SEQ ID NO: 941733 - DNA, 735 bp, Homo sapiens
aaatgtggtatgttcatacaatggaatattatttggcaaaagaaaaaaaaactaatactgaggctgggcatggtggctcacacctgtaatcccaacactttgggaggccgaggtgggagggtcacctgaggtcaggagttcgagaccagcctgggcaacatggtaaaaccccatctctactaaaaatacaaaattagcaaggtgtggtggcacgtgcctgtagtcccagctatttgggaggctgaggcagaattgcttgaacctgggaggcagaggttgcagggagccgagatcatgccattgcaccccagcctgggcaacaagagcaaamctcagtctcaaaaataaacaaatgaactaatactgatactacagtgtggatgaaccttgaaaccattatgttaagtgaaagaaattggccacaaaagaccacatattatattattccatttatatgaaatgtctgggataggcaaatccatacagacagaaaatagattagtgacagcctatgcctgcagggattgtggagaaacaaggagcaactgttaatgggtacagcgtttctttctggggtgataaaaacgttctaaatttagtgatggctttacaactatgtaaatatactaaaaaccactgaattaaatactttagatgggcaagatgtatatgagttatatatcaataaagctgttgtttcaaaaataacaatgaatatgagactgaggctcagag

SEQ ID NO: 941734 - DNA, 597 bp, Homo sapiens
gcattgtgtgcctccagcttttccaggtgcacagtgtaagctgtcaggggatctaccattctggggtctggaggatagcatccctcttctcacagctccactaggcagtgccccagtggggactctgtgtggtagctccaaatccacatttcccctttgcactacccttgcagaggttctccatgagggttccacccctgcagcagacttctgcctggacatccaggcatttccatacatcctctaagatctaggtgaaggttcccaaacctcaattctagccttctgtgcacctgtagacccaggaccatgtggaagctgccaggcttggggtttgcatcctctgaagcaacagctcaagctgtatcttggccccttttagccatagctggaactggagtggctaggatgcaggacaccaaatcctgaggctgcacagaccagcagggccctgggcccrgcccatgaaaccatttttccctcttaggcctccagacctgtgatgggagggactgctgtgaagatctgtgacatggcctggagacattttccccattgtcctggtgattaacattcagctccttgttacttgtgcaa

SEQ ID NO: 941735 - DNA, 670 bp, Homo sapiens
gctgcttcctggggacacacagacgctggaggggtctaccaggtcctaccattctgctcccacaccagtgaaggtcccatgggcaccagcaacaaagggaggcctgagcatttttctgcatatcattaagaaagtgccccagagcccagcctctgcaggatatggctggggcagggcatcgcttatgaagaatatcaaggtataacaccataatgcatggtgtcacacatgggagggcctcatagatcaccacaggggaagagtgscccaaaggagaaccaaacccaggccatggcataaaggattccggacagacactagctgtgacttcccaacaatggatctttctgacggcacaggatgtttgggggcatttacctgtctgttctgttttgggacatacctctactggccatccccaccttttctttgggaagaccctggttcagtcttcactccagcgggcccaacctgcccctggccccccacctgcctactaccttctcctgcctccaggcattctagcagaccactcttctgagtgcaggccttccaggggagcattcccagacggtctctcagtgccccccatagccctagtgttggtgcttgtttcagtgtgtgaagtggggagaggggtggggccccatgactctgtagcccgaggctt

SEQ ID NO: 941736 - DNA, 775 bp, Homo sapiens
aaaaaaagaaatagataatttccattgaccctagtgactaatgatgttgggcattatttcatgtgcttattggccactgtatatcttctttggagaattgtctgttcaagtcctttgccccctttttttttttttttttgagagagagagagtctggagtgcagtggtgcaatcatggctcactgcagcctcgacctcccaggttcaagcaatcctcccacctcagcctcctgagtagctgggactacaggtgcatgccatcatgcccagctaatttttgtatttttttgtagacagggtttcaccatgttgcccaggctggtctcaaactcctgggctcaarcaatcctcctaccttggcctcccaaggtgttgggattacaggtgtgaaccactgcacccagccttttgtccattttttaaattggactgtttgtctttttgttgttgtgtcatagaagttctttatatattctggataccagatccttatcagatatatgatttgcaaatattttctctatttctgtgggatgtctttttactttctttattgtgtcctttgatgcacaaacattttaaatgttgatgaagttcaatttatttttttcttttgtagtttgggcttttggtgtcatacctaagaacccattgccaaatccaaggttatgaagatttacccctatgttttcttctaggaattttttagttttaactcttacatttaggcatttaatccattttcagttaatttttctttgagagagagggcttc

SEQ ID NO: 941737 - DNA, 647 bp, Homo sapiens
gcagcactattcacaatatccaagctatgaaaccaatctaagtgtccatcaatgaatggataaaggaaatgtggtttatatacaaaatgcaatactattcagtcataaaaagaaggaaaccctgtcatttgtgacaacatgcatgaacctggaggacattatgctaagcaaagtgaaccagacacagaaagacaaataccacatgatctcactaatgtggaatttttgaaaaagttgatatcatggaagcagagagtagaacagtgcttaccagagacttgagaaaggagcggagaagggaggatggggagaggttggtcaatgggtacaaagtgacaattagattggaggaataagttctggtgttttattgcatcgtggggtgatgacggttaacggtaagttattgtatgttactaaatagctggaagagagtcttctgagtattctcaccacaaagaaatgayaaacgcctgaggtgacgaatatgccaaacatcctgattgggtcatgcattgaaacatcaaattgtatcccataaatatgagtagttacaagatgtcatgaggtggtgtatttgttaattagctacgtttaaccattgcacaatatatattcttcaaaacatcatgttgcatgtgataaat

SEQ ID NO: 941738 - DNA, 766 bp, Homo sapiens
tgtcctgcctggatcatgttacataatctaagaagactgggttacgtgttataggttaagaaactagtaacagcaaagccatcaacagtccaggctagaaatggtgatggcctgaaccaggatccttgggaatggacagggaagcaagtagggaggaaggagttcaaccactgggcaggagaaagcartggcacaacagcacatcagtgcaacagacctgggtcccagccaggcctggccactctccaattaaatggcctcaagcaacattattttcctgagcttctgtttcctcatcggtaaaatgggtcagtgtggtgacacatggtatccacgggccctggtgaatgcccaggaaagtgttggaacccagcccctgggtacgatggcaaaggcctctctccaagccatggagactagtcattgcctgagagcagtcctggtcccatctgcacatgttcatgagttaactgagtcttcagtaactttttatatgacagagacactgacagaaggacagtgccaaagtgggaggccccaggaactataaatagcatgttactgcaagctgtgcataaaaacaggagaaaagattgccagggcttgagcggtccctttcagtgagtgcttgggagccaggctgtgctgctgacaaggtggagaacccagagagcctcagctctttcggcacaccaggaaagggacagcacgctaagctggcagatgtgagagtaaccctccctcggtcccacacttctgatgcact

SEQ ID NO: 941739 - DNA, 609 bp, Homo sapiens
ttgctttctctttaccttctggaaatgctaagtaacaacaaaatcctacattgaaacatattatcctacatataagagaattataactccttttctgtttatatatcatgtgattgaagacctatgaggatccctgtctctgcagaagggcttctaaatctttccaaattccaaagaaatgttcccagcctcctgtcgtgttatgtgagcctgtcattcctgttgcagagaaccttttgggagggcatcaccataggggatagtaacccggctgcctctgcctcaaagaaactattttcttccttgcacatagaattttcaagttgcctgcatgggtaaaggaaggcatcayagctaggagctgccctcctcaggaaccccattaagacctgtcaaggttttctacttcctttctatgtttattaatcctagaataaacacggtaacatttgagagcagccattgcatctccggcccatcttagatgtttgtttgattgtatttccgatgcttacagaacaatttcttccccaggaaatgtaccccttgaattacttcacataccatagaaaggcagccctcactgctatgcctgctaagcattctgtg

SEQ ID NO: 941740 - DNA, 737 bp, Homo sapiens
gacatactttagattgaaaaacacacagagtttaaaagtaaaaggagagaaaaagatataccatgcaacagtaactaaaagatagctggagtggctatgctaatatcagacaaaatagatttcaagacaaaaaattgttactgaagacaaagaaggacattttagagtgataagtgtcaattaatcagaaacacatgtcaattataaacatatatacacttaacaattgagcctcgaaatacacaaagcaaaaattgacataattgaatcaagatatagacaattcaaaataatagttggagacttcaatatcccattttcaataatagatagtacaacaaagcagaagatcagtaagaaaataggagaacagcactayaaaccaagtagactcaacagacatctatggaacatttcactgaacaaaagcagcatgcatgttgtgtcaagagcacatgagacatacttcaggatagaatacgtattaggcctaaaaccagcctctttgagagaacacagtgcaccaaggagactattattatgactattgggaggataataccaagagtttgaagtatgctcctcacccaaggtccccataaaccaaacttcttaaaatcaaatagatcaaagaatgatctatttgatgatgagtctactcgcttaactaagtggtcttttcatgaatcctttaaaactgaatttatataatctacatttgatgtatttctccatag

SEQ ID NO: 941741 - DNA, 737 bp, Homo sapiens
gacatactttagattgaaaaacacacagagtttaaaagtaaaaggagagaaaaagatataccatgcaacagtaactaaaagatagctggagtggctatgctaatatcagacaaaatagatttcaagacaaaaaattgttactgaagacaaagaaggacattttagagtgataagtgtcaattaatcagaaacacatgtcaattataaacatatatacacttaacaattgagcctcgaaatacacaaagcaaaaattgacataattgaatcaagatatagacaattcaaaataatagttggagacttcaatatcccattttcaataatagatagtacaacaaagcagaagatcagtaagaaaataggagaacagcactataaaccaagtagactcaacagacatctatggaacatttcactgaacaaaagcagcatgcatgttgtgtcaagagcacatgagacatacttcaggatagaataygtattaggcctaaaaccagcctctttgagagaacacagtgcaccaaggagactattattatgactattgggaggataataccaagagtttgaagtatgctcctcacccaaggtccccataaaccaaacttcttaaaatcaaatagatcaaagaatgatctatttgatgatgagtctactcgcttaactaagtggtcttttcatgaatcctttaaaactgaatttatataatctacatttgatgtatttctccatag

SEQ ID NO: 941742 - DNA, 492 bp, Homo sapiens
gacttggagaacatttatgtctacctaagggattgtaaatacaccaatcagcactctctctagctcaaggtttgtaaacacaccaatcagcaccctgtgtctggctcacagtttggggatgcaccaattggcactctgtatctagctaatctggtggggacttggagaatctttatgtctagctcagggattgtaaacacaccaatcagcaccctgtcaaaacggaccaatcagctctctgtaaaacagaccaattggctctctgtaaaatggaccaatcagcaggacgtgggtggggccagataagaataaaggcaggctgcctagctagcgtggcaacccaytggggtcctccttcacgttgtggtgcttttgttcttttgctctttgcaataaatcttgttgctgctcactgtttgggtacatgctccctttatgagctataacgctcaccgcaaaggtctgcggcttcactcctgagccagcgagacc

SEQ ID NO: 941743 - DNA, 607 bp, Homo sapiens
gtgtctgccccgtggcagtactttcgtgggccgcctgccctccccctcagcccgcccttatccgcggctccgctttcagagcagggtttctcacccgcggggcttcgggctcctcacccggcacctctgccagaggggaccgcctcccggcgcgtcgggcatycgtctctttcaccccttccctcttcaggagaaactgaacacgttttccagcctaaactcggcagggcaaaccagaacattccccgtctaagcagttccggggagttttaacaatttcctcgtaaactcgtctacagaactcactgtatactgtttaaatgtcgcctgtgtgtggagcaacagttttattgtgccgtgcaatcctcaacaagaaattgtagtccagggagatgaaaatcccttatttggcattcaggcgttgatcaaggtcgtgcaaccctcgctaaaaggatttaggttcatctccgtcattctcagccggggtgaaggggtgtagtctgacatttggaagcttaagaaccaagtctgctgccgtccaattcttttttaaagccttccatcatgtgtgtactttgcttgaatgattattttaaagtacatgtcc

SEQ ID NO: 941744 - DNA, 707 bp, Homo sapiens
gtttttctgtatacttaccagtgagtttggcaccttcagataatctcttattcctcattaacattcttttcttttgttttgaagtatgcccttcaccatttctcaagggacaggtctggtgttgatgaaatatctcagcttttgtttgtctgggaaagtcttttttatttgttctccatgtttgaaggatattttcacgtgatgtgcaagtctaggttaaaagtttttcttcttcaccactttaaatatgtcatgccactctcccccggcctgtaaggtttccactgaaaattctgytgccagatgtattggagctccattgtatgttcttttcttcctcttttcttgctgcttttaggatcctttatctttgacctttgggagtttgattattaaatgccttgaggtagtcttctttgggttaaatctgcttggtgttttataaccttcttgtacttggatattgctatcttcctctgggtttgagaagttttctgctgtgaattttctacccttatctctttctcttttgcttctttaaggccaataactactagacttgcccttttgtggctttctagatcctgtaggtgtgctttattgctctgtattcttttttctgttatctcctctgactttttattttcaaatagcctgtctttaagctcactacttctatcttctgcttgatcattctgctattaaaa

SEQ ID NO: 941745 - DNA, 590 bp, Homo sapiens
gcctgtccgccgccgtttggggaactagccgcccccgcccccgagttttggaccccggggtcgccaagtccgatgccttctgtgccttttattttttctgctgctcccgggggcgagtacacccgaagccggtccggggtaagggctcgggctcgggcaagggcagggttcgcaggtgctggcacgaggccggccgctgcccccggctctggggactgactggtcggcgggctgragaggcggccggccccgggagcgtgtcctctccttgcgccccacacagtgcagttcattcatgagccgcccgggcctgcgttggagggtgcggtggggaaaagattcagacgcgaaaccgagagtggggcaaaggccctgttgtggggagggggcgccgctttgtccctcctggctgtcttgaccgcctaaggcggacagtcccaaagcttggcaccttgttccccagaaaaggaaaggacgcttgggaagtggggaggagaggtcagaggggctggctgcccttggggcgctgtgctgccccctgcctgggtcccctgggcagaggtctggccgctcggggcaagcctgagcac

SEQ ID NO: 941746 - DNA, 745 bp, Homo sapiens
ttctctcaactcctcacaagcaatgctgcttcctgcccctcaggcgggacaggtatggccccattcaaaagtttttttcgggccaggcatggtggctcacgcctgtaatcccagcattttgggaggccaaggtaggcagatcacttgagatcaggagtttgagaccagcctgaccaacatgttgaaaccccatctcagccaggcacggtggctcacgcctgtaatcccagcactttgggaggccgaggcgggtggatcacaaggtcaggagatcgagaccatcctggctaacacggtgaaaccccgtctctactaaaaaamcacaaaaaattagctgggcgtggtgacgagcacctgtagtcccagctactcaggaggctgaggcaggagaatggtgtgaacctgggaggcggagcttgcagtgagccaagatagtgccactgcactccagcctgggcgaaagagcaaaactccatctcaaaaaaaaaaaaaagaaaccccatctctactaataacacaaaaattagctgggcatggtggtgggcgcctgtaatcccaactacttgggaggctgaggcaggagaatcacttgaacctgggaggtggaggttacagtgacctaagatcacgccattgcactccagcctgggcaacagagtgaaacggtgtcttatgtcacagttagatgcagtgaaaagagctggactgggcatgagaaaactcaagttctagtcccaaatctgtt

SEQ ID NO: 941747 - DNA, 550 bp, Homo sapiens
caatctctgatcagaccctggactagctcctaaagccgactgccatactatgaaccccctgagaactcaatgatttttttttctttttttgagacagtctcgctctgccgctcaggctgaagtgcagtggcacaatctcggctcactgcaacctctgcctcctgggttcaagcgattcttctgcctcagcctcctgagtagctgagactactggtacgcgccaccatgcctggctaatttttgtattttcagtagagacraggtttcaccagtagagacggggtttcaccatattggccaggctggtctcaaactcccggccctcaatgattttttttttttttttttttaagacatggggtctcattatactgaccaggctggtcttgaactcctggcctcaagtaattctcccatcttgggcctcccaaagtgttgggattacaggcgtgagccaccgtgcctggcctcttctattttttattttttgaaacatttgaaacagggtcttgctctgtcacccaggctggagtgcagtggtgcacaggac

SEQ ID NO: 941748 - DNA, 665 bp, Homo sapiens
atttgagtgtgctactccagcccatttattgagtgacctgaaaggtttccagttttgagtgggttccagaacaggagaaagttctgcagcaggtccaggctgctgtgcaagctgctctgccacttgggtcatatgacctagcagatccaatggtgcttgaggtgtcagtggcagatagggatgctgttcagagcctttggcaggccccataggtgaatcgcagcaggggcctctaggattttggtacaaagccctgccgtyttctgcagataactactctccttttgagagacagctcttggtctgttactgggctttggtggaaactgaacatttgcatatgggtcatcacgtcaccatgcgacctgaccagcctatcatgaactgagtgctttctgacccatctagccataaagtgggtcgtgcacagcagcatccatcatcaaatggaagtggtatatatgtgatcaggcttgagcaggtcctgaaggcacaagtaagttacatgaggcagtggctcaaatgcccatggtctccactcctgccatcctgccttctctcccagcctgcaccaatggccttatggggagttccttatgatcatttgacagaagaagagaagactagggtctggttcacagatggttctgcacaatatgcaggca

SEQ ID NO: 941749 - DNA, 665 bp, Homo sapiens
atttgagtgtgctactccagcccatttattgagtgacctgaaaggtttccagttttgagtgggttccagaacaggagaaagttctgcagcaggtccaggctgctgtgcaagctgctctgccacttgggtcatatgacctagcagatccaatggtgcttgaggtgtcagtggcagatagggatgctgttcagagcctttggcaggccccataggtgaatcgcagcaggggcctctaggattttggtacaaagccctgccgttttctgcagataactactctccttttgagagacagctcttggtctgttactgggctttggtggaaactgaacatttgcatakgggtcatcacgtcaccatgcgacctgaccagcctatcatgaactgagtgctttctgacccatctagccataaagtgggtcgtgcacagcagcatccatcatcaaatggaagtggtatatatgtgatcaggcttgagcaggtcctgaaggcacaagtaagttacatgaggcagtggctcaaatgcccatggtctccactcctgccatcctgccttctctcccagcctgcaccaatggccttatggggagttccttatgatcatttgacagaagaagagaagactagggtctggttcacagatggttctgcacaatatgcaggca

SEQ ID NO: 941750 - DNA, 665 bp, Homo sapiens
atttgagtgtgctactccagcccatttattgagtgacctgaaaggtttccagttttgagtgggttccagaacaggagaaagttctgcagcaggtccaggctgctgtgcaagctgctctgccacttgggtcatatgacctagcagatccaatggtgcttgaggtgtcagtggcagatagggatgctgttcagagcctttggcaggccccataggtgaatcgcagcaggggcctctaggattttggtacaaagccctgccgttttctgcagataactactctccttttgagagacagctcttggtctgttactgggctttggtggaaactgaacatttgcatatgggtcatcacgtcaccatgcgacctgaccagcctatcatgaactgagtgctttctgacccatctagccataaagtgggtcrtgcacagcagcatccatcatcaaatggaagtggtatatatgtgatcaggcttgagcaggtcctgaaggcacaagtaagttacatgaggcagtggctcaaatgcccatggtctccactcctgccatcctgccttctctcccagcctgcaccaatggccttatggggagttccttatgatcatttgacagaagaagagaagactagggtctggttcacagatggttctgcacaatatgcaggca

SEQ ID NO: 941751 - DNA, 612 bp, Homo sapiens
gatcaggatggtagctgctgaatgttgggctggctgtggcaatttcataaaataagacaataatgaagtttgccatatccattgactcttcctttcatgaaatatttctttgtagcatgtgatgctgtttgatcacattttacccaaagcagaacttaactcaaaattggagttaatcctctcaaaccctgccattatttattaattaaagttattcagtattctaaatyatttgttgtcgtttccacaatgttcacggcatctccactagttgttaacatcgcaggaaaccactttatttgttcattcataaaaagcaacttctcatctgttcaagttttatcatgatatttcagctattcagtcacatcttcggactccactactgtttccagttctcttgccattatctagcatatctgcagttacttcctttactgaagtcttgaatccctcaaagtcattcaggatggttgaaatcaacttctaccaaactccttttgctgacatttttacctccacctatgaatcataaatgttcttaatggcatctaggatgatgaatcttttcaagaagattttcaattttctttgcctagatccatcaagagg

SEQ ID NO: 941752 - DNA, 698 bp, Homo sapiens
gtagctgctgaatgttgggctggctgtggcaatttcataaaataagacaataatgaagtttgccatatccattgactcttcctttcatgaaatatttctttgtagcatgtgatgctgtttgatcacattttacccaaagcagaacttaactcaaaattggagttaatcctctcaaaccctgccattatttattaattaaagttattcagtattctaaatcatttgttgtcgtttccacaatgttcacggcatctccactagttgttaacatygcaggaaaccactttatttgttcattcataaaaagcaacttctcatctgttcaagttttatcatgatatttcagctattcagtcacatcttcggactccactactgtttccagttctcttgccattatctagcatatctgcagttacttcctttactgaagtcttgaatccctcaaagtcattcaggatggttgaaatcaacttctaccaaactccttttgctgacatttttacctccacctatgaatcataaatgttcttaatggcatctaggatgatgaatcttttcaagaagattttcaattttctttgcctagatccatcaagaggaatcactatggaagttacagctttttgaaatattccttaaataataagacttaagggtcaaaattactcattaatccatggattacagaatgaatg

SEQ ID NO: 941753 - DNA, 615 bp, Homo sapiens
cctggccaacatggtgaaaccctgagtctacgaaaaatacaaacaatagctgggcatggtggtgggtgcctataatcccagctactcaggaggctgaggcaggagaatcacttgaacctaagaagcagaggttgcagtgagccaagatcgcaccattgctttctgggcaagagagtgagactcagtctccaaaaaataaagaaaaacaactccaagaatctggaatggatgtctagcacccccagtaaataagcacatttgtttaaatgcatatgatcagctaaagaawaagttcactaagaagtgaattaggttggtggttgttccataatgtatgactccttgaagattccatcagcaaaccatttaacacttatttgaagaaggaacacgatttctgtttgttgtctgaaaaccttgcactgattgcaagttctggtaagatcactaaagcactggcatcaacttaaaaatggcatccatgtcttgaaagaaaaaaaaatctcagacaacattgaagcactcttaaacagtgcttcatcacaaattctatcattatcacagagggcatttgagtatgctcaaaagcttgggtaactgactgtgagtgaaaaa

SEQ ID NO: 941754 - DNA, 578 bp, Homo sapiens
agacccaggtatccctgcactctcgggggcccaggaagcctccctgccctgtcaggctcagaaagcctgctccctctctcttgtctctccctgcttccgatgcccactctgatcttgaagcaaagttgaagccgagcctgggcgctgtcgtgacctagccaggtgtgcacacactcagggccgcagtgacacatcatccccccctggccttctcagccccctctgaaacttcaggcactgacgaactctgagagggaggcccgggggctaggggaagctcagcatgaacagcctgggtgtcgtggatggcatgtttatggtggcaggaggcagacagtttcctaggtgggaaggagagggggctggratgctggttccagatggagtccaagaccaggagtgagaactcaaggtgctttttccaggcccaaccatggccacccatggaccaatcagcatgcagttcctcccttctgagctcctataaacctcagactgagccagactcatacagtcgttggtgggacctgcttgtggaaaggggctacccactgtaggtctcctgagagctgttctgt

SEQ ID NO: 941755 - DNA, 588 bp, Homo sapiens
agctgatagagctgtaaagctcacttcaagaatttcagaatatatgcacaagtattagtagcagaattgaccaagctgaggaaagaatctcagagctcgaagactagctctctgaaataactcagtcccacacaaataaagaaaaaaaacaataaagagaaatgaatgaaacctctgaggaaacacattaataagatagaccactagctagactgataaataaaaaaagatagaagatccaaataaaaacaatcagaaatgacaaaggggacctgaccactgatcccacagaaatacaaaatccctcwtagaacactaggaacacctctatgcacacaagctggaaaatctggggaaaaaaaaaatgggcgaattcctggacacatacaaccttccaggactgaaccagttaaaaaaaaaaatgaagccctcaacagaccaaaaatgagttccagaattaaatcagtaataaaaagcctgccagccagaatcagatgaattcatagccaaattctaccagatgtataaggtagaactgctactattctgactgaaactatttcaaaaaattgaggaggagggattcct

SEQ ID NO: 941756 - DNA, 588 bp, Homo sapiens
agctgatagagctgtaaagctcacttcaagaatttcagaatatatgcacaagtattagtagcagaattgaccaagctgaggaaagaatctcagagctcgaagactagctctctgaaataactcagtcccacacaaataaagaaaaaaaacaataaagagaaatgaatgaaacctctgaggaaacacattaataagatagaccactagctagactgataaataaaaaaagatagaagatccaaataaaaacaatcagaaatgacaaaggggacctgaccactgatcccacagaaatacaaaatccctcatwgaacactaggaacacctctatgcacacaagctggaaaatctggggaaaaaaaaaatgggcgaattcctggacacatacaaccttccaggactgaaccagttaaaaaaaaaaatgaagccctcaacagaccaaaaatgagttccagaattaaatcagtaataaaaagcctgccagccagaatcagatgaattcatagccaaattctaccagatgtataaggtagaactgctactattctgactgaaactatttcaaaaaattgaggaggagggattcct

SEQ ID NO: 941757 - DNA, 613 bp, Homo sapiens
cagctccagatggagtccatggcctagtgtgagacttacgttgctttttccaggcctacccatggctgccccggaccaatcagctcacacttcctcctttctgaccccataaaaaccccagaccgagccagactcaaacagatgtaagaactaccaatagcagaaaggagctacctactgcaggtcccctttccactgacagttggacactatcaggacgacctgcctgcagaaaggagctctacccagtttgggtcttatgagagctgttctgtcgctcaatgaagctcctctccaccttgctcaccctccaattgtctgcatagcccattcttcctggacatgggacaagaacttgggacccatctaatggcaggactgaaagagctgtcatgcaaaaagggctgaaacagtcctcccttctgaccayattgtgggcaatgagaagaagacctgcagccgttcagggagccaagacctgggagctccccaacccagacctgtgaaactctctttggggctgtatagttcctggcatctctaagtttcttggcaccaccacattccccttgtccagacatgggtgcagacagcagaagctgtgtgtggtaca

SEQ ID NO: 941758 - DNA, 757 bp, Homo sapiens
gagggccaccatcctccagaccccagaatggtagatccactgacagattgcaccatgcacctggaaaagccacagacactcagcgccagcctgtgaaagtagccaggaggtggggtgtaccatgcaaagccacaaggacagagctgcccaaggctgtgggagcccacctctcgaatcagcatgacctgtatgtgagacatggagtcaaaggagatcattttggagctttaatatttgactgccccattggattttggatttgcatagggtctatagctccttcgttttggccagtttctcccatttggaatgagtgtatttacccaatgcctgtaccctcattgtatctaggaagtaactaacttgcttttgattttacaggctcataggtggaaaggacttrccttgtctcagttgagactttggactgtggacttttaagttaatgctgaaatgagttaagactttggaggactgttgggaaggcatgattggttttgaaatgtgaggacatgagatttgcgggggagtggggggcagaggcagaatgatatggtttagctgtgaccccacccaaatcttaccttgaattgtgataatccccgtgtgtcaagggtgggaccaggtggagataatggaatcatgcgggcagtttcccccatactgttctcatggtagtgaataagtctgacgagatctaatggttttataaatgggagttcccctgaacaagttatcttgcctgccaccatgtaaa

SEQ ID NO: 941759 - DNA, 641 bp, Homo sapiens
attttaataatgtgctttatttaatgtgatacatccagatatcatttcaacatgtaatcaatataaaaaattattaataagatagtttccattctttttgtgctaagtcttgaaaacctgggtatctcacacttgacagcacaatttggactagccacattttaaatacccaaaccccacacttaagttttgggttaaaaaaaatgcaaatgttgtttctgttttcacccagtgttggaatcaggatttcactggagtcttagttccttcctggataatacctgatctgctggcctctgctcttgcatcctccaaacccatgtggagtttctgtatcactattgtcaaccactcccagacaaagcttacattttagaaggaatgaggccctttcccaaaaatcctctggcctcattttttgktatgcactttctttcccggagtcatgctatgcaccaaaggagaagaatatgagataaaaggaaacagggcaaaaagccctctgttaattctgcaaaacatttatttagttcctacactaaaccagaattcacttaaatgtatcacagcctctccacctgaggaaatcatagcgaacataactggacatccacatttgcctcggaaagccccaacgtatg

SEQ ID NO: 941760 - DNA, 578 bp, Homo sapiens
attactggatatgtacccaaaggaatataaatcattctattataaaaacacatgtacacatatgttcattgcagcactattcacaatagcaaagacatggaatcaacccaaatgcccatcagtagtagactggataaacaaaacatggtacatgtattccatacaccatggaataatatgcaaccataaaaatgaatgagatcatgtcctttgcagggacatggatgtagctgmaggccattatccttagcaaactaacacaggaacagaaaaccaggtaccacatgttctcacttataagtggaagctaaatgataagaacacatggacacatagaggggaacaacacacacttgagcctatcagagggtagagaataggatgagggagaggatcaggaaaaataactaatggatactaggcttaatatcttcatgacaaaataattggtaaaacaaacccccatgatatatgtttacctatgtaacaaacctgcacatcctgcacatgtagccctgaacttaaaataaaaactgaaaaaaaaaaaaaaaagattgcagatggaattaaggttgcta

SEQ ID NO: 941761 - DNA, 611 bp, Homo sapiens
ctaaaaggggccaaggtacagctcaggcctttgcttcatagagtgcaagccccaagccttggtggcttgcaaatgtttttgggccagtgggtgcacagaaggcaaggattgaggtttgggagcctccacctatatttcagaggatgtatgaaatgcctaaatgcccaggaagaagtctgcttcaggaacagagccctcatggagaacctctaatagggcaaaggagaggggaaatgtggggttggaaccttcacacagagtccccactggggcactgcctagtggagtagtgagaagaaggccaccatactccagatcccagaatgttatgtctaccgacaacttgctctgtgtacctggaaaagccgcaggyactcaacaccagcccatgaaagcagccgtgggggctgaaccctgcagaaccacaggggtggagctgcccaaggccttcgcagtccatctcttgcatcagcattacctggatgtgagacatggagtcaaaggagattattttggagctttaagatttattgactgtcacgctgagttttggacttgcatgaggcctgttgcccccttgttttggcaactttctcacatttggaatggga

SEQ ID NO: 941762 - DNA, 612 bp, Homo sapiens; identical to SEQ ID NO: 932040

SEQ ID NO: 941763 - DNA, 698 bp, Homo sapiens
tggagcctttctctttaaaatatggaaaattatcaggtgactcattacatgcaaaaatacgtctgataacactacccaaacaagcaaaccaactgtatctgacagtcgcagctcatctcgaggcaaagtgcaataacatttaaaacacttgagattttggccgggcttggtggctcatgcctgaaatcccagcactttgggagtacaaggtgggcggatcacttgaggtcaggagttcgagaccagcctggccaaaatggtgaaacctcattctctactaaaaatataaaaattagccaggtgtggtagcacacacctgtagtcccagctactcgagagactgaggcaggagactcacttgaacctgggaggcagaggttccaktgagctgagaacataccattgcactccagcttggacaacagcgggagactctgtctcaaaaaaaaaaaaaaaaaaaaatgagattttattcatgcttcattcagataattgggtgtctagtatgtgccagggactgctagagggttgtgttttactcactgatgtatctcaaagatctaccctccaccccaacctacaggtcttactttggagagcggggaaggaggtgatgagggcaggcttctttttcgatcaaagttctctattaaccaaaacagaaaaattacaattaaatcattctatgataagatcag

SEQ ID NO: 941764 - DNA, 531 bp, Homo sapiens
taaccccttgctgttatctctttctcatacacttctagtaaatgtctactacaatggatgtctaatatactcatctgagatgactttttgcctcgtactgccgtaacaaaataccatagactgggtagtttaaataataggaatttattttctcataattctgtagaccagaagttcaagatcaaggttctggttgattcagtttctggtgaggcctctcttcttggcatgcatactgacgccttctctctgtgctcacctggcctcacatggcctttcttcattgcatgtgtgtatgtgtgcacacacgcatgtgtgcatgtttacagagagctttctgtatctcttcttataaggaccctmatcctatcagatcagggcctcacctgtgttacctcctttaacctaatcacttccttagaggccccatcttctaatgcagtcacactagggtttcaacatataaattggagtgggggagaatacattcagtccataacacatattataaaaataatgtatttttgtagt

SEQ ID NO: 941765 - DNA, 768 bp, Homo sapiens
tctcccttctgcccccctccccttcatctttctcttctttcctctgtaatgggatggcaaggagaatacgttttgttgttctgttaaattatacatctctaggacatcagggattgtgtagtctaattgactttggtccacacctgctgcaacttaaacataygcaagcattaatgaatttttttcctaaagtagagggaagaaagctgttgataaaggaaaccattcacaggcctcaccattggattataagcctgctgggtgcttaatgagttgctgaataatataacacttctttagttctttggctgcctcatgattaaatgctataaatatttatgatttattactgatgctttggatagggtaggctttggaaggctcatggatcgcagtgattctaaaggaaaataagaaaatacaactatataaagctgcttatttataatgctgctcaaacgggcagaagctggtggaggtaaatctatttagaggcgatgccatttaaatagcttcttttatcattgattatataattttcattaacatatacttataataaacaggaattaaaattatcactttctactaataacacactcacctttgaaggtttcagttaggttgcaaaatcaaagagctctgcataatgtttactgcaactgctgtcatgctatacgtggtaaccagggacctataaaatatggggctttttctccccaaatcagatacttgtctcagggaaccaaggctggcagtgtctgcagc

SEQ ID NO: 941766 - DNA, 828 bp, Homo sapiens
actgttcttcacttggtccctgtccctgcttctcctcactgggcagggcctcctgacctgggactcccgcataactactctgccctgcctgggcacttcagtcagcagcagctctgcatttgtctaaggaggaaatcctggagtcaacccacaacccctccaccattgcacctgtagtggtaccaccctaaccaccctcaggctaaggaaggaacaaagggcttagttcctgtgctagcacctcctgcactgtgtagcccccatacagagtcctgtctctcttctctgtgaacccccaccctcaactcttcaccaggtagggcccctgggtcaggactgcagatcagtcgccccaaccacagctaaggatgcccactgggagtggctcygagtttcccagaggaggggctcccagagggaaccaacacccctctgccatagcaatggttctgcctctgctgccctccatctggggaagaaacaaagagcctgagggcttcacctgcactttcagcacaccacagtcaccatcggaagaaaagcccagtctctcctccctgtgagccttccaccccctcttcaccaagtggagtgcccaactcatgccagcagtgcagccaacccaccccctggctgaatactcccattggcagtggttctgcttctctgaggtagaattcccagagataactgaaaggccctttgccactgccgctgctgtggtacttctcttgcttccctcagactaaggaaggagcagagaccctgagtgcttcaaccacacctttggtaagctgaagttgccctaaggagaagaggccagtctgt

SEQ ID NO: 941767 - DNA, 584 bp, Homo sapiens; identical to SEQ ID NO: 921894

SEQ ID NO: 941768 - DNA, 591 bp, Homo sapiens
tgtaccactttatttaattcccactaacctactgtcattctccatgtcccatcaggcttccacactgactttacagggctgttgtatgggctgtgcattgaccttataatgcctacctaactccttaaaagttcctgtgatttcatcatgcccacaccccactgctactccctgaagggctggcaactgcaccgttggtgtccgttttgagttcccctcatcacttcaccacttgcttcaccaccctaactcttagagagtttctcagtagttgtttggagggtcaagcctgataagatatcctttyccaagatgcattctgggatgggagcaatgtatactacattgagttttggtggcagtctcccaactagtactactggttcaacccatctgacttccatggccccctttctaaaaccatctattgctgttataggccttcggaacagatgaatattatcatatatgagagtgcattaggctgcagtgtctactagggcatgcacagtttgtttattcttaggtaactaatatacagttagttctacatgtggcctctggtccctggacaccctgaccaccattgct

SEQ ID NO: 941769 - DNA, 620 bp, Homo sapiens
accaatatgatgcatatatcaatatatacttatgtagaaagagatttattataaggaattggctcacgggattatggaggccaagtcctaagatcagcagaatgtgtcaacaaggacccaggggagccaatgtgttggttcaaattttttaaagggaccaaataaaagtggccaagacatgtttggacatcaggcaatgaagatcagtgacccccctgagagatgggaaacaaaagaagcaagccccaagatcgccccatctgaccacctcccattgcctactgtggcacagamggagcacagaggatggcctcagctaaggaggcttagctgagtcttgggagaccaaggcagcaagagtttgcaagactggggaccacggaagagagctacatagagacagagagggctctggagatttgcaggtggcccccttgagtattcagctgagaagtgactggcacatgcttgggagaagatgactcaagtctatagaaagactcacccaaggattagagagaacagagcccactggtgggtatgctgcctgttaacaccaactagactggaaaacctcatgatttgtgggactttgagtcgactacccagaagagtcttgc

SEQ ID NO: 941770 - DNA, 650 bp, Homo sapiens
gtggctcatgcttgtaatcccaggactttgggaggccaaggcaggcggatcacttgaggtcaggagttcaagaccagcctggccaacatggtgaaaccccatctctgctaaaaatacaaaaattagccaggcatggtggcaggtgcctccaccacccccagcccctactcatgccctctgccaatctcagcacctcattataaaaggcatttcaacttatcttatcttttcacacaatactaaaccccatggggccttgcatattacaaagcgtgttgtgggtgctctgagctgtgccacagagaaatcagccaggactgagtgtggtggctcatgcctataatcccagaacttcaagaggccaaggcaggaggatcacttcagccygggagtttgagaccagcctgggcaacacagcgagaccccctctctacaaaaaatttaaaaattatccaggcgtggtagtatgcacctgtggtcccagctacttaagaggctgagatgggaggattgcttgagcctgggaggtcaagggtgcagcgcgcagtgattggaccactgcctccagtctgggtgacagagggagacactgcctaaaaaaacatcagatggctatcagtcctgggtaaggtctgttcactccaccacca

SEQ ID NO: 941771 - DNA, 758 bp, Homo sapiens
ttttgtctattccttttctttcaatctatgtgtgtctttacaagtgaagtaagttttttaggcagaatataattgtgtctttttttttgatctatgcagccagtctatagcttttaattgaggaatttaagctgtttacattgaaggttgtttttgataggtgacgacatgttattatcatctcgttgttttctgattgttttgtattttttgttttattgttcacgtctacagtttggtctgttttgtggtaayaacagttgactcctttcttctcatttgtgtgtctgctttatcaacgagttttattttttgtgtgttttcatatatatgtagatgtagttcttttgcttccagatgtaggatttccttaagctcctcatcatttattttgttgaatttgtcattcagatcatgaattctttccttgatttctttgtaccattcatttgggttgtcctatctcactgactttttctaatgtcattattttgaagttttttccaggcatttcataaatttccttttctttgggctctgttactggtaattataatgttcctttggaggtgtcatgttttcttgctttttcatgtttttgtgtccttaccttaatatctacacatctattgtaacagtcacttcttccagttttatcggttggcttttgcagtgaaatatttttcctgtagatgtttctgtagtgttggttggaaaaggcattttggcattgattcttggtgggggtagtagcgtag

SEQ ID NO: 941772 - DNA, 786 bp, Homo sapiens
ttataaaggggagtttccctacgcaagctcttttgcctgctgccatgtaagagatgtgactttgctccccatttgccttctgccatgatttcgaggcctccccagccatgtggaactgtgagtcaattaaacctctttcctttataaattacccagccttaggtatgtctttattagcaacatgagaacagactaatacaacctgtatgccagaaaggctgggagcacctatggactctggcagataagtagctgggtttatggtytggcagactttaagggttatgtctggagtgtctagcaataaggcctgatactttaataaatgttcccctattatccactggtgccctttagcttctaggaccaccttcccttggtgtggggtcaaaaacctttaggggctattctaatgttagtttattagctttgcctactagaaaagttatggcagcaacagctctaagacatccaggccactctgaggccacctggtctatctgcttagaaaaggaggctactggccttggaatgttccccagttttgtgataagattacccaaggcctatgccttgctttttggccacataaggaaaaaatggttcatccaacttggagactcccaaggctgcagcagagcccaatttctctttgagagtattgaagatttgcttgcagttctaattacattcaagaatctctaaatctttcccttttagtgtatcatataaaggcttggctacgtgtgcagaagcagcaatacccagccatcccctagaaaggcc

SEQ ID NO: 941773 - DNA, 614 bp, Homo sapiens
ttaaagtgcatcactaaaggagagaaaaagcaaacctcgaagtggaacaccatttttcaatgtgtgtaatcaacaaggggttcagggttcatatctaagatacataaagaattcctacgaacctaccagtcaaaagaaaacaaaaacagacaacacaacaaaaaaaacaggcagaagatttgacagataatgaatatgaaatgagcattaattctcaacctcatttgttagcagggaaatgtacactaaagccatactgatacaccactatacctcactagagtatcaaaccaagctttcaaggttgtagaacatcaagaactcaaatgttgttgatggaagtgtaaattggcacaattactatagcaaacagattgacattatcaaataaaatacaagatatgcataatttatgacacagmaattcacctccaagttatataccctcataaaacatatgtttatgtgcaccagtatacatgtttaagaatattcatagcagtactgaataataactccaaatggaaacaacctaaatgtctatcaagagtgaaataaataacaaattgtgatctattcatactatgaaatactgtattatgagaaataaggaa

SEQ ID NO: 941774 - DNA, 760 bp, Homo sapiens
tgggatacaggaaaccaagtccctaggctgcacacagcatggggaccctgggcccggcccacaaaactattttctcctaggaccccaggcctgtgatgggaggggcagccatgaagacctctgacataccctgcagacattttccccattgtcttagggattaacattcagctcctcattacttatgcaaatttctgcagccagcttgaatttctcctcagaaaatgggtttttcttttctttcacattgtcaggctgcaaattttccaaacttttatgctctgcttcccttataaaactgaatacctttaacagcaccgaagttacctcttgaatgctttgctgcttagaaatttcttccaccagataccccaaatcatctctctcaagttcaaagttccacaaatctcgagggcaggggcaaaacatcatcagtctctttgttaaaacataacaagagtcacctttactccagttctcagcaggttcctcatctccatctgagaccacttcagtctggaccttattgtccatatcactatwaggcttttggtcaaagccattcaacaagtctctaggaagtttcaaaatttcccacattttcctgtcttcttctgagctctccaaactgttccaacctctgcctgttacccagttccaaagttgcttccacatttttgggtatcttttcagcagtgccccactctactggtaccaatttactgtattagtccattttcacagtgctgataaagaaata

SEQ ID NO: 941775 - DNA, 615 bp, Homo sapiens
aagtgcctaacaggcatctgaaatgttaactttctcaaaatcaaactcctgatcttcccccaaaacctgccgcatctacactgtttcccatcttaacatcaactgcatccttgcagtttctcaagccaagagttcttcattcatttttcttttcattcttatctcccagtccgacagcaaatcctgtcaactctaccttcaacatataccttgagtcttgccactgtttaccaccttcactgctgggatcttgatccaagctaccatcatttctcatcttgactatttttttatttaatagagatgggtcatgtcatgctgtgcaggcttgggtgcagcagctattcacagatgtgatcataatgcactatagcctcgaactcctgggcttgagtggccctcccacctcagccttcatcttgagtattgctctgcctttgttccatcttagactattctttacccagtagtcagagagatcctttagatcataatcagaccatgttgctcctctactcaactcatcartggcagccatttcccatagagcaaaagccaggatctgtccagtgacctccgggccctgaaggattgggcctccctgccatccattct

SEQ ID NO: 941776 - DNA, 639 bp, Homo sapiens
taagttcagctgcatgtaacagaaaataaataaataaataagataagagtttagttctttctcacttaaagtaaacctgcaaaccagcagtacacagctagtatagcaactgtgacaggtactaaggacccaagggtttactttctttcggcttcataacatgatcttaagaccacccaatgggttaagatagctgctggagctccagccattacatccctaatctaaccaataggaaggagaaggatagaggcaaagtgtgtaactactcaatggattcttcctgcctagtgtayagataaaatcagaccatggcattgcaataaagaaagtgtttaatagatatgaagctggccacaccacatgggagacagagttattactcaaatcaatctctctgaaaatttaggggccaggatttttcaaaggtagtttgggctaaggggtggggatggctaggcaatgggtgcttgctctgattgtttgggggtgcaatcacaggggtgtgggaaatggtcctcctatgcactcagtcattctggtggggccacaggagtggttagtgggtccaggtggagccaacgattgtcagacctgcaaaaaacctgaaaagatatcttaaagggccaatcttaggtt

SEQ ID NO: 941777 - DNA, 489 bp, Homo sapiens
aggcgtttacccggtgtatgacctctagtgttcctctaggaacactctgctggtaacggaagaacctcaagtgatcatgagcacagcttcaataaacacactgcacgtgcagcccctcccaggtgctggcaggccaccgggcacacggacagcccaccccaagggaagaatcaggagagaagtaatgcaaccccctggaagcatgccartgtatacaaccccaagtcaaaggtcaaatcgtcatgcacttgaatctctcaagtcgcccacttggctctcttccaagtgtactttacttcgttttgttcctgctgtaaactttttagtaaacttccactcctgctctcaaacttgcctccgtctctccctctgccttatgccccttgttgaattatttcttctgaagaggcaagaattgaggttgctgcatactcgtatgatttgctgctgctaacaggactaagatcaaagagaagacaccatagagtt

SEQ ID NO: 941778 - DNA, 555 bp, Homo sapiens
ggtctccttggaatgagtatggaaggtgatcagtgtaagtgcacatgggcaggacacctaacctagtgttgggaagggaagggaagccttcagagaggatgtatccttgaaaccaggagctaaagcacttgatcagagagaccctactcagaagtccagggcaggtttggagtcagatgggctgtgggtttgaaatgcaattatatggtttggatgcttgtcccctccaaatctcgkgttgaaatgtgatttccagtgttgcaagagggccctggtgggaagtgattggatcatgggggcggatttgtccctcgctgttctcatgatattgagaaagttctcacaagaccaggttgtttaaaagtgtgtggcagctcctccctcatgctcttgcgcctgctcctgcttcaccttctgccatgattgtgagccccccgaggctctcaccagaagcagatgctggagccatgttggtacagcctgcagaactgtaagcccgttaaacctcttttctttctttttctttttaaactttatcctttcttttaaaatttt

SEQ ID NO: 941779 - DNA, 634 bp, Homo sapiens
cagcagctgcagcaagactcacccaaggagagtctgggctcagacacacctagccctgcccccacctgatgggccttccctacccaccctggtagctgaagacaaagggcatatactcttgggagttctagggctctggccactgccggttcctctccgtactaatgctctctggaaagctaatgctctctggaaagcaccatctcctggcaggaggccaaccagcacaaaaatagagcattaaaccaccaaakctaagaaccctcacagagtccatttcatccccctaccacctccaatggaacaggtgctggtatccacggctgagagaccaacagacggttcacatcacaggacttgtgcaaacaaccccaggtaccagcccagagcctggtagacttgctgggtggctagacctagaagagagataattgctacagcttggctctcaggaagctaggaaaagggggacagtattacatcaaggaaacaccccactggacaaaagaatcttaacaacagccttgagccccagactttccctctgacagaacctatctaaatgagaagaaaccagaaaaccaactctggtaatatgacaaaacaaggctctttaacaccccccaaaaaaatc

SEQ ID NO: 941780 - DNA, 578 bp, Homo sapiens
tcacttctcctgacagccctcaaattgtttgaagacagcggtgcctacaaaaacatctcaaagttgcacatcccaagaggctgcaggaagaaggcagatggtaggcagggctaacatgaatctcctacttggatggtcagaacagtgtgtggagattcacactgtgaacttttgttccaagaactactacaggaaaaccaaaagaatttaccaggaaaaccaaaagaatttacagatcctttgaaagaaatggcatgccattgcaaactcagtgagacagaagaaaaactgtgagttcccaaagtgtgagtggggaataacctgcctccaaacacacatccccactggggaatctgaaaactcagrtggtgggggaaggatttaaccctgcctagagctggaatggatttagggagctgtgcaaaatataaaaggagaagcagcaatgggaatagccttttaggcacccccagtctccagcttgagcccagggaagtcatccctgactatatctcacagggccccttggggaaggcggccagcagaattagggaggggtcacagggtgaatgaaactg

SEQ ID NO: 941781 - DNA, 578 bp, Homo sapiens
tcacttctcctgacagccctcaaattgtttgaagacagcggtgcctacaaaaacatctcaaagttgcacatcccaagaggctgcaggaagaaggcagatggtaggcagggctaacatgaatctcctacttggatggtcagaacagtgtgtggagattcacactgtgaacttttgttccaagaactactacaggaaaaccaaaagaatttaccaggaaaaccaaaagaatttacagatcctttgaaagaaatggcatgccattgcaaactcagtgagacagaagaaaaactgtgagttcccaaagtgtgagtggggaataacctgcctccaaacacacatccccactggggaatctgaaaactcagatggtgggggaaggatttaaccctrcctagagctggaatggatttagggagctgtgcaaaatataaaaggagaagcagcaatgggaatagccttttaggcacccccagtctccagcttgagcccagggaagtcatccctgactatatctcacagggccccttggggaaggcggccagcagaattagggaggggtcacagggtgaatgaaactg

SEQ ID NO: 941782 - DNA, 459 bp, Homo sapiens
tgccgcctatgtccatgttaaacagtgactgctcggtagacagcccaactctctagggatgacagaacagaaataacctggttctcagtggcctgagtggccgaaataccttgggaccagctatctctggacttaagtaaactagaaatgtccttgtgctttaagccaggtttttgttacttgtaagcaaaatatcactttaatcgaatggagaaaakgactgtattgagaagaaaagttacaattatgtcatgataattatgattacagaagcctgtcgaatgctgtttacaccaaagatcgaatgacagccatgctccagggagctggtgagaatttccctgaggaggacagcgagcaccggccttgcagaaaaagccccacgttaggcaacgagggatgaggccagtggatggcaggcttcgcatgaaatgctaaggagctgtggtttttgtctct

SEQ ID NO: 941783 - DNA, 718 bp, Homo sapiens
ggatggcaggcttcgcatgaaatgctaaggagctgtggtttttgtctctagagaacagaggcatgtgcctgtgtgagcaagaccgctcacactcacgacacccacactcctcctgtgtgatgaggactcatgctggcctttgtctccatcttctgggagaggctctctaaagccttacaatttcccaagtgatgggagtgtctctgctattcatggtgggccctgataatttatgctaacaggtcactcacggtgggggcctgcgtggtttcaggacgggtgacggtcttacaggaaagacccacgtgtcaccagaggatcagggctctgagcctgacctctagggaagggaggyggctggagatgaagttcaaccatcaggccagtgattcaatcaatcacgagtatgtcatgaaacccaagtggaagctctggccccaaagcttggtggagcttccaggtggtgaacgcatggatgtagtgggagggtgaccggtcttgagcacatggaagctctgccttccaggccctcctggactgtgtcctgctgtctcttcctttggctggtcctgagctgtgtcctttgtaataacactgtcatcatacatgtagcactttccggagttctgagagtcattctggtgaattattgactctgaaggggtcaggggaacccctgacttggtcagaagtgcaggtggcctggggaccctggagt

SEQ ID NO: 941784 - DNA, 718 bp, Homo sapiens
ggatggcaggcttcgcatgaaatgctaaggagctgtggtttttgtctctagagaacagaggcatgtgcctgtgtgagcaagaccgctcacactcacgacacccacactcctcctgtgtgatgaggactcatgctggcctttgtctccatcttctgggagaggctctctaaagccttacaatttcccaagtgatgggagtgtctctgctattcatggtgggccctgataatttatgctaacaggtcactcacggtgggggcctgcgtggtttcaggacgggtgacggtcttacaggaaagacccacgtgtcaccagaggatcagggctctgagcctgacctctagggaagggaggtggctggagatgaagttcaaccatcaggccagtgattcaatcaatcacgagtatgtcatgaaacccaagtggaagctctggccccaaagcttggtggagcttccaggtggtgaacgcatggatgtagtgggagggtgaccggtcttgagcacrtggaagctctgccttccaggccctcctggactgtgtcctgctgtctcttcctttggctggtcctgagctgtgtcctttgtaataacactgtcatcatacatgtagcactttccggagttctgagagtcattctggtgaattattgactctgaaggggtcaggggaacccctgacttggtcagaagtgcaggtggcctggggaccctggagt

SEQ ID NO: 941785 - DNA, 584 bp, Homo sapiens
aatactaatgcccatcccaaccctcagagattggaatttaattgagtttggggtaggtttcagccacgtttttttttaaaggccaagatgattttagagtgctgccagagcattaagaagatctggattcaattctttttgtctgatcttagacaagttagcgagcccttctgaaccccaatgtatccataaaataaaggtcttttttttaatctacttcacaaagccatgttggaggtaaaaaagagaataaatatgtgagaactcccaacacagactctggcacataggtggcactcartaagggtgagttctcttcctcttcactatgcactaatctatgttcagattaaacaaaacattgccttttgtacttgtgtctcttgctttttccccctctgatatcttccacttatttttcagaagtaacctaacggtacttgaaggaaatgagagtcaaagtcctttcccttctatagcacaaagggcctctccaccccttttcccaaagttaagtgattctatgtattcaaccagcagctgtgggactgaggccatgttgggagagggagtgaagtatgaca

SEQ ID NO: 941786 - DNA, 596 bp, Homo sapiens
tggtttggctgtgtccccacccaaatctcaacttgaattgtaccttccagaattcccacaggacccagggggaggtaattgaatcaagggggctggtctttcccatgctattcttgtgatagtgaataagtctcacgagatctgatggttttatcaggggtttctgcttttgctgcttcttcatttttctcttgctgctgccrtgtaagaaatgcctttcacctcctgccatgattctgaggcctccccagccaggtggaactataagtccaattaaacctctttttgttcccagtctcaggtatgtctttatcagcagcatgaaaatggactaatagtaccagtagagtggggcattgctgaaaagatacccgaaaatgtggaagcaactttggaactgggtgttgaaataatctggagggctcagaagaagataggaaaatgtaggaaagtttggaacctcctagagactgtgaatggcattgacaaaaatactgatagtgatatgaacaataaggtccaggctgaggtggtctcagatggagatgaagaccttgttgggaactgaagtaaaggtgacccttgttatgttttag

SEQ ID NO: 941787 - DNA, 606 bp, Homo sapiens
caacatttaaagatgtgaaattttaaaatgtcacaaaaaaacctctagatttttggcttctcttataaatccaaaggcctgccaccaaatgcccagtgccatggtgcaggggctgctgccccccttagcagaacatgtactctccagatggacacagatgccactacagtggtggactgtcacaacaggcaggacatggcaggacccacaacacatcaatccttytcccaggatcccactcagtgcctggcacacagcagggacttgcttattgtttgtggaataaggaataaatacacagcccttcacggtgcccaggatttcctgagtgctatgctgcttccctgagagactcccacagcagggacagaacaatgcccttccttcctggggtcctggtcccacagctgggcacacctgcagcaagacactggggtgagccttcaggctgcatccagatctccctattgttatttgatctttacatcagaagctgtgccacctagagcccaaccaaagtaagagcagtgatcctggcaccttcctgccttctaaaaaaggtggccggattcctccccagcccatggacagtgatccccaggactt

SEQ ID NO: 941788 - DNA, 606 bp, Homo sapiens
caacatttaaagatgtgaaattttaaaatgtcacaaaaaaacctctagatttttggcttctcttataaatccaaaggcctgccaccaaatgcccagtgccatggtgcaggggctgctgccccccttagcagaacatgtactctccagatggacacagatgccactacagtggtggactgtcacaacaggcaggacatggcaggacccacaacacatcaatccttctcccaggatcccactcagtgcctggcacacagcagggacttgcttattgtttgtggaataaggaataaatacacagcccttcacggtgcccaggatttcctgagtgctatgctgcttccctgagagactcccacagcagggacagaacaatgcccttccttcctggggtyctggtcccacagctgggcacacctgcagcaagacactggggtgagccttcaggctgcatccagatctccctattgttatttgatctttacatcagaagctgtgccacctagagcccaaccaaagtaagagcagtgatcctggcaccttcctgccttctaaaaaaggtggccggattcctccccagcccatggacagtgatccccaggactt

SEQ ID NO: 941789 - DNA, 530 bp, Homo sapiens
acattttcttccaagttgctgcttggagcactctcctcctttcatctgtgttaaagaggtacatgaacaactggtggcaatcagtccagttggggttatgggtctggataatagtttggagcaaatcaattatagcttgaggctttttggtataggatggggtattgtttttccaaatgaggagattggcagaggtgacgggttggtacacaaaggcacacctttctaccatgtgcccgtcctcatctatcccagtataccattgctctcttaagggcatttgtatcccagttctaggcctcaaacaggctgccaagggaagggtttctcccaaggtctcagatccttccttttctactctgggtggcctaggggtatgtaggccttgtggaagctygggcgcagtgggctcaggagtgggaggccttcctccctggtgaaagggtggggggcactggtgccatttcttgccatgaatcctgtgatgttgggtctgacaggactttaggagccaatccccctcggcaggt

SEQ ID NO: 941790 - DNA, 692 bp, Homo sapiens
tagggtataccccacagtgatgctgtgactccttcagactcacagatgtaccgccttgctggtcttggtggtcttggataagatcccgaagaattctctggattaccaggcatagactcttattctcatatcttggtttctctcaaacaaatggagtctctctgtgctgagctgacccaagctgggagagggatgacactagcacccctgtagccaccaccactgggactgcactaggtgagacctaaagccagcacagcactgggttttgccttagatctgctgtaaccactaccyggttaccacctgtgtgcactgaagttcctaatgctaaggtcctaagcaggtggcaaagcaaaccaggcttgtgtctttccctttagtgcagcaagttccccatggccctgggcaggttcagagataccatccaggagcaaggcctggagtgggataccatagaaatctacctgatgttctattctactgtggctaagctggcacacaagacacaaaacaaagtcctttatactcttccctccctttctgtaagcggaggagtctcttcccatggctaccactgccacaagcccaagatgagtattgccaggctatcgtttatatttgctcaaggcccaagggttcttcagtcagcttgtggtgaatgctgccaggcttgggactcacccttcagg

SEQ ID NO: 941791 - DNA, 479 bp, Homo sapiens
agaaaaaaaaacctctaatgctcaggccccacctcacatggattgggtcagaatctttggtatcttggcactgcctttttttttttttttttgagacggagtctcgctctgctgcccaggctggagtgcagtggtgcaatctcggctcactgcaagctccgcttcccgggttcacgccattctcctgcctcagcctcccgagtagctgggactacaggcgcccrccaccatgcccggctaattttttgtatttttagtagagatggggtttcaccgtgttaaccaggatgatctggatctcccgacctcctgatccacctgcctgggcctcccaaaatgctgggattacaggcgtgagccaccacacccggcctggcactggtatttttaaaaacctctccctgacccccagcaggcaattctactctgcagccacactgagatccactgggccaggtaaacttgcacatctatgactg

SEQ ID NO: 941792 - DNA, 576 bp, Homo sapiens
gcccagatacttcagcgtgtatttactaaaaacaaggatgttctcttcataaccacaccacagttatcaatgtcaagaaattcaacattgatactatagttttatttaaactatacctagttgtatgccatccatacctaattttgtcacttaacccaataacatccttgatagcattgtattttcctctcatgtattgaatccaattcaggatcacacatgacatttagttgtcatagttctttagtrtcttttgaccttcagccttttttttttcttttataacattgatatttttaagcatctataccttttctctttttcaaaataagaatgttcttcattttggatctgtctgatgattcctcattcggtttggttttgcatcccaagtcagaatagtacataaataatgtatccctctcagggtatcatatcaaaagacacactatatccatctgcccttagtggtgatgttaattttgattagccattccaggtattgtctgatattctcccctgtccctgtcagttactatctttctttcatttcgaggaatagaaaactatggggaa

SEQ ID NO: 941793 - DNA, 536 bp, Homo sapiens
taggaggagtttactatgcctatcacttagagaaggtggaagtatctgaactctgggaaattgtttgctgaaaatgaatttcaagttgtctgcctttcaatttaactattcagccacttggttttggttttgtttcatttttgataaagaaaaaagcagttgatggaagggcacaaactgacagttcttactgtattaaaaatcaagtcagccgggtgcgatggctcacgcctgtaattccagcactttaggaggctgaggtgggtggatcatgagatcacgagttcgagaccagcctggccaacatgacgaaaccccgtctctactaaaaatacaaaaattagccrgatgtggtggtgggtgcctgtaatcccagctactcaggaggctgaggcagaattgctcgaacccgggaggcggaggttgctgtgagccgagatcgcaccactgcactccagcctgggtgacaagaacaagactccttctcaaaaaacaaaaaacaaaaaacaaaatcaagtcttcgcagaaatagacaa

SEQ ID NO: 941794 - DNA, 845 bp, Homo sapiens
gtagatgctggtgtgatgcttcttgtacagcctgcagaaatgtgagccaaataaacctcttttcttcataaattacccagcctcaggtattcctttatggccacataaaaatggatgaaggcagaaaattggtactgaggggtggggtgttgctataaagagacctgaaaatgtggaagcagctttggaactgggtaatgggcagaggctagaagagtctgcaaggatcagaagacaacagaaagacttagggaaagtttgaaacttcttagagattggttaagtggttgtgaccaaaatgctgatagaaatacagacagtaaaggccatgctgataaggtctcagatggaagtggggaacttaggaattagagcaaaggtcatccttgttacaccctagcaaagaacttagctgcactgtgtccatcccctagggttttatggaaggccaaacaatactggtaccctayggtatctgctggaggaaatttctaagcagtaaagcattcaagaagtggtgtggctgcttttaacagcttataaccagatatgagagcaaagaaatgacaaaaagttggaatttataattaaaaaggacacagaacataaaattttagaaactcagcctaggcatgtggtagagaaggaaagaacattttcaagagaggaatctaggggtgctgtggagcaaccacttgctagagagattagcaaggataaatctttgaggtagctcctcgcatcacagacccagaggactaggaagacagaatggtttgggagcgacaaggctttaacacttcaggatgctgctctctgcatcccagcccctctggttccagcga

SEQ ID NO: 941795 - DNA, 568 bp, Homo sapiens
aacaaaagaatcagtctgtcctttggagctatgaagccaggcattgaattctcctctctagctatgaaagtcctatggcatcttcttccaatagaaggctgcggtgtctccattgaaaatctgttgtttagtgtggccaccttcatcaatgatcttagctagatctggataacttgctgtagcttctcccttagcacttgcttcttcatcttgtacttttatgttataaagatggcttctttccttaaacctcatgaaccaacctctactagcttcaccattttcttctgcagcttcctgacttctctcagccttcccagaaatgaagagagttagggcttgctctggattaggctttggcktaaagggaatgttgtggctggtttgatcttctatccagaccattcaaactttctccatatcagcaatatggccgctttactttcttatcgttggtatgttcattggaatagcacttttaatttcattcaagaagttttcctttgcattcacaacttggataacagtttggcacaagaggcctagcttgcagcttgccttcctcact

SEQ ID NO: 941796 - DNA, 714 bp, Homo sapiens
gtgccaatgtgctactaatggctgccagaattaaaatactttctccatgtctagaatatatttagacttctaaaatgtgaattagaaaaattacacaattgagaaaaaaatgctacgtttccccttctcttttctccctcctttcccatgttaataattaaagtatacaccataaagaagtctgactacaatgtagtcgattacaaagatttatgaacaagatagagattctgaagtaaatcagaaagttaaaaaattatcgattcccaggtaagatgaccaaataggaacagctccggtctgcagctcccagcaagaccaatgcakaaggtgggtgatttctgcatttccaattgaggtacccggttcatctcattgggatgggttagacagtgggtacagcccacagagggcaaggagaagcagggtggggcatcgctgcacccaggaagcgcagggggttagggaactccctcccctagccaagggaagctgtgagggaccctgccctgagcgactatgcactctggctcagatacaacacttttccccatggtcttcacaacccacagaccaggagattcccttgggtgcttacaccacaacagccctgggtttcaagcacaaaactgggtggtcatttgggcagacaccaagctagctgcaggagttttttttccataccccagtggcacctagaatgccagcgagaca

SEQ ID NO: 941797 - DNA, 796 bp, Homo sapiens
gtgcagctgcagtcccagctactcagaagactgaggcaggaggatcacctgagggcaggaggatcgcctgagcccaggagtccaaggctgcagcgagctatgatgatgccactgcactctagcctaggcgacagagcaagacgctgtcgaaagaaagagagagagagagacagagagacagagagagacagacttggtttctaaaaacccagtatctgttggtaggggaggaagagggaggcttgggggccacaaggagcaggcatggttcttaaggacaggatacctgcccactgagtcaggggctctggttagacctgcttcttggcaagaggaaagaagatcaggggatcctgagcctctggggtgctggggaacccccagaaaggacagatgctttgccaagcccaggtcctcctgaggctgcgtccacccccctcccrtgggggtctggggcacgtgggcagagatctgctcctctgtgctcaggtgcgaggccgggagaactttgagatcctgatgaagctgaaagagagcctggagctgatggagttggtgccgcagccactggtggactcctatcggcagcagcagcagctcctacagaggccgtgagtcagccctagcccaccatcagtgtggggaaggaggacatggcttaaccccccaggagaaggccaggaggaccagaaacccctccagaaggcatcatctgccagggacaggcagcagggtccagagcagagcccaccccacatctcctcctccaggaagccttctagcacttggggctgcc

SEQ ID NO: 941798 - DNA, 552 bp, Homo sapiens
cacctgaggtcaggagttcaagaccagcctggccaacatggtgaaaccccgtctctattaaaaatacaaaaattagctaggtgtggtggctagcgcctgtaatcctagctactcaggaggctaagacaggagaattgtttgaacgcgggaggtggagtttgcagtgagccaagactgcgccactgcactccagcctgggtggcagagtgagaccctgtctcaaaaaaaaattttaaaaaaacaaaataaccaatgttgatggaggcaactgtgtatatgcttttgccttttctctggtttgttgcgtcaccttctaaacttagcactaagtgtcagcagagcatggcctagttgtggtgcttctcggaacacacgcagaagggcctgaggatgacagaacagagtttaaatgaggarctgctcatgtctgcttcttcagattgtttcctagttctttgcctctgtttctcggtacctctggctttccagtgctccacactagcaatagcaaaggccctgctagcatctacaccccaagcttcacctagcctt

SEQ ID NO: 941799 - DNA, 636 bp, Homo sapiens
cactctttgggtccacactgcctttatgagctgtgacactcactgagaaggtctgcagcttcactcctgaagccaacgagaccacaaacccacggggaggaatgaacaactccagacacgccaccttaagagctgtaacactcaccgcgaaggtccgcagcttcactcttgagccagagataccacgaaccccctcagaaggaagaaactctgaacacrtccaaacaccagaaggaacaaactccggacacgccgcctttaagaactgtaacactcatcttgagggtccgcggcttcattcttgaagtcagtgagaccaagaacccaccaattccggacacactatcttgatggatatggagtcatagcgtttgaaaagaaaaaaaatattgagaactgagaaaaggcactttgggaggtcgaggtgggcggatcacctgaggtcaggagttcaagaccagcctggacaacacggtaaaaccccgtctctattaaaaatacaaaaattagatgggcgtggtggcaggtgactgtaatcccagctacttgggaggctgagacaggaggatggctgaaacccaggaggcagaggttgcagtgagccgagaccatgccattgctctgcagcctggcaac

SEQ ID NO: 941800 - DNA, 637 bp, Homo sapiens
aggatctgaagtgacaggaattaaaggaattataaaagtatttgtgatatagaggataaaggaaagagagccaaagtatttatatttttgagtgagacttggtagaggactctaggaaaatgagatcagaatggaataaaagctaactaaagctattacaaaattaaaacccaaaaaggcccaatctggaaaagacctaatccaaagaacaaaagcagatttgaattctccatgcatgtttcctgttataaaataaattaggaatgtgagtcaaacgttgtctwcaaatatttatcccctcactcactaaaaatgctacttaaatgacagaaaaggaataagacaaatccacaaggttaatagaatggaagaagagacatcaggcaaggaaactgatggatgagtggtaagtgatttcacaaagaaatgataattgtcagtggcagaagactagaagaggtaaaaatctaataagcttgacaaatggagatatccagattcctctaaagccagaggtgcagaataaggctggaaataggattggttttggaaatctttaaaactagtgtgggagaaagggcagatggcagcagtgccatagttttcaatctccaaatcaccatataatagcaactgg

SEQ ID NO: 941801 - DNA, 627 bp, Homo sapiens
acctctcattaggatatacagaaactgaaatacacattgtttcatataatgctagtgaaaatgtaaaatgatacagccattatggcagcaatttggcagctttttttttttttaatagttggctgagtgcaatggctcatacctatattcctagcacttttaggaggccaaggtgcgtggatttcttgaggccagaagttcgagaccagcctggtcaacatggtgaaaccccatctctactaaaagcacaaaaattagccagcccatggtggtgcacaactgtaattccagctactctcgaggctgaggcatgagaatcacttgaaccyggggggcggaggttgcagtgatgatgtcactacactccagcctgggtgacagagcaagaccctgtctcaaattaaaaaaaaaaaaaaacgaacaaacaaaaacaacaacaaaaaatgttaaacatgagtttaccatataacccagcaactctactcacagatatcatgaaaacatgatttgcctatatgaaaacatataggaaaacatgtgtccctgaaagacttgtttgggaatgcacgtggcagcattattgatagtatccaaggaagtggaaacacttcaaatgttcacgtagtg

SEQ ID NO: 941802 - DNA, 729 bp, Homo sapiens
ttggacctcaagtttagatttgtttttatccattgtgctctaagcataagtaaatcagttaaatcaatacatttcctgattgtattgtgtctggaattggttccctctggtgggttcttggtctcactgacttcaagaatgaagccgcggaccctcgtggtgagtgttatagttcttaaagatggtgtgtctggagtttgttccttcaggtgttcagatgtgtccagagtttcttccctctggtgggttcgtggtcttgctgacttcaggagtgaagccacagacctttgcagtagtgttacagctcttaaaaggtggcgcatctggagttgttcattcctcccggtgggttcgtggtctcgctgacttaaggagtgaagctgcagactttcccagtgagtgtcatagctcacaaaggtagtgcggacccaaagagtgagcagcagcaagatttactactaagagcaraagaacaaacctcccacagcacagaagcagttgctgctgccgcctctggtggccaccttttattcccttatttggccttgcccacctcctgctgattggtccattttacagaatgctgattggcccattttacagagtgctgattggtccatttttacagagtgctgactcttgcgtttacaaacctttagctagacacagagcgctgactggtgtgtttacaatcctttagatagtcagaaaagttgtgcccagtccccg

SEQ ID NO: 941803 - DNA, 545 bp, Homo sapiens
tcactcctgtaatcctagcactttgggaggccgaggtgggtgaatcacttgaggtcaggaatttgagaccagcctggtcaacatggtgaaaccccatctctaccaaaaatataaaaaaattagccaggtgtggtggcgcacacctgtaaccccagctacttgggagactgaggcatgagaatccaggaggtggaggttgcagtgagccaagatcatgccaccgcactctagcctgggtgacagaggaagaccttgtctaaaaatatatatataaatcaaaatagattaaaatcttaaatctaagacctcaaactatgaagctactaaaggaaaacactgggaaaaatctttaggacrttggtcttggcaaaaatttcttgagcaaaaccccccaacaaacagacaaccaaagcaaaaatggacaaataggatcacatcaagttaaaaaacttctgcacagcaaaggataaaatcaacaaagagacaacccactgaatgggagaaaatatttgcaaactacccatctgacaagggattcataacca

SEQ ID NO: 941804 - DNA, 701 bp, Homo sapiens
aatgactcattccctgatgtgagactttgtaacctcacacatcagttatgtggaaaatactggctcactgaggaatgcaggtcttcagagtgttgacacatttcattatatgatttttttttttttagacggagtctagctctgtcgcccaagctggtgtgcagtggtgaaatgttggctcactgcaacttctgcctcccgggttcaagtgattctcccgcctcagcctcccaagtagctgggattataggcacacgccaccatgcccggttaatttttgtatttttagtagagatggggtttcactatgttgtccaggctggtcttgaactcctgacctcatgatccacccacctcagcctcccaaagtgctaggattacaggcatgagccaccatacccagcctatatgatgttttttaaaaatcacagtcattagtatcattactggtctcatcagaaaagctgttaagtattaggatgccgtcaagkttgcagtggcagatataagttttccaaaagtctgattttcactggaaagctcagattttatcattggcaacaaatattgtcaggtttttttcccctggaagtgacaggcccactttgtccacttttgagaaaatagctgccaaacactcaaatctgaaaaatcacaatttgtctgtcagtcactctttcaggtaaagatggtgttccctg

SEQ ID NO: 941805 - DNA, 592 bp, Homo sapiens
gatcttcttttgtctgtgtatttacaagtgttttttgtgtgtgatgtttatataaagaatttctaattaatcagcttaaagaaaatgaaagcacttaaatattttgacagaaaaaatctctaatgctgtttagtttatgtgactttagtaatttttttgtaaataaaatgttaaagattattggtaaaataaaaatatcttcaaaatatagacatttggtctaaattaagtcagagaataaatttgctaaatgctttaatgtcataaactgcttctttgacttttgaaaattgttcaatttatctgctttggaaccattagtttctaggttgggcctgggtacgtgtggagttatccatgcctcctagctatgctggaaagagtcagaattatctgcaattctgtcctgtatcctagactctgaacctggtacataattwaaatagcttacactaaaaggaaaaattgtgtttttttgataaaaaggcatggtaatattattttttttaaaaactaattttgtctaatttagaaagtttaagaattatttttagttgaaaaataaaatacaaatgaaagtttaagcaagtta

SEQ ID NO: 941806 - DNA, 721 bp, Homo sapiens
ggcgggacattaaaacaacacccctggccttctggtagctcagtgggagggttgagaagctgcctcctgctactgcctttactcctgctctgcctggtccctcacggcagtcagaggggtcttggtaaatcaatttatgccacaccacatcactctttgggtttcagaatcaaccaccaagtccctcccatggccacamgcccctgagtgacctggccttgacactctctcagttcttctctctcaccctctccctggccatttctattcagcccctctgacatcctggctcttcctctaagactctgagcatttgcacttactgttccctctgcctggagcactcatcccctcgatatccccatgattctctctgccactgcattcagtcctctcagaagtgactttcttggccaccttatctgaaatcaaacttcaatggcatcccacattctctggttcccagactgtaactaagagttacttatccctgtctttgatcataaactccatgagggctggactgttccatctgttccctgttgtagcctctgtacccacaacagcacacctgggggttgatatggtttcgctgtggccccacccaaatatcatcttgaattgtagttcccataatccctctgtgttgtgggagggacctggtggaagataattgaatcatgggcgcagttacctccatgttgcgctcgtgatagtgaat

SEQ ID NO: 941807 - DNA, 715 bp, Homo sapiens
aggccactggccaccgccccactgaagctctgtgtgcttcacttctcctccttcttcaggctggataattgtattgatccatcttcaaatgcgctgaccctttctcctgcctcagcaatccacttgtgaacccatccagtgagttttccgttagagatactgtacttttcagttttatcatttctatttggttatatttttagagtatcaaatttttttttctgctgtgattccccatctatccatctatccatctattctgacccttgaacatactataaagcattatgytaaaggccttgctgctagttccaatgtctgggtgatctcagggttcctgggttcctttctctgggcagtttttttcttgattgtggatcacattttctctctttttgacatgtctaataatttttgtgtgtatactgatcactgtgaatgcaaccttgtagagaccctggttctgttatctttccctgagggtgtttatttttcattacagcagggagttcacttggctggaggcatatctcaatgtgtttcccctggaatctctgcttagttctttccgtctgctgactgttgctttcactgggtccttcggtgcctctctgtgcatgcacatttccggggcagccaaggatctgggcagagcttacatgcgtactggggagtccctatctgtggctatgtattttctagaatttatcccctc

SEQ ID NO: 941808 - DNA, 482 bp, Homo sapiens
atgctccagaaacttgaaaataccaatgggaacagacaaaagaaaagtctgctctctctaggcacagaatcaggaaagtggcaacctagcaagatagacaacaattgtcctgctcctgccaaacaccacataaaatgctgcagccctaacctactcctgtcattaaaggtcaagtagggagtctgggtttctgcctttatcaggctatcctgaagtgctccaaaccaccctattgtggtggtatgatagaaagccaagtggggagcctggactttcatccccaccragtggtaatgattacagccatctacactgtgacaaagaacttctactggaaagtcagaaagtcaggacttttctcacaagctcaaaccccagcagtatcagtggagatatctgcagagcattaatgaggcatccatcccccattatcaggatggtatcagcaaaaacctcatgggaaaactgacctaacacccatc

SEQ ID NO: 941809 - DNA, 574 bp, Homo sapiens
caaagagccaaatgttaattgccaagacaatgaggaaaatgtctccagggcatgtcagaggtttttcacagcagtctctcctatcacaggcctataggcctaggagaaaaaaatgattttctgggctgggtccagggccttgccactttgtgcagtcttgagacttggttccttatgtcacrgacatagcaaaaggggccaacatacagctcagactgtttgcacccttcagagggttggtagcttcaagccttggcagcttacaggtggtgttgggcctgtgggttcacagagtcaagaactgaggtttgggaacctctgtctagatttcagaggatgtatggaaatgcctggatgtccaggttagaggtatgctgcagggatggagccattatggggaccctctgttaaggcagtgtggaagggaaatgtggggtgggagctcccacacagagtccctactggaaaactgcctagtgaatctgtgagaaaagggatacagtcctccagaccccagaatggtagacccaccaacagcttgccctctgcacatggaaaagccacagacacttaa

SEQ ID NO: 941810 - DNA, 693 bp, Homo sapiens
aagcatgtagtcaggtaaaggaagaacagaagggggttaaaattgattgatctaaaaaaattaagtcgggccaggcaaggtggcttacgcctgtaatcccagcactttgggaggctgaggtgggtggatcacctgaggtcaggagtttgagaccagcctggccaacatagcgaaaccccatctctactaaaaataacaaaaattagctgggcatggtggtgggcgcctgtaatcccagcgactggggaggctgaggcaggagaatcgcttgaacccaggaggtggaagttgcagtgagccgagatcgcgccattgcactccagcctgggcaacaagagcaaaactccgtctcaaaataataataataataataataawaataaagtcatagtagcaaaaaaggagtaatataggccccaaacaagaacttcagagaaatacacgtcaaaagagggaaagagaaagagaaatgaacctagcccaaatgaatgcaacaataagattacctctctcaaaacgacccatcttcagcccattgagtaggtctgtgagaggaggtataaatccttggagttctttacactgtaggaaaataggacaaaggctgtaagaagacaaaaaactgcccacaccagcagtggctcttccttcacctccaaatctgggagtcaatactgtcctcacagggtcctt

SEQ ID NO: 941811 - DNA, 638 bp, Homo sapiens
aactcccggtcccggtgtcgcccagccacctcctggctctgccgttctgcctgcagttccttaagctcctcctgtgtccggagcagctcctggaaggaaacgggaatggtgatggggcacccagagccagactaagatacctgaatgtggagaagctgaaactctcatacactgccaagggaataaaaactgatgtggccactttggaaagtagttyggcagtttctcaaaaagttaaacacagatttaccatttatatcaccagcaattccactcttaggtaacccaagagaaccgaaaatatgtgttcacaaaaaaacttatacgcgaatgttcatagtagcattattcattatagcccagatggatacacaacccagatgtccacgaattgatgactggactaaacacggtatacccacagagtggaatgttattcagccataaaaaggaatgaagtactcatacttgctaccacatggacaaaccttgaaaacactatgctaggtgaaagaagccagacccttaaggcccatatattataggattcaattatattaaatatccagaataggtaaatccagagacaaaaagtagattagtggttgccattgggtggggggaattattgctaatgg

SEQ ID NO: 941812 - DNA, 646 bp, Homo sapiens
catgtggcaaggaactgagggcagcctctgaccaacagtcagagagaagctgaggggtcctcagttctataactggagaggaactgaaacctcccaatagccatgtaagtgaaggagtgcagggaatttcaccccaaaatatggctccctggtataatgagtattttgaattaaagttcttaagagatcaacagatgctgggaatgactttttccttatccacatgaagactagacagacccaccaagaagaacaattagtttttcttcctctccctgttatcacactagctattgcagagaaaaagaccaagaagtaaccagacctgattataccccttcacgaaatatctmtccctcaggctcattccatttccaaagagaatcatttataagttaatctctgttcccctatccattcatcctcccaagtattctttcattctcccttataatcatttattgccccttaacagaattacctatattcccatcactctcctcccctctaaaataaggctatataaatatttgaaccccattgggatgttgagtaatcattcttgattctccctcatggtatgtgaataaatttgtgtgccatttctcctattaatctgcctttgtcaattgatttttttcagcaa

SEQ ID NO: 941813 - DNA, 528 bp, Homo sapiens
gtttattatttttaagcatacaatttcagcagttttcactgtttgcaaagttctgcaagtgtcataattatttaattccagaacatttttatcatcctctaaagaaacctcatactgataagcagccactccccactgccctctctccctacactcagccctaggcaatcacaaatttactttcggtatcgaaagatttgcttattctgaacatttcataaaaattgaatcatacaatatttggttttctgtgttttgccaattttacttactataatgtttcaaggatcatttatgttgcatcatatgtcagtgcttaatttattttatggttatatcatactttrttcatttgttcattgttcatggatacttggcttgttttcatttttagctattatagataatgctgttataaacacttgtgtttaagatttttgtgtacttgtgttttcaattcccttgggtaaacctagcaggaaaattacagggtaaactaattttttgaagaattgccatgctgttttc

SEQ ID NO: 941814 - DNA, 741 bp, Homo sapiens
ctccagccatggctaaaagggaccaaggtacagctcaggccatagcttcagagggtgcaagccctattccttggcagcttccatatggtgttggtcctgcaggtgtgcagaagacaagaactgaggtttggaaacctctgcctagatttcagaggatgtacggaaatgcctggatgtccaggcagaagtttgctacaggggcggagccctcatagagaacctctgctaagagagatgtgtaagggaaatttgggttcggagcccacacagtcttcactggggcactgcctagtggagctgtgagaagagggccaccatcctccagacctaagaatggtagatccaccaaaagcttgcactgtragcccagaaaagccacagacactcaatgccagcccatgaaaccagccataagggaggctgtaccctgcaaagccacaagggcagagctgcccaaggctgtaggagcccacctcttgcaccagcatgacctggatgtgagacatggagtcaaaggagattattttggagctttaatatttaattattgcttcagtggatttcagacttgcaaggggcctgtagcccctttgttttggccaatttctcccatttgaaatgggtgtatttacccaatgcttgtacgtctattgtacctaggagataactaacttgctttggattttacaggctcataggtgaaagggacttgctttgtcacatatgagactttggacttgg

SEQ ID NO: 941815 - DNA, 632 bp, Homo sapiens
tcccactaacagaaaaagttaggcacgcagaaacattaaaagatgaggaggccgggcacggtggctcacgcctgtaatcccagcactttgggaggcccaggcgggtggatcacgaggtcaggcgatcgagaccatcctggctaacatggtgaaaccctgtctctactaaaaatacaaaaaaattagtcgggcgtgagcgggcgcctgtagtcccagctactcaggaggctgaggcaggagaatggtgtgaacctgggaggcggagcttgcagtgagccgagatcgcaccactgcactccagcctgggcgacagagcgagactccatctcaaaaaaaaaaaaaaaaaaaggtgaggagagcaaaatttattaaaagaaagctctcagtgaaaaaaaggagtcctgccaacagggtctcacctcccagattgaataccaggtcaccacacacacktgccgaagagaccaggctccttcctggtgcacaaggcaccatcttcccagtgtctccaccccactctcccagtgtgcaggtgggtctcccagtgttcaggtgggtcccccagttcgttgtgggtatgcccaaacaaggccctgggtgggttccctcgtctgtacaaaagcatctgatgc

SEQ ID NO: 941816 - DNA, 647 bp, Homo sapiens
aagcggctgctgcaagtggtcggggatgcaagatgctgagcatcggaatacaagtgactgaacgttggggatacaagcagatgagcattaaagcctacagagagatgcagctaacttcagatggtgtggcttcaggggaagatcaccttcttgctgcaccatcccctttctttttttttttttttttttggagacggagtctcactctgttgcccaggctggagtgcagtggcgtgatctcagctcactgctcactgcaagctctgcctcctgggcttaagagattctcctgcctcagcctcccaagtagcttggattacagtcacccgccaccacgcccagctaatttttttgcawttttagttgagatggggtttcaccatgttggccaggctggtctcgagctcctgacctcaggtgatccatctgcctcagcctcctacagcctcccaaagtgctgggattacaggcttgagccactgcgcctggcagcaccatcccctttctaactcccctttccactgagagccacatttatcacccaataaaatccttcacttatgctactctttaaatagctaatgtgacctggttcttcctttacaccgaataagaacttgagtgtcaaaaagggcaggtgcgggaag

SEQ ID NO: 941817 - DNA, 467 bp, Homo sapiens
aaagtctgttataagttggaatgctttcatgagagagtgtagaaggcagtgggactcctcatagctgagttgtccttcttcartgatgggtacaacacagaggttacaatcattggccaaggttgacaatgaacaggccaaaatgcttgatgtgctagacagtcaaacttcatgatcaaaatcaaatcagtgtccttctcaatgtcagaaggtgaagacttcatcagtacttgaagagtttgagaagctcacgatcagatgatttactcagggacaagaagtaagccatgaatcctaagtcccgagatggttggtttgaaagcccgccaactgtgatttgcaggtttttgtttttgtttttgtttttgctttttgagatggagtttcactctgtcacccaggctggagtgcaatggcgcagtcttggctcattgcaatgtctgcctccctggttcaagcaattctcc

SEQ ID NO: 941818 - DNA, 735 bp, Homo sapiens
atggtactctctgctggagcagatttgctcaaattagggctgagctgatgaacagagtgagggacttaaggcaccccaagaggatcttgttctgtactgactactgccctgactgtggcaacaggtcattttatgacctggaggcagatcaatactgctgttgaatgcctgcctatttggatgggtatgtcaaacgctttcttctggacacttggaaactaaaacctaggtcttaggtacatcctaaagggagcacagaacccatcatttcacacataggctctgaaagtgggaaaggaaagctgatcaagcaggggccggacttgggggaaatgttgccatggattcgatgggactttggggacctgtrtcctgtagattcgaaaatgggaatctgaatgtctagagtggaattcaggcttgagaatacatgagggagttactcttgcatggatggttgtaaagaaacaatcagaaataaaggaaaactgagcagaatctgtctggtgccctctattattaagtaacctgttttccagtttaagcctcaggaatcttcagttattgatggaaaaaacaaaaggcactgactgagttgtccaatcaataagatgcagcccaagaaaatcaaggcatttaaatgaaatttggttattgtaatcactttcctcccattcttttattggagacagagtttcactcttgttgcccagcttggagtttagagtgcaatgg

SEQ ID NO: 941819 - DNA, 542 bp, Homo sapiens
ttgtgtattagctggagactctgggcagcatcaacccttgcttgttctcctgatgaccagcagcccttcttgaattaaactggttgtagccagtaaagacagccacattccctttaagtaaaatactaaaactatacaggcatgtaacactttttaaatatttccatctgacattttaaaagttacatctttttggggagctaggtcagattgatgagagattttctcataacacmtcccctctctccctatgaaggaagagactagtgcagcgtgttctggaatctgacagcatcaaagggtggataacgatcaagggcctgtgggtgatgagtgaccttccctgtgttgaggaagcctgcataatgggcacccaagtgaaggatcctgctgagtactcaggggctggtgttgctgtcagggatgttagccaagagcctcagcttcctgtaaaatgaggatgatgatgtccaacagcttatgggaccttggtaggatccaatgagatggttcatgtttagggcttggcatggggtctggca

SEQ ID NO: 941820 - DNA, 738 bp, Homo sapiens
caaaagggatgggtaatgtagaaatctggatcaatattctagctctgggcaattatcctgcaagtcctgctaggtgatttgaatacataggatgcccatcacttggaggtttcctttttggaaaagtaagaccaagaaagctaatcaaagccaaggaccatgcacccaaaccctcgcaagcataactatagccaccagttatctggttgtgtcacaagacatctttttctcycccttgttggaggaggactcaattccacagtttcaccttagcatttggcttatgataaggagtccatgcacctcccccaccccccaccgagacacatttttgtcccaaactcaatttcaagctttgggtcaaagtcctaagaaggaaaactggatctgagggatccagagacaaatgacaacagaggttaaaaggcacggtgcaggtgagcatggctcattcctgccaattaagccaacccaagcttcttgtttcatggataaacccacggcataaatatccatggcataaatgaggtctagggaactccaaggctactgacagtaggagatagaggcatagatgagagcggataattcctattctctaggccctccctgcttcatgggtgcaagccactttggcactcatggcggcacctgccaaggtcaccgggactcggggatgcaaggatggaagagggaaagagaacactctttcctctctccctcatgtaccgtgggtat

SEQ ID NO: 941821 - DNA, 555 bp, Homo sapiens
cagacaaatgggtactctgaatagttaggcaaatcttccctacagttatagagaaaactgaaaagttaggcacaccttccctatggttatagataataactatacaatatgcagaagtagtgacaagcatggattctagacccagattacacaggttcaaatcctggttttgccacttaccagcaatggaatttggggacaaactactcacccatttgcrctttcattttctcatctgtagaataaggataataatgatgcctgcctcgtagggtttttaatgaggataaaaatgtataaatatttataatgtgtctagaacagtgtctcgcaaataagtactatgtaaaatattcttctcatgttcatttacaatcatggaagacaactagattctctctcaggatgcaagctcactatgctagcttccagacatgggttttattccatcttttccccaacccctgttgctcttggtggcacagttagaattttagactggtagaatcatcagctagccccacctcgagcccaaggcagaaaccccttctgcat

SEQ ID NO: 941822 - DNA, 587 bp, Homo sapiens
aatctgagaacagacagactgccttctcaagtgggtccctgacccccaagtagcttaactgggaggtaccctctagtaggggcagactgacacctcacatggccagggactcctctgagacaaaacttccagaggaaggatcaggcagcaacatttgctgctcaccaatattcgctgttctgcagcmtccgctgctgataacccaggcaaacacggtctggagtggacctccagcaaactccaacagacctgcagttgagggtcctgactgttagaaggaaaactaacaaacagaaaggacatccacaccaaaaccccgtctgtatatcaccatcatcaaagaccaaaggtagataaaaccacaaagatggggaaaaaacagagcagaaaaactggaaactctaaaaatcagagcgcctctccccctccaaaggaatgcagctctgcaccagcaatggaacaaggctggaaggagaatgactttgatgagttaagagaagaaggcttcagatgatcaaactactccgagctaaaggaggaagttcgaacccatggcaaagaagttaaaaaccttgaaaaaaattaga

SEQ ID NO: 941823 - DNA, 587 bp, Homo sapiens
aatctgagaacagacagactgccttctcaagtgggtccctgacccccaagtagcttaactgggaggtaccctctagtaggggcagactgacacctcacatggccagggactcctctgagacaaaacttccagaggaaggatcaggcagcaacatttgctgctcaccaatattcgctgttctgcagcctccgctgctgataacccaggcaaacacrgtctggagtggacctccagcaaactccaacagacctgcagttgagggtcctgactgttagaaggaaaactaacaaacagaaaggacatccacaccaaaaccccgtctgtatatcaccatcatcaaagaccaaaggtagataaaaccacaaagatggggaaaaaacagagcagaaaaactggaaactctaaaaatcagagcgcctctccccctccaaaggaatgcagctctgcaccagcaatggaacaaggctggaaggagaatgactttgatgagttaagagaagaaggcttcagatgatcaaactactccgagctaaaggaggaagttcgaacccatggcaaagaagttaaaaaccttgaaaaaaattaga

SEQ ID NO: 941824 - DNA, 708 bp, Homo sapiens
caagttcaaagttctacaaatctctagggcaggggcaaaatgctgccagtctctttgctaaaacatgacaagagtcacctttgttccagcttccaacaagttcctcatctccatctgagatcacctccatctgaattttattgtcaatatcactgtcaacattttgggtaaatccattcaacgattctctagcaagttccaaactttcccacattttcctgtctttttctaagcccttcaaactgttccaacctctggctgttatccagttccaaagtcacattmacattttcaggtatcttttcagcaatgccccactctactgttaccaatttctgtattagagttctgttagaggaacagaactaataggagatctctctctctctctctctctctctctctctctctctctctctctctctctctctctctatatatatatatatatatatatatatacttataataagcatatatataaactctaataaacacactctctctttctctctctctctgtctctctatatatatatagtttattaagtattaacttacatgatcacaaggtcccacataggctgtctgcatgctgacgagcaaggagagaagacccaaaactgaagaacctgcagtcggatgttctagggcaagaggcatccagcacgggagaaagatgtgggctggtaggttaggcccatctgt

SEQ ID NO: 941825 - DNA, 708 bp, Homo sapiens
caagttcaaagttctacaaatctctagggcaggggcaaaatgctgccagtctctttgctaaaacatgacaagagtcacctttgttccagcttccaacaagttcctcatctccatctgagatcacctccatctgaattttattgtcaatatcactgtcaacattttgggtaaatccattcaacgattctctagcaagttccaaactttcccacattttcctgtctttttctaagcccttcaaactgttccaacctctggctgttatccagttccaaagtcacattcayattttcaggtatcttttcagcaatgccccactctactgttaccaatttctgtattagagttctgttagaggaacagaactaataggagatctctctctctctctctctctctctctctctctctctctctctctctctctctctctctatatatatatatatatatatatatatacttataataagcatatatataaactctaataaacacactctctctttctctctctctctgtctctctatatatatatagtttattaagtattaacttacatgatcacaaggtcccacataggctgtctgcatgctgacgagcaaggagagaagacccaaaactgaagaacctgcagtcggatgttctagggcaagaggcatccagcacgggagaaagatgtgggctggtaggttaggcccatctgt

SEQ ID NO: 941826 - DNA, 628 bp, Homo sapiens
tataaggttgaggttcaatatttttgttgataaatgtccagttccctagcactaattgtggaaaaagctatcttctctccattgaatcacttttgcaccattgtaaaaactaaccgagcatatttgtgtgggtctgtttctgggttctatgcctgttaatatgatggattataatgatagattttcaaatattgaaccccttgcatccttggcctaaaccccacttagtcatggtgtatacttctttgtatatttgctgaattctgtttgtaatattttgttaaagatttttgcaccctatatttatgagactcttgatctgaagtttttttatttgatactgcctttgtatgcattggtataaggataatactagcttcataaaatgaattgagaagtgatttctcctcttttattttctgtaagagattgcaaaattggtacttattgtccaaacgtttggtagaattttccrgtaaaatcatttaagccaggagacttctttggggggaattattaacttacaaattcaattttcttaatgatgatagggccattccaattatttattttgtattgggtcaggcgtggcagcttcttatttttgaagaatcgatctattttatct

SEQ ID NO: 941827 - DNA, 563 bp, Homo sapiens
tgggcaaaggctcacagataataaagcagtaaagtcaagacactggacatcttcataaggcagaaaaacaagtatattgagtataaaacaggcagagagctagaagcaaaaagatgaagaattgagtgatgtttgaatttaagatttttaaggtactacagttctgggtgggctttgatcatgggtggctaaaatggagtgaaagtaaagttgaaagtatagttgaggaggtcaaataatttaagttaggtgctcagagtgtttctacttccagtaagatgragtagacataattttccctagtcctcttccaaagtacaactaaaaaaccatatatatatcatacatatatatacaccatatatatctatatatacatcatatctatatctatctatctatatctatatctatatctatatctatatctatatctatatctatatataaaagactgaaatgagaaaacagaaagctgaccagataggcatcttgagactggagaaatgaaatggtagtgaattccctggattttctttttgtctcacatatggcagacttgg

SEQ ID NO: 941828 - DNA, 607 bp, Homo sapiens
tgcccatcatgtggctcacattttttgccactctctgcatgtctgtgaatgaccatgaaaaaaaacatggtgagtatagattttaggcttacaaataaactgcagcaggtaggcaaagtcataaatagggaattgcaaataatgaggatccactcattattatatagtgtcatgaagcagtagctgctacaaagaaaattaaagcagagaaagtggatagagcatgtcagtggtactttttttattgtacattgacaatttgtacttgcataagtttatggggtacaamgtgatattatgatccgtgaacacaatgtggaagaattaaatcaagctaattttcatacagtccagcggcatcgtttttaaacaagccagaggagacttctctgaggagctatcatttgagcagaaacctgaaggaaatgaaagggcaggtgatgtggacatctgaagaagtcacctaggatggaaggatgggaaggatacagacccacagcgtcttgaggaacagtatgggccagtgtggctggagcacagcgagcaggagggaagtaacagaggttaggttagagagaaagctggggacaagatcacgtcaaaggca

SEQ ID NO: 941829 - DNA, 755 bp, Homo sapiens
cattttaattcttctcttaaggcagaaagttgtgctattttttaaaataaaaatgccaagtacttcttataataaatgatcatcatgaaatgtgaaaaaattaaaagcttaataaaatgataaaaggatttttctctctgtcactttgcaagccagggacccccggccggtgacaccatgcctgggcctcgcttggccatgctacctgctgcaggagactgcccactcatttggcccaccccagttgagtctggcttgcccactgcttcctgagttctcttctagtgtccaagaagaatgaggatgctgacaatcgaagagtatacaaggtgagaaacagctttcagcaggaaggggatgtgggagtggtcccactacacaaaggcaggaaaagttccctaatatggctgagcctggggcccttatgggctcagaatagggagtgcatgctgattggtttgtgagtacmcaaaaacggttaaagggaagacaccactcaaaggtgggcatgatagtgtagaaaaccaattaggaaagtgtaggtatatgtaaaataggtgaagggtggggattgatcagaggaaagtgcaccaaatgagaagacaggtcctcagtgtggtccaaggatttacccaggactgtcttcggcttgaaggtggggtttcactggggacccttatctgcctagacatttggctgcctccttcctctatcaaaaggacagtactgtatcaaatatatgtttgacaaaggaa

SEQ ID NO: 941830 - DNA, 579 bp, Homo sapiens
gagatgtggttctggtgattgacctatgactggcttcatgtctataaagttaagaaaaaaaaagctaaaccacaaatgtagcttttagagaacttgaaacaagaagtcatttgcagacatcagcaggaatggtggagtacaaatttgcaaaatgtcgcttctctatagaaacaatgagaacactggaagaattgtcaatgccaactttttcaaaactctagtaacaactaaaggcttgtaacaaagaagtatttatttaaaacaaaatgctgaatcttgttaagaatatttaactcacttttttttcatctgtcttttcacagctttgcrgtaacactgaaaaacagtggctactaaatcatggtgaaaaacagcagccactggaggtggcaaaacaggtttggagctctccaaaatcattattttcagaaaattgtcattatttgacttgtctggcagttttctcaaaatccccctcatccagcttttctttatttgacctaaatgaaagctcagtcagggcaaacagcctttcctctgaaggcatttgtcaaaaacaatcagcagcaattgcttaat

SEQ ID NO: 941831 - DNA, 698 bp, Homo sapiens
ctctgccacatgcccagacagatctccaggcatttggagcacccactcaccgggaccagtagcctgagctaacccaccctgtctttgtggagactgtggtgcaggggtccctctgttccacactcacatagatctccaggcaattggagcatcagctcacctgaattagcaaccagagccagcccaatctttctgtgtagagactgtgttgaagcagagctgccttctccacctcatgcccaaatatccaggcagttggagcacccattcactcagattaccagcctgaaccaccacacactttctcaagatattgtggtatagtggggccctcagcactccatgcccaggcaaaaaattccaggcacctggagcacccactcttctgaactgggaatttagactgctccccctacccatgcagagacttagggctaaagagatctcccagcttcatgtctaggcacacctcaaagcacttggtggccacccactggattctstctcagcactggagcttgtggctaacatcacaggacctgcaggtggaactgccctgtctggccctgctcgtcttaagcctcacacccctggggctgagcaggtagctcagaccactgtgtgctccatagatcaacccattgtctgaggtaacatagagcttcccctgtaaagagggatcaattatatacccagcc

SEQ ID NO: 941832 - DNA, 599 bp, Homo sapiens
agtctgtctctgctgtgcccagggtagagcccgggggctgtgagtatgtgtggctcccctgcccgtcatcgctctggctcaagctcatgctggaagggacgcttcctctcccgacagtgcttcttgtgggcaggccagtccttctgctggcactgggagccgcagtaccgggccacctggcagcgcccacagatgttgaactcccggagctgaaatacagaacacctgtggcttcaccatcatgcctgggacgcagtgtggggcaaaggctgcgtcttacggacaatctgacggacccagcaaaacaccacgtaccaagrctggagggcctgggccctggtcaggccagcacaagggcaaagggagaccactctggtggaaaagcccaagaggtgctaagcggtctctggggaatgggaccccgcggtggagggcaagatcccaaaccaaggctgggctacagggtagaggtgccagggacgcgaccgcactgcagcacacccacctgcttctcaatcactgtgcagggagggtagtggcactcatagtaggtgcaagagttctcctcctcttccactacatccccgttggcattataa

SEQ ID NO: 941833 - DNA, 765 bp, Homo sapiens
aaggcaaggtgtagaggtgtgtattagtccgttctcaagctgctaataaagacatacccaaggctggatattttataaaggaaagaggtttaatggactcatagttccgcatggctggggaggcctcacaatcacggcggaaggcaaaggagaagcaaaggcacatcctacatggcaacaggcaagagagtatgttcaggggagctcccctttattaaaccatcagatctcatgagacttattcactatcacgagaacagcacggaaaaaacccactcccacgattcaatgacctcccaccggatccctcccaccacatgtggggattattacaattcaagrtgagatttgcatggggacacagaaccaaaccatatcaaggtttcttaccactagggaatgtatcttagttgtgacaccaacgcatgttaccagcagcaaatttgtacagatctgctgcaaactcaatccttgcctctgcagaggaaagcatttggcaggggcagaagtagttttaaggcagagcaagagacagaggcaagcttaagagcaggagtgagagtttattaaaaagtgttacagcaggagcaaaaggaagcaaagcacatttggaagagggagaagtgggcaacttgggagatgcaagtgccgtgttcagcccttgacttgggggtttatacactggcgtggttccagggttttcttttctcacttgatttttcccctccccttgactgctgcatgtgcagtggtggtcagcacttg

SEQ ID NO: 941834 - DNA, 750 bp, Homo sapiens
agctcacatcatgttaggggacacagcaccccctactgctcagcttctgctaaccacccctctgtcagaggaatatctcttagtttcaccctcacaactgctgggaaatagtactaatcctctcctactggatttacagactctgtttccctgagtctgggccgaatcaaaccccccaggaatggcaaagcaccatctgccagtagttgtagagctcctggccactgctgccagtccaggtaaaacaatatcctgtgagtcagcaggctagagagggaatcgatccccatattcagcgactattacaagctggtatactcccaccatgtgagtccgcctggaatactccatttttgccggtccagaaacccggaacaaatgattaccggcctgtacagatttgtaggaagttaacaagtggacagttaccatccatccaactgtscctaacccttatactttactcagcctgctcccgcccgaacatacaatgtatactgtccttgacttaaaggatgctttctttgctattcctctggcccccaaaatccaacctgtctttgcttttgaatggacagatcctggctcgggagacaccacccaattaacctggactcaattaccccagggttttaaaaactcccctaccctttttggggaagccctccaacaggatcttataccattctgagccagtaaccctcactgcactcttctccagtatgtagaccacctgttattggctattaa

SEQ ID NO: 941835 - DNA, 634 bp, Homo sapiens
tgacatgatcttatattgagaaacacctaaaaactctgtcaaaaaactgttagaactgataaatgagttcagtgtgaagtcacagaatataaaatcaacatgcaaattcagtagcatttttatataccaaagcaaataatctgaaagagaaatcaagaaaaaaatgccatttgtaatagctacaaaaagtaaaataaagtatctaagaataaacttaaccaaagaagtgaaagacctctacaatgaaaactgtaatacwtcgatgaaataaattgaagatgacatttaaaaaatggaaacatcttctgtattcctggattggaagaattaattttgctaacatgaccatactgcttgaaggaatttacagattcaaaaaaatccctatcaactaatgatgttcttcacagaaataggaaaaaacattctaaaatttgtatgaaaccacagaagattccaaatagccaaagcaatcccgagcaaaaagaataaagctggaggcatcacattacctgactccaaaatatattacaaagctatagtaaccaaaacagcatggtactgacataaaaacagacacatggaccaattaaacagaatagagaacctagaaataaattcatacattttcagc

SEQ ID NO: 941836 - DNA, 476 bp, Homo sapiens
ggaagctgaggcaggggaatctcttgaaccagggaggtggaggttgcagtgaactgagatcatgccactgcactccagcctggcgacagagtgagactccatctcaaaacaaaaacaaaaaacaaacaaaaaacaaattaaaccaaaagttagtaataataaggatataatagatatctcagtataaatcaatgaaatagaaaacaaaaaaattgatgagccataaaaatgaaaagctgctttttgaratcaataaaaatgataaacctcgagatggattgatagacaaaataagagagaagacaaattatccatatcaggagtgggagaagggacatcactagagatcctacagatattaacaggataagaggaatattatgaataaattaataccaataaattctacaacttagattaagtggacaattttatttcaagacataaatttccaagctcactaaaaaaagacagct

SEQ ID NO: 941837 - DNA, 570 bp, Homo sapiens
atacagggcccatggatgtccgaaatccagcggggcactcaaatctcaaaggtccaaaatgatcttctttgactccatgtctcacatctgggtcacactgatgcaagaggtgggttcccatggtcttgggcagctccacgcctgtggttctgcagggtacagtctctctcctggctgctttcacaggctggcattragtgcctgcagtttttccaggcacacagtgcaagccctcagtggatctactattctggggtctggaggatggtgatcctcttctcacagttccactaggcagtgccccaacagggactctgtgtgggggctctgactccaaatctcccttctgaactgccctagcagaggttctccatgagggccctgcccctgaagcacacctctgcctcagcatccaggtatttccatacatcttctgaaatctaggcagatgttcccaaacctcaatccttgatttctgtgcacccacaggctcaacaccacatgggagcttccaaggctgtggcttgcaccatttgaaaccatggtctgagttctacgttggcccctttc

SEQ ID NO: 941838 - DNA, 682 bp, Homo sapiens
tctggaggagtagccacctggataggagagctggggaggactgacgaagcaggcctgccctaggtgcctcacctgtgggctggccattgtgaaatcagccctgttcatgtgccacctgaaaaggctaccctaccctccccccccacccccacccccracgctgggaaagggtgtggctctctgctcattaaggaagcattcccactgtggatgggtaacaaaaggcaaccctcaaggagtgaccttactaaatccaaaggaatccggcctcctctcattagtgggagggtagctgagggtgactcttggccagccggccctgagtcattgagggaagaaaggccaagcctgcatgacccatctcagaggccttgccctggacagaaagggacctggagccacccgagagataacatctgggcgggcctggggctggatccacctgtccactctgcgcacctaaggccgtgcctgccacacctccagatccaggaagttagcaggcaggcagcagtactcagggaggcctccagatcagcccccaaaggtctacactgtggaacctgcttctcctctcaggaaagacttctggcctcaccccctcttctagagcatgcgattctaatgaaatggagcttctcactggagcccaggtttccattctacccatgtcacctgtccc

SEQ ID NO: 941839 - DNA, 748 bp, Homo sapiens
gcctgtaatcccagcactttgggaggccgaggcaggcagatcactgaagtcaggagtttgagaccagcctggtcaacatggtgaaaccccgtctctactaaaaatacaaaaattatccaggcgtggtagtgcacacctgtaatcccagctactctggtggctgaggcaggagaatcacttgaacccgggtgatggaggttgtagtgagccaagattgtgccactgcactccagcctgggcaacagggcgagactccgtctcaaaaataaaataaaaatttgaggtccgccgggcacggtggctcacgcctgtaatcccagcactttgggaggctaaggagggcggatcaygaggtcaggagatcaagaccatcctatcctggctaatacggtgaaaccccgtctctactaaaaatacaaaaaattagccgggcgtggtgactggcgcctgtagtcccagctactcgggaggctgagtcaagacaatggcgtgaacccgggaggcggagcttgcagtgagccaagatcgcgccactgcactccagcctgggcgacagagcgagactccgtctcaaaaaaacaaaaaatttgaagtccaggccaggtgcagtggctcacacccataatcccagcaccttgggaggccagggtggacagatcacctgagaccaggagtctgagatcagcctggccaacatgatgaaaccccgtctctactaaaaatacaaaaagtagctgggcatggtggt

SEQ ID NO: 941840 - DNA, 748 bp, Homo sapiens
gcctgtaatcccagcactttgggaggccgaggcaggcagatcactgaagtcaggagtttgagaccagcctggtcaacatggtgaaaccccgtctctactaaaaatacaaaaattatccaggcgtggtagtgcacacctgtaatcccagctactctggtggctgaggcaggagaatcacttgaacccgggtgatggaggttgtagtgagccaagattgtgccactgcactccagcctgggcaacagggcgagactccgtctcaaaaataaaataaaaatttgaggtccgccgggcacggtggctcacgcctgtaatcccagcactttgggaggctaaggagggcggatcacgaggtcaggagatcaagaccatcctatcctggctaatacggtgaaacccygtctctactaaaaatacaaaaaattagccgggcgtggtgactggcgcctgtagtcccagctactcgggaggctgagtcaagacaatggcgtgaacccgggaggcggagcttgcagtgagccaagatcgcgccactgcactccagcctgggcgacagagcgagactccgtctcaaaaaaacaaaaaatttgaagtccaggccaggtgcagtggctcacacccataatcccagcaccttgggaggccagggtggacagatcacctgagaccaggagtctgagatcagcctggccaacatgatgaaaccccgtctctactaaaaatacaaaaagtagctgggcatggtggt

SEQ ID NO: 941841 - DNA, 748 bp, Homo sapiens
gcctgtaatcccagcactttgggaggccgaggcaggcagatcactgaagtcaggagtttgagaccagcctggtcaacatggtgaaaccccgtctctactaaaaatacaaaaattatccaggcgtggtagtgcacacctgtaatcccagctactctggtggctgaggcaggagaatcacttgaacccgggtgatggaggttgtagtgagccaagattgtgccactgcactccagcctgggcaacagggcgagactccgtctcaaaaataaaataaaaatttgaggtccgccgggcacggtggctcacgcctgtaatcccagcactttgggaggctaaggagggcggatcacgaggtcaggagatcaagaccatcctatcctggctaatacggtgaaaccccgtctctactaaaaatacaaaaaattagccrggcgtggtgactggcgcctgtagtcccagctactcgggaggctgagtcaagacaatggcgtgaacccgggaggcggagcttgcagtgagccaagatcgcgccactgcactccagcctgggcgacagagcgagactccgtctcaaaaaaacaaaaaatttgaagtccaggccaggtgcagtggctcacacccataatcccagcaccttgggaggccagggtggacagatcacctgagaccaggagtctgagatcagcctggccaacatgatgaaaccccgtctctactaaaaatacaaaaagtagctgggcatggtggt

SEQ ID NO: 941842 - DNA, 751 bp, Homo sapiens
tgtcttctgtacttctcaaaacaacctggcaaggtagaattataatcctcatttcaaagatgggaaaactgtgacttagaggctaagttgatgcccctacaaatttcaattatttaagaaggagactaaggagagagaagatagctggtgacttcagaccctttgttgttctgaaccccaaactttcctgcctcagtctataagcccaaggccctgtggttaggcttagtaggttcrattattttagcaggctgtttgaagaagatgtagtgatcccaatccacttccactcagaggcacaccaaagtatttgttccagccacataggatactttacctttgaggagtttagggaaattcatttctgctatcttatctgtgaagagtttagggaaattgatattctgctgtatcatctcctatcttccatggtgttttgcagtccttctagctgggagttcacaggaggttgaccagatggcctgctgttctgagtgattaattagagggttaagcatctagggagtatctaagcaaggatttgaacttgagtacatcccacttcagagcccatgcctctgagcactctcctttatatgatatgaagccctggggaggcctctggttggaggaagcatctgcagtgagtgaaggtgcccaggactctcaggcctgcagccctgatttgcacagtgagagctggcagcagtctagtgggcatgggggttcacagataccaggttctggcagt

SEQ ID NO: 941843 - DNA, 718 bp, Homo sapiens
cataatgacaggttcaaattcacacataacaatattaactttaaatgtaaatggactaaatgctccaattaaaagacacagactggcaaattggataaagagtcgagacccatcggtgtgttgtattcaggcaacccatctcacctgcagagacacatataggctcaaaataaaaggatggaggaagatctaccaagcacatggaaaacaaaaaaaggcagggsttgcaatcctagtctctgataaaacagactttaaaccaacaaagatcaaaagagacaaaaaaggccattatataatggtaaagggatcaagtcaacaagaagagctaactatcctaaatatatatatacacccaatacaggagcacccagattcataaagcaagtcctgagtgacctacaaagagacttagactcccacacattaataatgggagactttaacaccccactgtcaacattagacagatcaacgagacagaaagtcaacaaagatacccaggaattgaactcacgtctgcaccaagcggacctaatagacatctacagaactctccaccccaaatcaacagaatatacatttttttcagcaccacaccacacctattccaaaattgaccacatacttggaaataaagcactcctcagcaaatgtacaagaacagaaattataacaaactatctctcagaccacagtgcaatcaaactagaactca

SEQ ID NO: 941844 - DNA, 728 bp, Homo sapiens
cagcatgacctgaatgtgagacacggagtcaaaggagatcattttggaactttaagatttaatgacttccctactgggttttggacttgcatgggacctgtggcccctttgttttggccaatttctcccatttggagtgggtttatttgcccagtgcctgtaaccccattgtatctaggaagtatctaacttgcttttgattttacaggcttataaggtggaagggacttgccttgtctcaaatgagactttgctgaaagaagactttgggggactgttgggaaggcatgatatgttttgaaatgtgaggacatgagatttgggagaggttaggggtggaataatatggttaggctgtatcctcacccaaatctcagtttgaattgtagctcccgtaattaccacatgttatgggaaggacccagtgggaggtaattgaatcatgsgggtgggtatttcctgtgctgctgtttttgtagtgaataagtctcacgagatctgacggttttaaaaaagggagttcccctgctcattctctctcttgcctgcctccacataagaaatgcctttcggccgagcgtggtggctcacgcctataatcccagcactttgggaggctgaggcgggtggatcactaagtcaggaaatcgagaccatcctggctaacatggtgaaaccccgtctctactaaaaaatataaaaaatcagccaggtgtggtggcgggcgc

SEQ ID NO: 941845 - DNA, 636 bp, Homo sapiens
tttcccactttatgtatcatggtgagaggtaaagactatctcctccatggatatttcctagcctcccttgtagctgaaaattaggcatttgactctggctttgccacttagttatacttttccagactttgattcagaagctaataacatagaaagaaataccgaagcattctggtagggtttgtggcagatacgtgaagcctgcagaggcagattttctcattgtgacagacagtgctttacatccattgggtcaatgaggcaagctrcaatgtctgtgcccagggaggatggcaatggtgactccactgtttcagttctgtggagtaatttgggggcccttctctgatgaaataccaggtctgattttctggtccttccagagttttcctgtcttttaacacattttatttctgtttaaaatagcttgacttatttgtttacattaagaattctgggctgggcgtggtggctcacacctgtaatcccagcactttgggaggccaaggtgggcggatcccgaggtcaggagattgagaccatcctggctaacttggtgaaaccccgtctctactaaaaaaatacaaaaaaattagctgggcgcggtggcaggcgcctgtagtcccagctacttgg

SEQ ID NO: 941846 - DNA, 607 bp, Homo sapiens
actagcatcacaaagctttttatgggaatactcacatttgaactcaccacaagaacaggaggttgctacaaaattactacagtactacagtgagtactaaagttaattgtatgcagctatgatttaatattgcatcttcacatttgttttcatttttcttgactgcaaatagcactttgtacagtctgtgtgtgcatamgttttgatgcatttaactttttacaataggtccgtgtatattttatgatagtaaataataaaatagtctggtatctacatatgttttatgcattcatgacatacctaagttttctttttttttaatatttctaggctatagagtttttttaaattttttcaaattgttgcgaatctccaaaagtttttccaatatatttactgaaataaatctgcacataagtggaccaatgcccttcaaacttgtgttgttcaggggtcaattgcattcgtttgttagggcttctgcaacaaattagtataaatttgttaacttaaaaccatatgattttatttttgccagttctggagactaggaggctgaaactgagcatcaccagagccatgcttcctctcaaggctgggggaa

SEQ ID NO: 941847 - DNA, 539 bp, Homo sapiens
ctccacagaaaaaaaaaattaattaggcatggttttgcatacctgtggtcccagctatttgggaggctggagtggaaaaatcactggagtctgggagttcaaggctggagtgagccttgattgtaccattgcactccagcctaagcttgtctaaacaacaacaacaacaawaacaacaacaccgctatgaaatcacaatcaacttctaagaaatctgaccactttctactcttaagtgttgtatggcaaactgctgctgctgattccctttctctgaaaccatgttgtcaaaatgtaggtctcagaacatgaataaaagtctaaaattatctaggctccaaagagttttgtttatacaagttatagttgtcgctattaactttattagaattaaaactaaaaaatgtaaacatatccacttatttaaaatgaacaatattacaaaaatattttataaaaataattatatttcccgaaagaaaaaatttgtgagaaaagtgatgatcttttccatttttgcaaatctctttaatgtctga

SEQ ID NO: 941848 - DNA, 607 bp, Homo sapiens
agtggtgaatgcccacagggaggcaggcacctctgcatccactagcacttggctgtagctgctgcaccttgatccccccagtacagtagactccaaacatcaaggagccagagaacaaagttggggcccaatacaagtcccccagagatacagcatgcagtccaggggttgggagctgaacattggccccctagtaycttccagaaacgaagccagatggatgaatccaccttataccacaatcaaacccccaaggtcatcaaataggataaaagaaaaaaaacatccaaaggtcagcaacctcaaaagttgaaggtaggtaagcccacaaagatgagaaagaatcagtgcaagaatgctgaaaactcaaaaaaccagagtaccttctttcttccaaatgactgcatcacctgtccagcaagggtttggaaccaggctgaggctaagatggctgaaatgacagatgtataggaaagaagttcactgagctacaggggtacattgtaacccaatgcaaggaagttagaaatcatgataaaatatcataggagctgacagacaaaatagccagtatagagaagaatgtaactgacctgatagagctgca

SEQ ID NO: 941849 - DNA, 857 bp, Homo sapiens
cacatttttaagtagtgagggttaggacctcaacatatgaattgggattgggggagcggggagggtgcacaattcagtccataactgtgagctccattgctcctaagatgctagaataaaaattggacttcagggccgggcgcggtggctcacgtctgtaatcccagcactttgggaggctgaggcgggtggatcacgaggtcaggagatcgagaccatcctggctaacatggtgaaaccctgtctctactaaaaatacaaaaaattagccggtcgaggtggcgggcgcctgaagtcccagctactcgggaggctgaggcaagagaatggcgtgaacccggaaggtggagcttgcagtgagcagagatcgcgccactgcactcgagcctgggcgacagagtgagactccttctcaaaaaaaaaaaaaaaaagaaaagaaaagaaaagttggacttcagcctcccctatcccctactccatctcatsccctccacgacaagctgacctgtggactcacacattgtcaagtgctgtgaagggaagctgggaggattgaaaatgcagtaaggaaacagccctctcaactcgatttgtggtcacagcagtagcagcgacactccagtgtggaaaagaatataggggatctatcaggaatttgagaccctttaccagcaaacatttcagaaccggcctcttagcctttgttagcgattcaatccagagtcacccttgcccagtctgccctctgcctactccccatgtcattgtcatcccccatgggctccataattagagactgtggtgaataaatatgcctaagacgcctcattccgcctgccatctatgggagctctgac

SEQ ID NO: 941850 - DNA, 802 bp, Homo sapiens
tgtttagaaaagtcttttttgtttcttttcttttctttcttttttttttgagacagaattttgctctttttgcccaggctggagtgtagtgacacaatcttggctcactgcaacctctgcctcccagattcaagcaactgtcatgcctcagcctcccaggtagctgggattacaggcacgcgccaccatgcccagctaatttttgtatttttagtagagacgaggtttcaccatgttggtcaggatgctctcgaactcctgacctcaagtgatcggctccccttggcttcccaaagtgctgggattatagacatgagccacctcgccccgcccttttttgtttcaatatgcatttctttcataagcgttcccatctcagtctttttgcaaaaataatgcaaatcacattgtgtaaagatacctgcaactacaaaaagaggactggaattcagcaacrttttgtggattgaagtgtccctcaatctcaccatttccaccatccaggtagtttcacgaaccaagtggctttggagaaaaaaatccaacagggtagaccagaagatggcttatttataaaccagtgtgctgatgaaaaagcattgatgttggcatccagacacagctcagactctcactgctcttgctggctctgtccacaggacactgattacatagacgtggtgacagcagggacactctgccatccctatgctaacctggcattgcaacctgagcaaagccaggctcatgtgaggagcaacttcctaaagcaatcttttgtttttacttttttggggttggc

SEQ ID NO: 941851 - DNA, 737 bp, Homo sapiens; identical to SEQ ID NO: 928633

SEQ ID NO: 941852 - DNA, 814 bp, Homo sapiens
aaaatataggaatacatctaaccaaggaggtgaaagatttctacaaggagaactacaaactactgctgaaaaaagtcacagattatacaaacaaatgaaaaatgttccattttcatggattgaaagaatcaatattattaaaatggccatagtgaccaaagcaagctaaaaatttcacactatttctatcaagctaccaacatcatttttctcagaactagaaaaaaaactattataaaattcatgtggaaccaaaaagagcccaaataaccaaaactattctaagaaaaagaaggaaatcagaggcttcacattacctatactatagactatactataaggctacagtaaccaaaagagcatggtgctgctacaaaatacacacatagaccaatggaacagaatacagaacacagwaataaatccacatgactacagccatctgatcttccacaaagttaacacaaataagcaatggggaaagcactccctatgcaataaatggttctgggattgctggctagccatatgcagaagactgaaatttaaccatatacagaaattaactcaaggtggatcaaagatttaaaattacaacttcaaactataagaatcctggaggaaaacctaggagacaccattctggatactagtcttgggaaacaatttatcactgagtcctcaaaaacaattgcagcaaaagcaaaaattgacaagtgggacctaattaaactaaagactttctgcacagcaaaataaactatcaaaagagtaaacaggcaagctacacaatggtagaaaatatttgcaatcc

SEQ ID NO: 941853 - DNA, 812 bp, Homo sapiens
ggattgcaaatattttctaccattgtgtagcttgcctgtttactcttttgatagtttattttgctgtgcagaaagtctttagtttaattaggtcccacttgtcaatttttgcttttgctgcaattgtttttgaggactcagtgataaattgtttcccaagactagtatccagaatggtgtctcctaggttttcctccaggattcttatagtttgaagttgtaattttaaatctttgatccaccttgagttaatttctgtatatggttaaatttcagtcttctgcatatggctagccagcaatcccagaaccatttattgcatagggagtgctttccccattgcttatttgtgttaactttgtggaagatcagatggctgtagtcatgtggatttattwctgtgttctgtattctgttccattggtctatgtgtgtattttgtagcagcaccatgctcttttggttactgtagccttatagtatagtctatagtataggtaatgtgaagcctctgatttccttctttttcttagaatagttttggttatttgggctctttttggttccacatgaattttataatagttttttttctagttctgagaaaaatgatgttggtagcttgatagaaatagtgtgaaatttttagcttgctttggtcactatggccattttaataatattgattctttcaatccatgaaaatggaacatttttcatttgtttgtataatctgtgacttttttcagcagtagtttgtagttctccttgtagaaatctttcacctccttggttagatgtattcctatatt

SEQ ID NO: 941854 - DNA, 736 bp, Homo sapiens
agccaggaagaatctgaggaaggtgaggaagatgccacctctgaggtggacaaacgacgcacgaggcccagacaccaccacgggaggagcaggcccgacaggtcctctcaaggagggagtcttccctctgaggaaaagggacacccccaggaggaatctgaggagtcaaacgtcagcatggccagtttaggggaaaagagggaccaccattcaacccactacagggcttcagaggaagaacctgaatatggagaagaaataaagggttatccaggcgtccaggcccctgaggacctggagtgggagcgctataggggcagaggaagtgaagaatacagggctccaagacctcagagtgaggagagttgggatgaggaggacaagagaaactaccccagcttagagcttgataagatggcacatggatatggtgaagaaagtgaggaagagaggggccttgagcygggaaagggacgccatcacagaggcaggggaggggagccacgtgcctatttcatgtctgacaccagagaagagaaaaggttcttgggtgaaggacaccaccgtgtccaagaaaaccagatggacaaggcaaggaggcatccacaaggtgcgtggaaagagctggacagaaattatctcaactacttttaggaaggagccccagggaagtggcagcagcagggagacctgcaggacactaaagaaaacagggaggaagctaggtttcaagata

SEQ ID NO: 941855 - DNA, 639 bp, Homo sapiens
acagtcatggagacgtatgattggataaaggtctgatctaatggtaataagtggggggaacttagcaaggcctgtttgttcaggttcttcttggcatctgtgtcttaggcacttttctttaggtaaagagagggtacctctcccatgagggtcttatgacctgcttcatgggagaaggggaggtgggtgaaatgagagtgaccatcccatttctgctttttctcaaatgacaaggtgccatattttggggtagcatgttttgaactccatcaccaaggagagggtatgtcctcttgccttgtaaggaacctggtccaccaggaagcctgaggcagtcatcacccagagcaggaatttgaaacactgactctccatggtcagttttgtattctccagtcctactttgtagacattatgtacaagagaatttatcagattcaaaataacttggtgggaatattcagaaatatctcacttaaaaaaaawtccccacgttggctgtttaaaaaccaacaaaaatagtaacattttaagtcttgcttggagttcaaaatgagcttggaaaccatctgccctgacttaatctagagcgttcactgagtgtagacaactctacataggtgctgtgagggatccaga

SEQ ID NO: 941856 - DNA, 461 bp, Homo sapiens
cttcatcaccctattgtactcagcaagaaaaatatgcatatagatggaaattaattttgctagtctcctgtgatcctaagttcttcttttttaagaactcaagtcttcagaattgttatcattataattattagtagtacactaatgatcaaaatgaccaatgcattactaattttgatcaaaatcattaaataaaaattataataaatgcctctaagataaattataattttaagaaattagttcatatgcatattaygtgtgaatatgattgctcaactgagatagtattcaacattaattccactctgtcccattttcatagataaaagtgttgagaaatctcattcatgtaaggcagaggatgcgaatagaagatttcttacagtaatgtcattaaactctttgaagtccttccaaattgtattccaaaaatcgcagagtgatctatcattaaaatg

SEQ ID NO: 941857 - DNA, 646 bp, Homo sapiens
ccatgcctatgtcctgaatggaattgcctaggttttcttctagggtttttatggttttaggtctaacgtttaagtctttaatccatcttgaattaatatttgtataaggtgtaaggaagggatccagtttcagctttctacatctggctagccagtattcccagcaccatttattaaatagggaatcatttccccattgtttgtttttctcaggtttgtcaaagatcagatagttgtagatatgcagagttatttctgagggctctgctctgttccattggtctatatctctgttttggtaccagtaccatgctgttttggttactgtagccaccctgygtgagcagaaacagggcgaggcattgccgcactcaggaagtgcaaggggtcagggagttccctttcctagtcaaagaaaggggtgacagacggcacctggaaaatcgggtcactcccacctgaatactgcacttttccgatgggcttaaaaaatggcacaccaggggattatatcccgcacctgactcggagggtcctacacccatggagtctcactgattgctagcacagcagtctgatatcaaactgcaaggtggcagcgaggctgggggaggggagcccaccattgcccaggcttgcttaggta

SEQ ID NO: 941858 - DNA, 581 bp, Homo sapiens
ggctttgctacgttcctttggctactgccctctcttgcatattacagccaagcctggatgacctccaccatagagttctctttggtgtagagaagatgctcattccgtctttaacagcaaagcatggagactgttgctcagcaggtgcaggggtatgtatatgacaaaaggaagcaaaataaaaactcactctctgtctcagaggaagtgggacagagaggagagggaaaggaagaaagtgaaagaattaaatgtaggccccaatttactgtgcattttacaagttgagggagcaaacagcctccaggaagcttttactccccacctccaactcycatttgggaaccctgggaggacacttctgtgcacagtggggcagcctagtgattaggaaggggaagctgagtggtcctatgagacccagaaaaaggtctggttgtcattttctagacacccctccattcctaaggtgttcatactgagttaaaagccgtcaagtctgtaatagggtttgtaatggtgggtcaaggtaatttggcagcaaagccatgggcaggctgtaggccagggctgaatggggt

SEQ ID NO: 941859 - DNA, 407 bp, Homo sapiens
aacgtggcttagttcaagcctacaggtctcagagccaggtgatggtgtccaaggctgaaggcctcggaacctgaggcagcctgtgtaagtcctggaatcccaaggcctgagagcttggagttctgatgtccaaagacaagagaagaagagtgtttctcagctcttggagacaggacrtcacctttctattccattgagggtggatcttccccactcagtccactgactctcaagccaatcccctccagaaacaccctcacagatacatccagaagtaatgcttcaccagttctctgggtaatacttaatccagtcaagctcacatctaaaagtaaccaccacaggagggtggagaatatgcagtcgtgcaccatgtaacaacattttggtcaacaacagatcacata

SEQ ID NO: 941860 - DNA, 574 bp, Homo sapiens
tggattaggacatggtcatcattaggcggcattattctgcctccgcagaagttttagctgaataaccaggagactggacttgtcatttagtgagatggagaagaagaaggtttgtggggaagggcaagagtcaagccctggttttggcggtgttgatttgggacatcctactaggcacccaatgaagagaagtggagctggctggtgggaggttcaatatgaaatacagggatctgagcaggaaatgtaagttgtggggtcagcaacaattggataggatgtgcgaccccaggamgggctctgtttatattgggaatgtaaagaaagtggtgtgggaactgaactctgaatgccagtgcttagaagactgggccatgaggaaaaaccagcacaggagactcataaggggcttctggtggggagagggagacccagagagtgtttcttgtttcttttatgagtttcattggcaacagtaagaaaaagggctccctctctggcttttgcccaataccctgccactgcaccccctgctcaggaagaaatgcaatcggttgaggcagcagaaacagga

SEQ ID NO: 941861 - DNA, 590 bp, Homo sapiens
gggcaggaagtgtgaggaggaaaatagattttgaaagttatgggaactgtagagggtaagtggagcatagcttgtgatttttagggcctctaaaagtattaaagcggcagcagtgaggtgtggctgtagcctaggaatagtcagggaagcggataatttagttaaaatgtctcaatctaataagggagctgggcaggtggggataactaaaaaagagtgcataaaagaatgttgtccaagttggcaccagagttggggagttttaaggggtttagaagccttgctgtcaatacccacaacagttatggaggmaagggaaacagtcccttaaaaagaaggtaatgtggagtgggtagcctccatattgattaagaaggggacggacttaccctccactgtaagagttacccaaagtgtctgtgatggtccaggaggtttccgaggcgattaggcagtgtcagtcttcaactgctaagccacgaagatctgggaaggagtcagtcagagagccttgggccagagttccaggggatctgggagtggctgccaggcgagttggacagtccaatttccagtggggtcccgcacag

SEQ ID NO: 941862 - DNA, 746 bp, Homo sapiens
catcgaggagctcaggtccaggctgggaggctgccaaacttggggggagggggggctggggcggggggagaaaccctaggcaggacactggcaaaagcggactatggggaaaccatcagacactactctcttgcggcacttcttgcgtttgaactcttatggatgcattaggtaagaccagagagtagtttctttactttggtagaacatcagaatcaaatgagggcttaaaatacagatgaccaggccccatcctaaaccaccttaggaatgtgcttttacaaaggcacctgaggggactctgaagcacagccagggctgagacagtaaacccaaacttgactcagataagcccctgctcttgttttctggcctcatctctttgccttcagtctccaaaggagcaaaagccatcttttttttttttttttttttgagacacagttttgctcttgtcgcccrggctggagtgcaatggcacgatttcagctcactgaaacctccacctcccagattcaagtgattctcctgcctcagcctcccgagtagctgggattacaggtgtgcaccaccacacccagctaatttttgtatttttagtagagacaggtttcgccatattggccaggctggtctcaaactcctgacctcaggtgatctgcccacctccgcctcccaacctgctgggattacaggcatgagccaccatgcctggccgcaaaaggcatctttaagcactgaaatct

SEQ ID NO: 941863 - DNA, 669 bp, Homo sapiens
ctaactttctcgatgaatactccttcaagtaactgttactagacatcatgagccaatatattacataggctgaaaactgcattatctgggacctaaatcagagaagatctcattagatctaggatcttactcctttttgtaaaaaaaaaaaaaaaaaaaaaaaaamacttcatagagaaagcagctactgaatagtaagagaagagaaaaaatgtagagagttaaggcgatggtttgaggatgagaatcgagtaccatattggaatataatgtaaataggtaacatttattgaacattaacctcacactagctcttattttaagttatttaatctaatgccaaatagttaaactgtgctcaagtttattataagtataaatatttggattctcacaatagcctgtgcagaaggtaaaccaaataatataattctcacatcctcacactaccctcagagaatttagtaatatcctaaactgactcacataacatggtccaatcatgattcaaaatcagaccttttagtctaaatccaagtattttcccgtacactacactgtcttcctaccaagaagcagcctatatttcatttatattttctttaaatgaatttatagtcttttctcagttgcagagaagtggcttggcaaaaaattaggctgattcag

SEQ ID NO: 941864 - DNA, 605 bp, Homo sapiens
tacataggctgaaaactgcattatctgggacctaaatcagagaagatctcattagatctaggatcttactcctttttgtaaaaaaaaaaaaaaaaaaaaaaaaaaacttcatagagaaagcagctactgaatagtaagagaagagaaaaaatgtagagagttaaggcgatggtttgaggatgagaatcgagtaccatattggaatwtaatgtaaataggtaacatttattgaacattaacctcacactagctcttattttaagttatttaatctaatgccaaatagttaaactgtgctcaagtttattataagtataaatatttggattctcacaatagcctgtgcagaaggtaaaccaaataatataattctcacatcctcacactaccctcagagaatttagtaatatcctaaactgactcacataacatggtccaatcatgattcaaaatcagaccttttagtctaaatccaagtattttcccgtacactacactgtcttcctaccaagaagcagcctatatttcatttatattttctttaaatgaatttatagtcttttctcagttgcagagaagtggcttggcaaaaaattaggctgatt

SEQ ID NO: 941865 - DNA, 559 bp, Homo sapiens
gactacatcaagcagacaaaagaatatcagaacttgacaacaggacttttgaaataactaaatcagatgaacataaagattaaaaaagagtgagcaaaacctagatgacatacaggaaaccagaaagttatcaaatattcacatttgcagtgtcccagaaggcaatgagaaatgaaagagttagaaattctatttaacaaaataatagataaaaacttcctgaatctagcaagagagttagacatccagatacaggaggctcatagattcccaaataaatgcaatataaaaaggtcttctgcatggcacattatagtaaaactatcaaaagtcacaaacmgggaaaaaaattctaaaaacagcaagagaaaagcatctagtcacttataagggaacccctatcagactaacagtggatttctaggcagaaccttacagaccaagagagaatggaattatattttcaaaatgctgaaagaaaaaaaaaaactgtcagccaagaatactatacccagaaacgttatccttcataaatgaaagataaataaagtctttttcc

SEQ ID NO: 941866 - DNA, 719 bp, Homo sapiens
ttatactctgctttcccaaataccagaggaagcagagtggcttacagtcgtggaccttaaggatgcctttttctgcatccctgtacatcctgactgtcaattcttgtttgcctttgaagatccttcgaacccaacatctcaattcacctggactgttttaccccaagggttcaaggatagcccccttttatttggccaggcattagcccaagacttgagccaattctcatacctggacacttttgtccttcagtacatggatgatttaattttagccacctgttcagaaaccttgtgccatcaagccacccaagagctcttaaatttcctcgctacctgtggctacaaggtttccaaatgaaaggctcagctctgctcacagcaggttaawtacttagggctaaaattatccaaaggcaccagggccctcagtgaggaatgtatccagcctacactggcttatcctcatcccaaaaccctaaagcaactaagagcgttccttggcataacaggtttctgcggaatatggattcccaggtatggtgaaatagccagaccattatatacactaattaaggaaactcagaaagccaatacccatttagtaagatggacacctgaggcagaagtggctttccaggccctaaagaaggccctaacccaagccacagtgttaagcttgccaaggggacaagacttttctttataagtcacagaaa

SEQ ID NO: 941867 - DNA, 795 bp, Homo sapiens
tccagcctacactggcttatcctcatcccaaaaccctaaagcaactaagagcgttccttggcataacaggtttctgcggaatatggattcccaggtatggtgaaatagccagaccattatatacactaattaaggaaactcagaaagccaatacccatttagtaagatggacacctgaggcagaagtggctttccaggccctaaagaaggccctaacccaagccacagtgttaagcttgccaaggggacaagacttttctttataagtcacagaaaaaaaggaatagctctagtagtccttactcaggtccgagggaagagcttgcaacccatggcatacctgagtaaggaaattgatgtagtggcaaagggttggcctcactgtttacaggtagtgctgacagtagcaggcttagtatctgaagccgttaaaataatacagggaagagatcttactgtgtggacatctcatgatgtgaacagcatactcactgctaaaggagacttgtggctgtcagacaaatatcaggctctattacttgaaaggccagtgctgcgactgcacacatgtgcaactctcaacccagccaaatttcttccagacaatgaagaaaagatggaacataattgtcaacaagcaattgctcaaacctaygccacttgaagggaccttttagaggttcccttgactgatcctgacctcaacttgtatactgatggaagttcctttgcagaaaaaggacttcaaaaagtggggtatgcagttgtcagtgataatggaatacttgaaagtaa

SEQ ID NO: 941868 - DNA, 814 bp, Homo sapiens
ctagaagtgtcaatggcaagtagggatgctcactggagcatttggcaagtccctatacgtagactatagtacagatgcaggattttggagcaaagttctgccatcctccacagataactactcttgttttgagaaacagcttttggcctgctactgagccttaatagaaactgaatgcttgaycagaagccactaagttaccatgcaacctgagttgtccctcttgaattggtagtaacctgacccacaatgtcataaagttgggcacacatagcaaaattccatcaccaaatggaagagatatatatatgttcaggtcctagcaggccctgacaacatatgtaaattatgcaaagcagcagtccaaatgtccatgatccccacccttgttacattaccttttttcccctggcctgcacctataacctcatgaggagttccttataatcaagtggcagaggaagaaaatacttaagcctggtttatagatgatttgacatgatatgtaggcaccacccaaaagtggacaacttcactatagccactccctgggacatacttgttggacagtggtgaaggaaaatcctctcagtaggcagaattttggacagcatacctgctgtgaactttgtgtggaagaagaaatggccagatatgtgattatatactgattcatgcacaaagccaatggtttggctggatggtcaggaatttagagagatgatgattggaaaattgatagcaaagaaatctgaggaagaagtatgtggatagacctctctgaatgggcaaaaatgtgaagatatttgtgtca

SEQ ID NO: 941869 - DNA, 587 bp, Homo sapiens
aagggggctgaagccagggagccaagtggtctatctcagtggatcccacctccacagagcccagcaagttaagatccactggcttgaagttctcacttccagcacaacagtctgaagtcaacttgggatgcttgagattggtgagtggaggggygtctgccattactgaggcttgagtaggccgtcttcccctcacagtttaaacaaagccaccaggaattttgaactgggcagaggccaccacagctctgcaaagccactgtagccaaactgcctctctagattcctcctctctgggcagggcatctctgaaagaaaggcatcagccccagtcaggggcttatagataaaactcccatctccctgggacagaggacctgggaaaagcggtggctatgggtgctccttcagcggacttaaacattcctgcctgctggctctgaagagagcagtggatctcccagcacagtgcttgagctctgctaagggacagactgcctcctcaagtgggtccctgacccacatgcctcctgactgggagacacatcccagcaggggtcaacagacacctcataaaggagagttcc

SEQ ID NO: 941870 - DNA, 553 bp, Homo sapiens
gggccgagtcctcggcacacaggctctggggagatggctgaggagggtgggagctccaggaccctcagagtgaagtgaatcctgcttgcccagctcccctttgggctccacagaacacgccggcctctccttcacacaggcaggccgagggcaccctccacaccaccatggtccacaggctggtcccacacccagtggagtccaagctgctctcttgcctggctgacctcaagaccccctagagggtaggatgagctgctgctgcttgtcgcaggatgactgcagcactgcctggcaggatgcctgctgccacrcctgcctctgcacctgtctccacggcctgctcgcttggcagccagagggagatttttctgaaccctgagtcaaaccatgctgttcacctgctgacccacctgccaacaaccttctatttgggcagcaacttgcctaattccaggaggtgactcaaacacacctggccccagcctcctttgcagccagggcaaccagacgcccgagtcccggccaaggaggctcatagagaattcagctt

SEQ ID NO: 941871 - DNA, 616 bp, Homo sapiens
cttccagtgctatgttgaataaaagtggtgaaagtgggcatctttgtcttgtttcagatcttataggaaaggctttcagttcagcatgatgttaactatgggtttgtcatatatggcctttattgttttgaagtatgtttcttctatacctagtttgttgtaagtttttattataaagagatgttgaattttatcaaatgctgttttatgcatctattgagatgatcatatggttttgttctttattctgttgtacaatttggtgtatcacatttcttgatttgtgtatgctgaaccatccttgcatccctggaataaatcccacttgattctggtgtgttattattattttttttttttgagatcgcgtctcgctctgttgcccaggctggagtgcagtggcgcgatctcygctcactgcaagctccgcctcctgggttcacaccattctcctgcctcagcctcccaagtagctgggactacaggcgcccacccccatgctcggctaatttttttgtatttttagtagagaccggggttttaccgtgttagaccagcagaggtctcaatctcctgacctcgtgatccgcccgtctcagcctccccacagttctgg

SEQ ID NO: 941872 - DNA, 556 bp, Homo sapiens
aatctcagctctgctgtaggaccttgggcaatttactgtgtctcagcaggagttaatgatcacatctgtcaagtagggattatctgcctcttttcgtagttgttgattaaatgaagtaacgtgtaaaatacctgattgagagcttggcactatataaatactcaraaaatgtgtcctcccttctttagaggacttcatcatgaccaaaggaacagagtagactgagatggagattacgatggagatggcttacttggaagtgcccttgggatccgcacctagggcatggaagcaggatgggagcaggattgggcagagggagaagttgatctgcaatatagtctcaataaaggtctcaggcaactctaaagggggttttgaagctgagatgaaccttcggagttctcctaatttgggacaagagggttagtataaactctacatcaatcagtctttgtatttttttttttttttgatacagagttttgctctgtcacccagactggagtgcagtggcacaatcttggctcactgcaacctccacctcctgggttca

SEQ ID NO: 941873 - DNA, 847 bp, Homo sapiens
ttttctgagaaactaaaacggatcagtttcccctgaggtcctctaggattgttcatacttagtatgcttaaacataagatggcagcaagctgggcgcagtggctcacacctgtaatcccagcacttttataggccgaggtgggcggatcactagctcaggagatcaagaccatcctggctaagacggtgaaaccccgtccctactaaaaatacaaaaaattagccgggcatggtggcgggcgcctgtagtcccagctactcaggaggctgaggaggagaatggcrtgaacccaggaggcggagcttgcagtgagccgagatggcgccactgcactccagcctggatgacagagtgagactccgtctcaaaaaaaaaaacaaaaaaatgtatgttaacattgttagaaaggtgaaagcatttgcatcatgtggtataattttatttgacatgtaacagtatttgacaaccccaaactgtctacctttatttttctgaaagactacgtctccactcacagctctattttcagtttatgtagatatagccctggttttttatataacatacattctacgaagtactttgaatatatagtaaaatcagacaataatgttgaatttatatggcattagtcgagtatgaggcgtgtggtgtatgtgaatcttcccaggtaactaaaattagctgtgtaagcaggaaaacatttttttttgtattatttacattaacaacagctaaaatgtatttcatacttttctacattctgatattccctaataataaattactctggacagaaaatcatcaccatgtatagacctgggcctgttgattggttgtaataac

SEQ ID NO: 941874 - DNA, 662 bp, Homo sapiens
acctaggctcgccagggtccccagggggcactgcctggccctggcagcctgcacagggctggggctgccctggcccttgtttgttgactctcactcctgccaaggggaagctgttctggatagagacacagagaatgatttgtcactggttgtccctggctcccattccaatatgccagccaacagggtggcttcctgctcaacacttgccccacctgcaaggtccctgtggtaattcattccccagagggcctggagccagcccctggctgcattgccccctgttggagtgtcaaagctagagacttcttccccagctatctctcctccatcttctcacatccatggattggcctagctagggaccactggagaccattgacacaaccagccctatccccaccttyacattgtagataggaccagggactcagcagagggcacatggagtccctggaaaatctgggactggcagccaagcctccctgtgccatgcccttcctgttcctagacctgactactccctgtgctgaagccctagtccctgacctcagtgcctgggccagcctgagcctccatggccctcccccaatctcccaccaaagagtgcagggaggagtttcaggatgacatggacccctgctgtcctgctccagctccct

SEQ ID NO: 941875 - DNA, 715 bp, Homo sapiens
gtcactcgccgcagtcagcctccacaccaattctttggcgtggctaggcacagaaccttgggtgttacaaaaggataaaaagacaagatacagagtgcaagaaaatatttgcaaacaatgtatcaaacagagtagtatctaaaatatataaagaactctcaaactcaacagtaaagaagaaaacttctgggcacagtggctcatgcctgtaatcccagcagtttgagaggccaaggtgggtggatcacttgaggccaggagttcaagaacaacctggccaaaaggtgaaaccccatctctactaaaaatagaaaaattagccaggcatggtggtgggtgcctgtaatcccagctactcaggaggctgaggcaggagaatcacttgaacctgggaggcagaggttacagtgagacaaaatcccgccaccrcactcctgcctggacaacagagcaagactccatctcaaaaaaaaaaaaaaaaaaaaggaaacaatacaattaaaacacaggtaaaaggcatgaagagacatttcactgaagaaaaaagaaaacagacaagtgggaaaataagcatatgaaaaactggtcaacattacagtgattaagacctggttttcaggccagcatgtgagaagcctgaaagtcattatctaacaagtaaaaagctgaacaaagtgaaaaagcaacaactcttcttagatcccaaagagaactg

SEQ ID NO: 941876 - DNA, 644 bp, Homo sapiens
gacatggaggaagtcgctctaagccacagagcctcattggtcagatgggaataatcctaacatctacctcattaggctgttagaagatttcaatgaaagaggcccataaagcacttagcagagtgcctggtaaactaaacataataagtggttgctattacagtagtccccacttatctgcagtttcagttacttgtggtcaaccatggtctgaaaatattaaatgacaaaaatccagaaatagacaattcataagttttaagtcgtgggctgctctgagtggtgtgatgaaacctcatgctgtcctgctcatgctgtctggctccaacctgcccgggatgagaaccttcctccagcacatccgctgtccacgctacctgccagttagtcatttagcagccatctsgttatcagataactgctgcatttcccagtgctcgtgtttaggtaactcttattttacttaataaaggccccaaaacacccaaaacacaagagtacagtgcctagtttataaattaaaatttatcataggtatgtatgcataggaaaatcatagtatatgtagggctcagtactacccgtggtctcaggtggcctctgggggtcttggaatgtatcccccatgggcatgggggggacta

SEQ ID NO: 941877 - DNA, 568 bp, Homo sapiens
tccatgctatgtatgtaccacattttctttatccaatccaccattgatgggcacctggattgatttcatatctttgctactgtgaatagtgtagtgatgaacatactactgcacgtgtctttttggtagcatgatttattttttgcggggtatatacccagtaatgggattgctggaacaaatggtagctcttttttaagttctttgagaaatctccaggctgcttttcaaaatggctgaactaattaacattcccaccaacastatataagcattccctttgctctgcagcctcaacagcatctgttgattttctactttttaataactgcttttctgaatggtgtgagatggtatctcgttgtgattttgatttgtgtttctctgatgattagaaataaatagcatttttcttatgtatattggccaatttaggtcttcttttgaaaagtgtgtgtgtattagtctgtcctcacgctgctaacaaagaaatacctgagactgggtaatttataaagtaaagaggtttaattgcctcacagttctgcatggctggggaagcctcagt

SEQ ID NO: 941878 - DNA, 568 bp, Homo sapiens
tccatgctatgtatgtaccacattttctttatccaatccaccattgatgggcacctggattgatttcatatctttgctactgtgaatagtgtagtgatgaacatactactgcacgtgtctttttggtagcatgatttattttttgcggggtatatacccagtaatgggattgctggaacaaatggtagctcttttttaagttctttgagaaatctccaggctgcttttcaaaatggctgaactaattaacattcccaccaacactatataagcattccctttgctctgcagcctcaacagcatctgttgattttctactttttaataactgcttttctgaatggtgtgagatggtatctcrttgtgattttgatttgtgtttctctgatgattagaaataaatagcatttttcttatgtatattggccaatttaggtcttcttttgaaaagtgtgtgtgtattagtctgtcctcacgctgctaacaaagaaatacctgagactgggtaatttataaagtaaagaggtttaattgcctcacagttctgcatggctggggaagcctcagt

SEQ ID NO: 941879 - DNA, 555 bp, Homo sapiens
agctctttgtagatttttaaaaataaacatgtggatgatcctacatagtcttaaattgctaaaagctttattttctctatttaaaattatgaaagtgtgtgacatttgttgaaaatttttctgcatttattgatatcattgtctgatttttcagatttagtctgttaatgtgatggttgttttaattaatttatggacaataaaccagccttgtatacyaggcgtaaatccaactgggtcatggtatataatttttaatacattattggattttattttctatttttggtggagttttacatgtatgctaatgagagatatggacctgtaatttttctttctggcaatttcttttctggttttagtatgaaagtgatattactctcctagaatgagtctgtttctattttatgagtgaaattttatcaaaacggaatgattttatccttaaattttagtcagaattcatgaatgaatgtacttgggcctggttctttctggtttgagaggtataaatgattggtttaatttgtttaatataaatggttctattca

SEQ ID NO: 941880 - DNA, 555 bp, Homo sapiens
agctctttgtagatttttaaaaataaacatgtggatgatcctacatagtcttaaattgctaaaagctttattttctctatttaaaattatgaaagtgtgtgacatttgttgaaaatttttctgcatttattgatatcattgtctgatttttcagatttagtctgttaatgtgatggttgttttaattaatttatggacaataaaccagccttgtataccaggcrtaaatccaactgggtcatggtatataatttttaatacattattggattttattttctatttttggtggagttttacatgtatgctaatgagagatatggacctgtaatttttctttctggcaatttcttttctggttttagtatgaaagtgatattactctcctagaatgagtctgtttctattttatgagtgaaattttatcaaaacggaatgattttatccttaaattttagtcagaattcatgaatgaatgtacttgggcctggttctttctggtttgagaggtataaatgattggtttaatttgtttaatataaatggttctattca

SEQ ID NO: 941881 - DNA, 555 bp, Homo sapiens
agctctttgtagatttttaaaaataaacatgtggatgatcctacatagtcttaaattgctaaaagctttattttctctatttaaaattatgaaagtgtgtgacatttgttgaaaatttttctgcatttattgatatcattgtctgatttttcagatttagtctgttaatgtgatggttgttttaattaatttatggacaataaaccagccttgtataccaggcgtaaatccaactgggtcatggtatataatttttaatacattattggattttattttctatttttggtggagttttacatgtatgctaatgagagatatggayctgtaatttttctttctggcaatttcttttctggttttagtatgaaagtgatattactctcctagaatgagtctgtttctattttatgagtgaaattttatcaaaacggaatgattttatccttaaattttagtcagaattcatgaatgaatgtacttgggcctggttctttctggtttgagaggtataaatgattggtttaatttgtttaatataaatggttctattca

SEQ ID NO: 941882 - DNA, 555 bp, Homo sapiens
agctctttgtagatttttaaaaataaacatgtggatgatcctacatagtcttaaattgctaaaagctttattttctctatttaaaattatgaaagtgtgtgacatttgttgaaaatttttctgcatttattgatatcattgtctgatttttcagatttagtctgttaatgtgatggttgttttaattaatttatggacaataaaccagccttgtataccaggcgtaaatccaactgggtcatggtatataatttttaatacattattggattttattttctatttttggtggagttttacatgtatgctaatgagagatatggacctgtaatttttctttctggcaatttcttttctggttttagtatgaaagtgatattactctcctagaatgagtctgtttctattttatgagtraaattttatcaaaacggaatgattttatccttaaattttagtcagaattcatgaatgaatgtacttgggcctggttctttctggtttgagaggtataaatgattggtttaatttgtttaatataaatggttctattca

SEQ ID NO: 941883 - DNA, 387 bp, Homo sapiens
aaatttgcataaattataaggagctgaatgtcaatccccaagttgatgggaaaaatatctccagagcatgtcagaagacttcatggcaattcattccttcacaggcctggaggcctaggaggaagaattggtttcatgggctgggcctagagtcccagtgctttgtgcagcctagggacttggtgccttgtgtcccagccactccagccrtggctgaaaaggcttaaatagaactagggctgttgcttcagacggtgcaagcctcaaggcttggcagcttccatgtggtgttgaatctgcaagtgcacagaaatcaagaattgaggtttgggaacctctgcatagatttcagatggaagtgcctggatgcccaggaggaaatttgct

SEQ ID NO: 941884 - DNA, 586 bp, Homo sapiens
agcattgagtgtctgcagcttttctaggcataccatgcaagctatcagtggatttaccattctggggtctggaatatggtggccctcttctcacagctccaggaggcagtgccccgctggggactcttggtggtggttacaaccccacatttcccttctgcacttcyctagcagaggttctccatgagggccccacccctatagcaaatgtctgcctggacatccaggcatttccatacatcctctgaaatctaggcagaggttcccaaacctcaattcttgacttctgtacacctgcaggcttagcatcacatggaagtttccaatgcttggggcttgggaaaccacagcccaaccagtaccttggccccttttagccatggctggggagtggctgggatgtagggcaccaagtccctaggctgcacacagcaggggcgacctgggccaggcccacacaaccattacttcctcctaggcctccaggcctgtgatgagaggaggtgccttgtaggactgacatgccctggagaaattttccccattatcttgttgattaacatttggttcctcttcttatgtaaat

SEQ ID NO: 941885 - DNA, 764 bp, Homo sapiens
tcagctctctgaaaatggaccaatcagccatctgtaaaatggaccaatcagcaggatgtgggtggggccagataagggaataaaagcaggccacggagccagcagccgcaacccactggggtcccctatccacgctgtggaagctgtgttgtttccttctccgcaataaatcttgctgctgcccagtctttgggtctgctccacctttatgagctgtaacactcactgagaaggtctgcagcttcactcctgaagccggtgagaccatgaaccccccaggagggacaaacaactccggatgcgccacctttctgaactgtaacgttcaccacgaaggtttgcagcttcactcctgaggccagcgagaccaagaacccaccagaaggaagaaactccgaacacatctgaacatccgaaggaacaaactctggacataccatctttaagaactgtaacactcactgcgaggtccgtgcttcattcttcaagtcagcaagacgaagaacccatcaattctggacacagtctaactcagtgatgccaacctttttgacagcagggactggtttcckgaaagacaatttttccacagatccagtggtggatcaagggagatgattttggtatgaaactgtttcacctcagataggcaggcattagttacattctcattctcataaggagcacacacctagattccttgcatgtgcagttcacaacagggttcacactctgagaatgtaatgctgctgctgatctgacag

SEQ ID NO: 941886 - DNA, 730 bp, Homo sapiens
aatttggaaaggacaaaattggaaaattgataacgaatcatcaatggagctctgaaactaaagagattattctgataaatgcccactaaaggttgaggaaactctaaataaagaaagggataagatcattcatctcttagataccaatcagcctctttccccagccatcccagtgcttamtcaatgtacccaggtacaaagtggccatggaggcatggacgaaggctcacagcatggtctttctccatcaaagcaagttcgactaccatgatggctgagtgaattgccaatagaaaaggcccatgctgagccctctatatggcatcatttcccagagagctgtcagcttgcagggtggttccactgggccatgcttcttctaaagtgggcagcatcttgccctcacagggggaaacacatatttattttcttacctgaggtgtttcagtcagcctcattatttgtagacttaaaaatgcctcatccatcattgtggtgtctcacacaacagttaaaacataaaaatactgttaagacataaaaataagtcttaacagtagacatattttataaaagagcaatatcatttacaaccacagaattcagtgactttatcacatgccccaacttccagacgcagctagcttgataaagtagtgacctgtcccaccgaaggttcagatatagtcccacctgagagccaacaccctgccttcaaccaacatcacct

SEQ ID NO: 941887 - DNA, 730 bp, Homo sapiens
aatttggaaaggacaaaattggaaaattgataacgaatcatcaatggagctctgaaactaaagagattattctgataaatgcccactaaaggttgaggaaactctaaataaagaaagggataagatcattcatctcttagataccaatcagcctctttccccagccatcccagtgcttactcaatgtacccaggtacaaagtggccatggmggcatggacgaaggctcacagcatggtctttctccatcaaagcaagttcgactaccatgatggctgagtgaattgccaatagaaaaggcccatgctgagccctctatatggcatcatttcccagagagctgtcagcttgcagggtggttccactgggccatgcttcttctaaagtgggcagcatcttgccctcacagggggaaacacatatttattttcttacctgaggtgtttcagtcagcctcattatttgtagacttaaaaatgcctcatccatcattgtggtgtctcacacaacagttaaaacataaaaatactgttaagacataaaaataagtcttaacagtagacatattttataaaagagcaatatcatttacaaccacagaattcagtgactttatcacatgccccaacttccagacgcagctagcttgataaagtagtgacctgtcccaccgaaggttcagatatagtcccacctgagagccaacaccctgccttcaaccaacatcacct

SEQ ID NO: 941888 - DNA, 559 bp, Homo sapiens
ccacacccagctaatttttgtatttttagtagaaatgaggtttcaccgtgttggccaggctggtcttgaactcctgacctcaagtgatccacctacctcagcctccagaagtgctggaattacaggcgtgagccactgcacctggcccgaagttctatattttaatagagaggatctgcaagccatgcccttcatatccttataagggagaaagcccttcagactgacagagtaaagatctctgaatatctactcctttgtaaaagcaactggaacattggcaaaagttgcatttctcaattatttccataactctggaaattaatcaaaagcttgtaaaaattcaagaagtgtttattwaaaaaaattgggttaatcttggcaagaaaaagcaagatttgtgatatttttgtgtgctcaattctcattccccttgccccagctctgtggtaaccttcaaaatcaacagccttggagccctgatacctgtgaaaattagcagtcttgccacaactaactggagaggggcaggatgggcttggagtgccccctaaaagct

SEQ ID NO: 941889 - DNA, 661 bp, Homo sapiens
ggactcaggcatctctgcactctcaagggcccaggaaggcccccctatgccgctgcaggctcagaagtgcttgttcccactgtctggtctctccccgctctctgcacccactttgatctcagagcaaagttgaggctgagcccrtgtgctgttgcaacatggccaggtgtgtgcaaactgggggcagcactgtcacaccagccccctgcctcctcgaccccctccagacttcgggcaccagtaagcatgacagcgaagctgaccggggcattgagggcagttcacgctggccttcaagcgtcccttagcacaaagtaatagttataggaggcagacagtctcccaggcagaaaagggcaggtccctggtgaagctctaccttcaggtcggggaaggcctgaagcctgggggtcgggctcccagtcccacagactggagtgggaatttatagtcctttatctgggcttctcatagccaccagatgaaccaatcagcatgcacttcctcccctctgaagcccataaaaccccgaacacaggagactggagagactccatgacaacctgccagcagagaggagctacccactccagggtctcctctctgctgaaagctgaacactcctcaagacaccttggtggggcgaaagagctgtaacaca

SEQ ID NO: 941890 - DNA, 661 bp, Homo sapiens
ggactcaggcatctctgcactctcaagggcccaggaaggcccccctatgccgctgcaggctcagaagtgcttgttcccactgtctggtctctccccgctctctgcacccactttgatctcagagcaaagttgaggctgagcccgtgtgctgttgcaacatggccaggtgtgtgcaaactgggggcagyactgtcacaccagccccctgcctcctcgaccccctccagacttcgggcaccagtaagcatgacagcgaagctgaccggggcattgagggcagttcacgctggccttcaagcgtcccttagcacaaagtaatagttataggaggcagacagtctcccaggcagaaaagggcaggtccctggtgaagctctaccttcaggtcggggaaggcctgaagcctgggggtcgggctcccagtcccacagactggagtgggaatttatagtcctttatctgggcttctcatagccaccagatgaaccaatcagcatgcacttcctcccctctgaagcccataaaaccccgaacacaggagactggagagactccatgacaacctgccagcagagaggagctacccactccagggtctcctctctgctgaaagctgaacactcctcaagacaccttggtggggcgaaagagctgtaacaca

SEQ ID NO: 941891 - DNA, 764 bp, Homo sapiens
tatgttaagaataagggtgacaagccctggactaaagcaattttcaacaggttgtagctacaggattaaactctttattattaggcaaggcgagattgtgaagtgccatatatggtgctcgaaagaatgggcagatctcattctccctctgacacctcactattgtccttttacaaggtttggaaggcttagggctctaaattctgttttaatgtttaaatatgaaaagactgcactattttaattttcactatagagatgttcttaagaatttctcagtcttgggaccagcaacagtcattgatcttagtaaaaattgcttataggtattacatattacactacaatgattatgttgtcataaatgtcttcaacctagaggatctctgtagagaaatcatgcatgcatgctaccacttcgataatggttcagaactattatcgttcaatgtacatttattaaacaatmtatgaaaagacattaattttaactcatcacaaggctacaatgacctgaaaaaaataaatggtttaaagcacatgagatcaacaaatataacaaaaaaagaggcattataaacctcctgtatatgtattccaaccctgatgttttttagtaaacacaaatgagcaaatcttgaagcgacatgggactgtcctgattgtttatcatgaaaatgattcaagggttaaaagaggatttctatttgataatctataattgctgattttaccaaggtcaatacagaatgatgccagcacaa

SEQ ID NO: 941892 - DNA, 646 bp, Homo sapiens
tatgatgctaaaaagattgggtactatctattctctaatacttgctaaatcttcatctattgtaacaggaaataaattgatagtggccaaaaaggataaattttaaaataacagtttaagcatattctttacatatagaggtaaatatcaaaagaaatgcccaagagaagtgaaagtggttgcctctgccgagtgagactaaaagatrgggcaggaatctgctgttttggtactactgatgcaatttttaagaatcagaatgcactaaaactttgacttaagaaatgctaaaacaatgtaattagaccagtgttttctttcatataagcaggtattgtctagagctgtactgttctacatagttagccactagctctatgtggcttttacatttcatgttaaaattaactaaaattggccgggcatggtggctcacacctgtaatcccagcattttgggaggccgaggtgggtagatcacctaaggtctggagctcaagaccagcctggccaagatggtgaaaccctgtctctactaaaaatacaaaaattagccgggcgtggtggcatatgcctgtagtcccacccagctactcaggaggctgaggcaggagaatctctcgaacctgggaggtggtggttgcaat

SEQ ID NO: 941893 - DNA, 754 bp, Homo sapiens
caaaaatgagggcaaggggtctgagtgtggtgcctcatgcctgtaatcccagcactttgggaggctgaggagggcggatcatgaggtcaggagtttgagaccagcctgaccaacatggtgaaaccctgtctttaaaaaaaatacaaaaatttgccaggcgcagtggtgcgcacccatagtcccrgctactcaggagactgaggcaagagactcacttgaacttgggaggcggaggttgcagtgagccaagattgcgccattgcactccagcctgggcatcaagagtgaaactccgtctcaaaaaaaaaaaaaaaaaaagagaaaagaatttctttagagagagttggtagcaggttgtgctgcccatccttgctgcacaccctctggtggcagaaggaactgttgctttgttaattacagccaagtgaagagtttctcagaaccattcctccaacttgacttttgtgtttggagagacacagggactggtacctgacttggacttgagcatgcctaaaggtgaggggaaatcagaagctgtccgtggtcactgagtatggacagagggtctctgctgatagtagcttttctgccaggttgatcaggtataggtggaccagatgtgtaaccgtttgacaagggctagatttggttgctgtctatggcctcataggtcatgcatcctaatgcttctttttgaaagaacatttaccaccagatacctagggctaaggaggggttcctatgagtcagc

SEQ ID NO: 941894 - DNA, 605 bp, Homo sapiens
acagtaaacctggggcacctgagcatgtcagaaagtgacattctttacttaccataggtcaggaaccctgtacaggtactgtgcagacaaaggtatgaggctagtttttttcaaggggcttttattgtctccataaatcaagcttgattccttaaatgaaagcacaccattccagtcaaagccttggtaaaacgtttctccaattgtgtttcgttacaaatgaaaacagattttttttttttgagatggagtctcactctgtcacccaggctggactgcagtggtgcaatctcggctcagtgcaacctctgcctcctgggttcaagtgattctcctgcctcakcctcccaagtagctgggactacaggtgcctgctagcatgccaagataatttttgtattttttggtagataaggggtttcaccatattggccaggctggtcttgaactcctgaccttgtgatccacctgcctttccctcccaaagtgctgggattacaggtgtgagccactgcgcctggctgaaaacagatttttattgcacttatacaaataactgtattgtcataagttaagaatacatacaaagagtttccaaattctgt

SEQ ID NO: 941895 - DNA, 658 bp, Homo sapiens
catattgtacaaggcacggcacattgtaataaaagccatgtgacagtttactgtgggaaatggactgaaccaggatgagtaactggaatggtcctttaagtggatccatgcttctcaaagaaagtttaaatctgggccataactaagggtctggagcttgagctaggataaagggcttggccaaccactgccctggccaccatctctcctgtatgaattatgcagagcatatccagagtttttttgccacctcccaaaaacttagttagtgacaatgagtcttttcaaaacaatacatctckctttctaatacaatttgtttctctttctaacaaaagcttcaactttccttttgttcttcagacataacaaagaccactcctgtctgtgtgaaggccccaaattgcaattctgttttcccaaataaaacattttatttagaggtttgtctctatgtttacatttgactttgagaagtgaaggtacagaatatgttcattttggtctctagtaagtcttctttgactcccccaggtgtgataatttaacgagaacatagaacaggcaagacattttcttttgcttttccttactttctcaaagtaaagtgcatcccaaaagctttgaggtagttactattattcccattgtagcaaat

SEQ ID NO: 941896 - DNA, 658 bp, Homo sapiens
catattgtacaaggcacggcacattgtaataaaagccatgtgacagtttactgtgggaaatggactgaaccaggatgagtaactggaatggtcctttaagtggatccatgcttctcaaagaaagtttaaatctgggccataactaagggtctggagcttgagctaggataaagggcttggccaaccactgccctggccaccatctctcctgtatgaattatgcagagcatatccagagtttttttgccacctcccaaaaacttagttagtgacaatgagtcttttcaaaacaatacatctctctttctaatacaatttgtttctctttctaacaaaagcttcaactttccttttgttcttcagacataacaaagaccactcctgtctgtgtgaaggccccaaattgcaattctgttttcccaaataaaacattttatttagaggtttgtctctatgtttacatttgactttgagaagtgaaggtacagaatatgttyattttggtctctagtaagtcttctttgactcccccaggtgtgataatttaacgagaacatagaacaggcaagacattttcttttgcttttccttactttctcaaagtaaagtgcatcccaaaagctttgaggtagttactattattcccattgtagcaaat

SEQ ID NO: 941897 - DNA, 777 bp, Homo sapiens
gccacagtttttatttttttattttttaattttttatttttttcagtgtttagctgtagtagagtagttatcatctgaaaattttctcttgctaggatgctcctttcctggtcatttgcctaaagggttttgttgggaccttttttttttcgtctgaacttgttgacatatctggtttgcaagcttcctcagctccacatttgtgatatgtgaggcaaaactcggaggactcaccaccatattgtcccttaagtctcaaggtccctagcaagtctatgttttctttaccttttgcaatcttatgtttgttttacacatactctccaaacgttttagttgcagttagtgggaagtataagaaacaataatctactctatcttctctgaagtggcactcctggtggtagtttccaatacagtatctgctttctccttctcactgggaaaaccccattttggtgggggaggcaatgtgccaagttagaaatactcatgtccctggatttccttgcctttaaagatggccatgaaatcaagctttggcccatgataaaatacccacaatctactgggtaagacatctggaaaaactattattcttctagtaaaaacagaaagatggagggccatgtttcttttcycttcttcacctttccctgcttctttctgtctgaaatgggtaatgatgcttggaggtttaacagccaagagagcaaactgcatgctaagattggtggagcaggaagctaaaaggagactgtgtcctccatcaactcc

SEQ ID NO: 941898 - DNA, 765 bp, Homo sapiens
gattcccccaaattcagggtttcattttcatactggatcctggatccacaaaagagaaatactatagaacaagatagtgcaataattttaccatgcatttcactgcaaagcatccaaagctgatcagcccattctatgattagcccatcccccatgaaagtcttatctctcagtaggsagtgggggcatttccataccttctaggtgaccaagaacatgcttctctgatcgaaacatgcaaagagttgagcatcccaccataactgccattagccatctataaaacttgtctcacaatgccaagtaatttctgacacttccaagagtcaaaaacatcaagtaaagcaatgaaaaacagaacagagacttagattttgagaaggatacattttcaattcctggggttccttgaggaaaacaaagatttttcccaaaacaggatctgtggtgtctcatttttttttccaaggagttcctagctgttagaaatgatcttgggtcctctcatatgtgcatcaagagtgggaagagataaaattgagaaaaacaattcagttgactgagaagaaaaagactttttttctagaaagacactacccaagaagagaaaaaaatatacaaagggccttttaaatatatatatattatctcatatatagtatgtgtctatataatcatatatatgtgtgtgtgtgtatatatatatatatacatatatatagcttggatatccacttttaattaagctgacttttaactattgcc

SEQ ID NO: 941899 - DNA, 601 bp, Homo sapiens
gagctgcaggcagtgacagcagtgggattaccgctagaatagtcccaaggtattctccatggatctggcctttctgcacatcttggactatcttttcaaggatattcaaataggaaatagccttgaaaactgcagataaatctctatctctggacgaagaagaagaggggaaaaatgggctggtcatcagcagccttatatataacatcatagtttcctaattttgggtttctctcttgaaatgcacccactgaatgtgcaggcacagtttggtcctcattccatctcccttgtagcttgtggaactggcaaaagattttgatctggcttttgctattattaatacattcccttgtctctgacccacaggtcttgtttttttgtagtgtgcakacacacacggcaaaaggctaggttgttaggttgcaagtagggtaaaagctgagacctttaacagtatgtcttaaaaagtgagtcatccatatctcctggacatgttgtttccagatgtgtagtatcccatcctggtttcctgaccctcccagaaactctaataccatctaatgtcttttttcttaaattagctttagtggattccatt

SEQ ID NO: 941900 - DNA, 601 bp, Homo sapiens
gagctgcaggcagtgacagcagtgggattaccgctagaatagtcccaaggtattctccatggatctggcctttctgcacatcttggactatcttttcaaggatattcaaataggaaatagccttgaaaactgcagataaatctctatctctggacgaagaagaagaggggaaaaatgggctggtcatcagcagccttatatataacatcatagtttcctaattttgggtttctctcttgaaatgcacccactgaatgtgcaggcacagtttggtcctcattccatctcccttgtagcttgtggaactggcaaaagattttgatctggcttttgctattattaatacattcccttgtctctgacccacaggtcttgtttttttgtagtgtgcatacacacacggcaaaaggctaggttgttaggttgcaagtagggtaaaagctgagacctktaacagtatgtcttaaaaagtgagtcatccatatctcctggacatgttgtttccagatgtgtagtatcccatcctggtttcctgaccctcccagaaactctaataccatctaatgtcttttttcttaaattagctttagtggattccatt

SEQ ID NO: 941901 - DNA, 773 bp, Homo sapiens
tatgcagcagcagcttctcctgattctaatgggactcatgtgctctgaccactggctttaaaagttggaattattgaatcacctctcaggtgaagttaagctgggtgctacttatcacatcccagagccagcacatcccatcaagggtcatacatagattgtccaggttatgcaataatgtcctctctggaggaaggggagcctgtctctaattcatgtgaagtcagcatgtgggcaagcagcaagccttcatgatggtaggtttttatctacatcacctcagttgctcctcatcaaaaacctctatgagtttcacaaacaaattacatgaataaaaaaggaagcaaggaaaggagaatctatgaatcaaaagggacttaagagacatatgacaaattataatatgtggaacttatttggatcctgattgaagcaaacaatttagaatatatggacagtgatactattaggatataattmttcaatttattttttgagatgtgataatggcattgccatagccaaccttcacgatggctcctggaattcatgcccttatgtagtcccctcccacactgaatcaggactggcctgtgtgatcaataaaatatggcagaagtgatggcatgtgatttcagaggctaggtcataaaaggcgtgcaacttccaccctagtctctcatgctgctccctcttgggaaagtcagccaccaagctcttgagtaggctacagaggggcccatatggaaaaaccaattcaccagacatgtgac

SEQ ID NO: 941902 - DNA, 600 bp, Homo sapiens
cagaggcggctgtttttccctctcctaaaggttttccttaaaactgccacaaaaaaagcattgccagcaagttaatgagtcccatcccatccgtttctcctatcccctcccaaagaggcataacaggcctgtttacataggtcggcatctgaaggtaattaaaaatgtaatcctatatttgcagcaggctctctctcatctagagcaaattcccaccacccaataatgctcctrctctacctctgtggtgcactttaagcttctttttttccctcccctcacttatgcattgggtttagatcctcatggcaatctgccccaactgggtgtggagaaaagaaatcagtttccccattgaacagatgaggaaactgaggtgcagacagattccatgccacacccaagttcaacagctctctttgttccagtgaagccatgtttttgttgttgtcgttgttttgctttgttttttggtttctgtgaagatttatttctactgtatcatgaagatggtaagaaatggtttattccggtgcatcaatggctttggtcaactcagtttccatacgtgccatcctaggtggcaaaatgttcaaaaaa

SEQ ID NO: 941903 - DNA, 601 bp, Homo sapiens
gcatccaacaaaggtctaacatccagaatctataaataaacaattcaacaagcaaaaaataatcccattaaaaagtgggcaaaggacataaacagactctcctcaaaagaagacacacaagtgggcaacagacatttgaaaaaatcctcagcatcactgatcatcagtgaaaggcaaatcaaaaccacaatggcatatactgtctcatacccatcagaatggctattatttaaaagtcaaaaaataacagctactggcaaggcttcgaagaaaagggaacacttacacactgtgcgtgggaatgtaaattagtttagccgctgtggaaagcagttcggagatttctcaaagaactcagaactactatttaacctagcatcctattactgggtttatatccaaaggataatacattgttctatcaaaaagacacttgaacttgaatgttcatygcagtattattcacaatagcaaagacatgtaattgacccaggtgctgatcaatggtgggactagataaagaaaatctggtacatacacaccacgaaatactacacaaccataaaaaagaatgaaatcatgtcctttgcagcaatataga

SEQ ID NO: 941904 - DNA, 747 bp, Homo sapiens
cataagtgtctcagacaggaaagcttgcttgttctccatgtttcccttcatgggtgcgtggattgcctagaaggagcgctaggcgaccgtgactggccttgtcttcaagaacaggtagtgtcccatttcctctgcaattcctgtctcattgttgagggacacctctcctctgcttctgggtggactgtctccctggatcttttgcccgtaacgaaagtcagggaaccaaggtgactgggctgggtctggggctggggctggggctgttgctggtgctggggctggggcttggtgcaggggaggttgtgtgagggctacctgggcggtggagctttggccttggggtgaattttgcagaaacctatttgttgctctggcaggaatttcaaattttggatccggtcagtcacaagccgcctcctgtttcccaagtgttctttaatttttcattgctgtgatggaaatgtcacttgaccctcccttccaccgggcacatgcctagacagcatcstttgtttcgccgtcgccccacattcctctggttacacacattcaagccatctgctgtgggattggtcagtgccacacgtcaacgcatggtctccacctgggattcgcccctgttcctgtttgcacgtgtcctgtaaattgcgattggcttccagagccccagggcttttagaagcccggcaggccagtgttctttaaaaggagaagggaggcagagggctgatggatcagtgaaat

SEQ ID NO: 941905 - DNA, 596 bp, Homo sapiens
gtccccttacctctgcacgtcctgtctcacaaatgagggacgtcctctcctctgcacataggtagactgacttcctgaatcttttggctgtaatgaatgtcgggaaaccaagggaactgcactgggcctggatggggttggggctgggtgcaggggaggttgcgtcagggctacctgggcggtggaggctttggggtggagtgaatgttgtagaaatctctttgctcctctggtaggcatttcaaaatgtggcttgcactgaggcacaggactcctccttgttcccagatgttctttgattttccttggcactaagggaaaggccacttgttccgcctttccaccggtcacatgcctggarccattgttggtttcgccatcgcaacatatccctccggtgacacaaattcacaccatctactgagggatacgccagtgccacgcgtgatcgcattgtctccacctcggattcgcaccgaccctgtttgcacctgtcctggaaagcggtgtccgcttgcaggagccccagggcttttagaagcggggcacgccactgctctttcaacggaggagggaggcagagggctcacgaataa

SEQ ID NO: 941906 - DNA, 596 bp, Homo sapiens
gtccccttacctctgcacgtcctgtctcacaaatgagggacgtcctctcctctgcacataggtagactgacttcctgaatcttttggctgtaatgaatgtcgggaaaccaagggaactgcactgggcctggatggggttggggctgggtgcaggggaggttgcgtcagggctacctgggcggtggaggctttggggtggagtgaatgttgtagaaatctctttgctcctctggtaggcatttcaaaatgtggcttgcactgaggcacaggactcctccttgttcccagatgttctttgattttccttggcactaagggaaaggccacttgttccgcctttccaccggtcacatgcctggagccattgttggtttcgccatcgcaacatatccctccggtgacacaaattcacaccatctactgagggatackccagtgccacgcgtgatcgcattgtctccacctcggattcgcaccgaccctgtttgcacctgtcctggaaagcggtgtccgcttgcaggagccccagggcttttagaagcggggcacgccactgctctttcaacggaggagggaggcagagggctcacgaataa

SEQ ID NO: 941907 - DNA, 616 bp, Homo sapiens
cacctgaaaacctagaaggcatgagataaactgattaacttttctgacagaatgcaaagaaaaggggctgtgctgagaaggggtagcaggtttggagtccctggaatccagaatttgtgagtgtagagcaaggatctggatgaggctgtgcatgagatgcgcacacagagctgagccagccaaggctgccctaggtccttctaagaggagtgcccagggaatcactcacaccttgacagaagycgaaggttttgctggttgcagagggactaagggatcagcctaagcaggaaagtgcactgatctggcggcagaccggaggaggcagtcttctgagaatccatgaaagcacccatggtagaatgagcctgcttcacctacctgccaagtccagagagagagtgatgccaatcaccaggtgagtgtcaggcaagtgagaacttccccgccacccttacagattcaaatgtgacaatgtcttgagacttaaagtctcaagactttatgatctgaatgtgaccagagaatttcatggaggctgccaatcgttataaagggaagaatcccagctgaatccatttaaagggacagtgagggacaaaaataaagatgctct

SEQ ID NO: 941908 - DNA, 616 bp, Homo sapiens
cacctgaaaacctagaaggcatgagataaactgattaacttttctgacagaatgcaaagaaaaggggctgtgctgagaaggggtagcaggtttggagtccctggaatccagaatttgtgagtgtagagcaaggatctggatgaggctgtgcatgagatgcgcacacagagctgagccagccaaggctgccctaggtccttctaagaggagtgcccagggaatcactcacaccttgacagaagccgaaggttttgctggttgcagagggactaagggatcagcctaagmaggaaagtgcactgatctggcggcagaccggaggaggcagtcttctgagaatccatgaaagcacccatggtagaatgagcctgcttcacctacctgccaagtccagagagagagtgatgccaatcaccaggtgagtgtcaggcaagtgagaacttccccgccacccttacagattcaaatgtgacaatgtcttgagacttaaagtctcaagactttatgatctgaatgtgaccagagaatttcatggaggctgccaatcgttataaagggaagaatcccagctgaatccatttaaagggacagtgagggacaaaaataaagatgctct

SEQ ID NO: 941909 - DNA, 560 bp, Homo sapiens
gatgtcctgatgtgcaagctcacaaaggaggataccagtgagttttatgctctgtgccataaccctctaccaccaagtagtgaataagcaggtttctgactatactaaaggcctatcttcattaggactcttggttgcaggagacaaaatcccaccttgatgtagcttaggcagaaccaaaggaatttattaaaagagcactgatctttctcacatcagcaaactgcagcacaggcgcagaaataactgggccttgggaaytgtgaaagccagagaaatagatgccattaaaatgcatactcccactctatttctctctctctctctctctctctcctttcctctcctctctccctctctctggttttggctaggtctctctcttcacatcctcctactgcagaccagaggaaggcacatagccattatcagtgcccaagaatatatcttgcaatggccaccaccaagagagaataattcacattttttcttgacccaattcaaaaattcctaagatgtcatccagttggcccaaaatgggccaggaatctaaccctgga

SEQ ID NO: 941910 - DNA, 738 bp, Homo sapiens
ccatgaagaaaagccacagactgggagaaaatatttgtaacacagagaaggtgcttgtatccagaatagataaagaaacttttacaactcaataataaaaaggcaaacacaaggtaataaaaaaaaattgggcaaaagatttgaacagaaagtttcaccaaagaagacaaacggatagataaagaaacttttacaactcaataataaaaaggcaaacacaaggtaataaaaaaaaattgggcaaaagatttgaacagaaagtttcaccaaagaagacatacggatagcaaataagcacatgaaaagatactcaatatcattagagaaatacaaattataacctcaatgagatagcacacaccagaatggctaaagtttaaaagacagacaaaaccaaatgttagcaaagatgtgagaagaaactagaactctcatacattggtgttgggaatgcaaatggtgcaaccactttgaaaaacagcttggcattgtctgaagaagtgaaatgtatacctctwatgtaactcacccatttcagaaagatgtttaactatatgacaaattttgatttcgattttcatatggtgtacgtccataaagtttttgtccacacaaagacttgtacacaaatgttcatagtagttttattcgtagtaaccaaaaactgaaaacagctcaaatgtgtatcaacagatgaatggatagactgtggtatgtccatacagtgaaatactactc

SEQ ID NO: 941911 - DNA, 553 bp, Homo sapiens
tcaaagcaggggcttctgatgaaagagcggaaaatctagccgctctgggtcaccagcctgccaggcattggctggaacaggaaagccactggctcctctaggcgggggacacacttgtctccaggtgacccgggtgcccagccctcyctcttgttccctgcactcgtggaaagtcaactgccactcggtgtgcattgctcttccactggtaaaggagtcaagagagaagtcacatacttctgtctctttcaaaaggaagaagcacaaactagcaggtgtttcatacacacaaacaaaaatgggcagaagcacatttctaacaatagttccatttaacccatttacggctcctgcccccaaccatatgttatgccatcatactgtagataataataccatatcctaaacttttagaaagaggaaagaaaacccaatcaagtctgtgcaatctcttcattctagagcaatggccactgtgaatggtgccactgtccgacttgtatacaccaaaaagaaacctgcaaaaataccagagccatgaacagcccggggc

SEQ ID NO: 941912 - DNA, 513 bp, Homo sapiens
tgattccagaagggaaaggcttaactagtactgtatgctgccagatctaacatttggcagggagattttggcaaaaaaaaaacacaggcacaaaaatattattgagtaaagagatgattgctgacctgcaggttgatttagccctgcaggtgagcacagtggcccaagaaccagtttccaattgctgagcactcagggaagacttgcttccagcatcctaggtaggctttggttggaactgacatttcaaaggccacaagtacatctgttctcctggagtctgtggattgaccagaaatgtctgtctgtgacctgaggtgtggcttgtatcatccgagcacactccaaagtacacttcrtccatcactggccccaatcacttgtactcgagactacgtgggatggtcagcagttagctgctgtgttagctatgaaaacagagtaattagtgatcgtctccatttccatcccagactgagccagctttgatattcagtcaatgttgctttaagt

SEQ ID NO: 941913 - DNA, 588 bp, Homo sapiens
tgctgtccctggctgttatctgcctcctgaatccagctcacatactccagagccatctttccagcaagggagtttcaggccattgactccactccagcaaatcactgatttgactgagtatatctttctaattctcatttaatrtaggatggaacagattatttctacagaaaccctaagttttaaaaagaaaaaatgcacaacattcccagaagaccagcagcaggagcgacattccacaaccttgaatttaaggtgcttcctgtttacttctctgtgaattatcattgccacctctgtgaaatcacctagccacatgaggtagcaaagctgcctgccacccaacgggctgcaggggtaagtgtgcattgctataatcctcaaagagggaaatttgaaaacccttgagaaaataatgacaaagaaggatctaaattgcacagcaggagcccaataacctagcaaagaacatacagtgatgtgggatgttgagaatagatatttcttgaattataggtaatctaaagttagtctctgttaaaaacataagaaaaagtaacctagaaagaagaaaacacattaactttc

SEQ ID NO: 941914 - DNA, 588 bp, Homo sapiens
tgctgtccctggctgttatctgcctcctgaatccagctcacatactccagagccatctttccagcaagggagtttcaggccattgactccactccagcaaatcactgatttgactgagtatatctttctaattctcatttaatgtaggatggaacagattatttctacagaaaccctaagttttaaaaagaaaaaatgcacaacattyccagaagaccagcagcaggagcgacattccacaaccttgaatttaaggtgcttcctgtttacttctctgtgaattatcattgccacctctgtgaaatcacctagccacatgaggtagcaaagctgcctgccacccaacgggctgcaggggtaagtgtgcattgctataatcctcaaagagggaaatttgaaaacccttgagaaaataatgacaaagaaggatctaaattgcacagcaggagcccaataacctagcaaagaacatacagtgatgtgggatgttgagaatagatatttcttgaattataggtaatctaaagttagtctctgttaaaaacataagaaaaagtaacctagaaagaagaaaacacattaactttc

SEQ ID NO: 941915 - DNA, 588 bp, Homo sapiens
tgctgtccctggctgttatctgcctcctgaatccagctcacatactccagagccatctttccagcaagggagtttcaggccattgactccactccagcaaatcactgatttgactgagtatatctttctaattctcatttaatgtaggatggaacagattatttctacagaaaccctaagttttaaaaagaaaaaatgcacaacattcccagaagaccagcagcaggagcgacattccasaaccttgaatttaaggtgcttcctgtttacttctctgtgaattatcattgccacctctgtgaaatcacctagccacatgaggtagcaaagctgcctgccacccaacgggctgcaggggtaagtgtgcattgctataatcctcaaagagggaaatttgaaaacccttgagaaaataatgacaaagaaggatctaaattgcacagcaggagcccaataacctagcaaagaacatacagtgatgtgggatgttgagaatagatatttcttgaattataggtaatctaaagttagtctctgttaaaaacataagaaaaagtaacctagaaagaagaaaacacattaactttc

SEQ ID NO: 941916 - DNA, 588 bp, Homo sapiens
tgctgtccctggctgttatctgcctcctgaatccagctcacatactccagagccatctttccagcaagggagtttcaggccattgactccactccagcaaatcactgatttgactgagtatatctttctaattctcatttaatgtaggatggaacagattatttctacagaaaccctaagttttaaaaagaaaaaatgcacaacattcccagaagaccagcagcaggagcgacattccacaaccttgaatttaaggtgcttcctgtttacttctctgtgaattatcattgccacctctgtgaaatcacctagccacatgaggtagcaaagctgcctgccacccarcgggctgcaggggtaagtgtgcattgctataatcctcaaagagggaaatttgaaaacccttgagaaaataatgacaaagaaggatctaaattgcacagcaggagcccaataacctagcaaagaacatacagtgatgtgggatgttgagaatagatatttcttgaattataggtaatctaaagttagtctctgttaaaaacataagaaaaagtaacctagaaagaagaaaacacattaactttc

SEQ ID NO: 941917 - DNA, 654 bp, Homo sapiens
ccaggcgcctgtaatcccagcactttgggaggcctaggtgggcggatcacctgaggtcaggagtttgtgaccagcctgactaacacggtgagactctgtctctactaaaaatacaaaaattagctgggcgtggtggcgcatgcctataatcctcrctacttgggaggctgaggcagaattgcttgaacgtgggaggcagaggttgcaatgagccgagatcgcaccattgcactccagcctgggaagcaagagcaaaaccctgtctccaaaaaaaaaaaaaaaaaaaaaaaaggtagctgagaacagtacacagagacaacaaaatatgatattattaaaataaaagtgtgttatatcagatggggttcagggaatatttaaaaattatttttaagaaatacagtgcaatttttagtttacatttagatgaagcttactagattaaaagtgaagtaaacatgaaaacatgtcacacaaaagaaggggaagcagtaaatataacttgtttgaagaactgcgtctacatagaacaagagatcacaaaactggagatagggtatataaagaacatttgttaagtaagttactcttaattaagatcaggttttggactaccagctgataattttgaagtatgtcagctaatgattaaga

SEQ ID NO: 941918 - DNA, 654 bp, Homo sapiens
ccaggcgcctgtaatcccagcactttgggaggcctaggtgggcggatcacctgaggtcaggagtttgtgaccagcctgactaacacggtgagactctgtctctactaaaaatacaaaaattagctgggcgtggtggcgcatgcctataatcctcgctacttgggaggctgaggcagaattgcttgaacgtgggaggcagaggttgcaatgagccgagatcgcaccattgcactccagcctgggmagcaagagcaaaaccctgtctccaaaaaaaaaaaaaaaaaaaaaaaaggtagctgagaacagtacacagagacaacaaaatatgatattattaaaataaaagtgtgttatatcagatggggttcagggaatatttaaaaattatttttaagaaatacagtgcaatttttagtttacatttagatgaagcttactagattaaaagtgaagtaaacatgaaaacatgtcacacaaaagaaggggaagcagtaaatataacttgtttgaagaactgcgtctacatagaacaagagatcacaaaactggagatagggtatataaagaacatttgttaagtaagttactcttaattaagatcaggttttggactaccagctgataattttgaagtatgtcagctaatgattaaga

SEQ ID NO: 941919 - DNA, 606 bp, Homo sapiens
tatgataggaaggaagtcgggtttaatcaggactgtagttatgccaagtgaattcaaaaagtgggatatgggagtcaaggctaaatgcaagggagtgattaaactgattagctatgacattaaataaggaaggagttaaatgagatcacaaagggatgaggtaaagtgaaagggtagtaggatcaatggattaaaataaaagtcactgtgtggttgaataattgtagaagtttcgtactaagcagaatgagctggagtaacagatgtggccacagagaggaatgcttaaaattgaatagaattattacaaatgataagatctagtatatgactatgcatatgagtggctacagcagtgtaaatgacaagaacactggaaaggaggtcaaasaacacaaagactagagtgtctgaaggatcaaatccacatatattaaaattgctaggacttaatagtagcattctacagtttaccactgagttagggaaaaaaacctttgagagatgaaggggaatgacccaagggtttttagatgacagcagcaatgagaggttatgggtgatgacatgaaattaaaatccggatatttcagggagtaaagagaa

SEQ ID NO: 941920 - DNA, 641 bp, Homo sapiens
atgggagaggattgacagagctctctctcaggtcttgaaatctgtcaatgtgggcttgcaaactgggatgcccttgacttctttgtataggcagtgatttgtttgagacatcgttgtgcctgcccagttatgttttgtgatggcatttgtctgacactctatatgaagtaagggacataactgtaatacatatgcagctytttgacagccagaagcccaggaaggactataaattttgcttttgatgtttatttgaaacacaaatactttggaggcagtctattttgttccctaaaaattaatgtaaaccttgttttctatggatcatggtctaagaataatagaaagaaagtaagtgggtgaaagaacatgtcttgggagactgctgtgtggaaaaagaaaaaagaggtcgcagagcccagtatgtactagaattcaaatgctttttcagtggaaactgacaagttatatttttgccttaaatttaacctttccactaaacctgcactcttgaatgcttaatgcattaaaaatgttatcttagtgcatattttttcattcttcattttaacatgcaaaaccagaagtattctgcagagaggattcaggttttcaggacattggctcagttggggatttgg

SEQ ID NO: 941921 - DNA, 579 bp, Homo sapiens
tccctgaggaattgccacactgacttccccaatggttgaactagtttacagtcccaccaagagtgtaaaagtgttcctatttctccatatcctctccagcacctgttgtttcctgactttttaatgattgccattctaacttgtgtgagatggtatctcattgtggttttgatttgcatttctctgatggtgccaactaaggaawtaaaacagggttttacaagagagtgacagggtaaaaacaacaaatgcatttgcttacctgtgtatgtgaggttttttaaaattttgaaatataagtatgatcagttgtacagatgttattttgggaccaagttactcatcaaaaatgacattcctgagactgaagttgctttcaacataataacaaattttaactcttccttcatattcatatgaaagccaagaacattctaatacttaaaaaaaaccctaaaattccatttaatgttgccatctagataaattgtcgcaattatgggtaaacaatggtgcaggtagcaacctcctggagggctgaaaaaaagaggttgagaatagtctgttctgtcaggcttt

SEQ ID NO: 941922 - DNA, 731 bp, Homo sapiens
attggctgctggacaaccacactccaggggaagatcatcttcccactccatcccccttccagctccccattcatcccactgagagccacctccaccattcaataaagcccccacattcatccttcaagtccatgtgcaacctgattcttcctggacactggacaagggcctgggtaccaagaggacactatgctggttaacacttaagccatccacggatggcaaggttaaaagagcgcactgtaacacaacacatgccacttgggctttgggagtcacagacacccacccctggatgctgccgtgaggccggagcccaggggcacttgccccagcttctgcacctgcccatctttgtgctcccccacccataaggggtttgagcatgcatggcagcagaacagacaagccacacccagtcacacatcccatgaggggagtcagggaactctcataggctattattactamataagcaagttgttagaaatgtgaacaccccagacctctaggagcacttaattacacgcttttaaagtataattatccttacttttgtgaatgttccttatctaccccaggtagcaagttgcatacattatatcatttagccccactgtataagtgaggaaactgtggctcaaagtgccttgcccttggttacctggcttgagccagtcctccaaaaggacatttaccagtgttggtattttaaaataaaaacaaaacct

SEQ ID NO: 941923 - DNA, 576 bp, Homo sapiens
aaaaaaaaaattagccaggtgtgatggtgcatgcctgtggttccagctactcaggaggaggctgaggtgggaggatcccttaagccaaggagaccaaggctgcagtgagctatgatcgaaccacggcactccagccttggctacagagtaagaccctgcctcaaaaatatatataagtaagtaaataaatatggacccagataaacctattcaggagatgacctcccttcaatgcagaaggaacatgttaagagagaaatcaggatacctcaagttaagggctatgagagtragaaaaaagtacttgaggaaataagcaaggaggtggctaattctgcctgggggaccagagaagttatacctaaagaggtgatattttatttggaactcagggtgagtaggcattcccagggttgattaggggtagaagccattataggaaccaagcccggagcttttgtaattcaagaacatgtcctaagacctaaatattgcaggagcacatgacaaaacgctgtaagaccaggatgaaaaagatcaggaccaagttgtgaagattatattgaaactgagatg

SEQ ID NO: 941924 - DNA, 657 bp, Homo sapiens
atatttaatgaaattataatatgcattatttcatcaatcctcatgacaaatcttagaagccattttgtacctgtttcacagatgagtaaaccaaatgtagacaggtaaaatgacttatccagaatcacagttaggaaggggcacagccagggttagaaaccaggactggccccagagctcacactcttaatccttgtggtatgctcaaatagctgctttataaccttttaagggagcttcaagtgattttgattatttaatctgtgaaaactgctatgcagtatccaaagtgggcggtcaaattttagatatgattctgctacaaattcagcggtggcttcagccacatcaattcctccctgtggtcttgattctcctctctaaaatgggggggttgatctagaggcctcttgattctcttcctactctttaattctaagcattggtttttttttttytctctctctctttctcagaagtgtggcttagcatcctgtaaaagttcaaccctgcagggactcgaggtccttctttgacatgaacacatttgggcactgtatcttttccaccaagatctccaaaatctgaagccaattaaaagcaaagatcatctagagtggaaatcaaggcacactggacagggcagggggtcaggga

SEQ ID NO: 941925 - DNA, 777 bp, Homo sapiens
ggaggggcctgcaactggtcctccctcacagcttcagaaggacacaaccctgcccacaccttgaacttagacttccagcctgcagaacttgagataacaaatttctgttgtctaagccatccaactggcagtactttgtgacggtagctctagcgaacgaatacagccatatattttctagtaggcacataaaaaaaggtaaaagaggctgggcatggtggctcatgcctgtaatcccagcactttgggaggctgaggtgggaggatcatgaggtcaagagatagagaccttcctggccaacatggtgaaaccccatccctactaaaaacacaaaaattaactgggcatggtggtgggcacctataatcccagctacttgggaggcccaggcaggagaatccctagaactcaggcgggaggttggggtggaggttacagtgagccaagatcacaccactgcactctagcctggcgacagagcgagactccatctcaaaaaaaaaaaaaaaaaaaaaggtaaaaagaaacacatgaaactagttttagtaayatagtttaacccacgataaccaatatattattgctttaacatataatctatgtaaaaaactattaacaagatattttccattcttttatccattcttttgtttggtcttcaaattcccatgtgttctaccctgacaacacacctccactgcactggccacgtgtcaaatgtagagctctttgggtgcctatcctttcatccttgacctgatattcatcagggtttt

SEQ ID NO: 941926 - DNA, 754 bp, Homo sapiens
agatatcaattgattatggatggctcctgtcccccatgtcggatctctaattcacctcctccttaatgacttgtattggcttaagggctccgcattatttgacagcgtcaagctctgctgacaaagaccagcaggtgactttaattgaggacttctattgctagagattttatgcaagacagagcaacagttcaacagacacaaaagaggcctgttaaaaaaaaaaattccgcagcagtgctgggagcagacctggagcgagctactttactttcgtttagttcataatatatattttttttaccccttcagtgatggcatcaggagggakaccccctctccaactcccctacccctggaaattctgcagccgtctctcctctcttgggtttcaatatttatctttagggatgaattatgtccaggcataaattatgtttgacacatcttgatgctgggggaagaaattaaatttttcactgctctgaaaaacattccgcagaacatatcacgctcagagtgcatcctgaaaaaaccaagcgtgctgtttagttttacaaaattaaacggacggcctgtctgaagcatcggaagggttggaggataatgatcagtgagtgaatgaaaggaaaaaaaaaatgaaggctgatagaatcacagacttggagcccccacatgaaggaggactgagctgggcccggcgagaaagaccccctctgtgaggggaggttagaaaactctgcagaggcgccgt

SEQ ID NO: 941927 - DNA, 754 bp, Homo sapiens
agatatcaattgattatggatggctcctgtcccccatgtcggatctctaattcacctcctccttaatgacttgtattggcttaagggctccgcattatttgacagcgtcaagctctgctgacaaagaccagcaggtgactttaattgaggacttctattgctagagattttatgcaagacagagcaacagttcaacagacacaaaagaggcctgttaaaaaaaaaaattccgcagcagtgctgggagcagacctggagcgagctactttactttcgtttagttcataatatatattttttttaccccttcagtgatggcatcaggagggagaccccctctccaactcccctacccctggaaattctgcagccgtctctcckctcttgggtttcaatatttatctttagggatgaattatgtccaggcataaattatgtttgacacatcttgatgctgggggaagaaattaaatttttcactgctctgaaaaacattccgcagaacatatcacgctcagagtgcatcctgaaaaaaccaagcgtgctgtttagttttacaaaattaaacggacggcctgtctgaagcatcggaagggttggaggataatgatcagtgagtgaatgaaaggaaaaaaaaaatgaaggctgatagaatcacagacttggagcccccacatgaaggaggactgagctgggcccggcgagaaagaccccctctgtgaggggaggttagaaaactctgcagaggcgccgt

SEQ ID NO: 941928 - DNA, 754 bp, Homo sapiens
agatatcaattgattatggatggctcctgtcccccatgtcggatctctaattcacctcctccttaatgacttgtattggcttaagggctccgcattatttgacagcgtcaagctctgctgacaaagaccagcaggtgactttaattgaggacttctattgctagagattttatgcaagacagagcaacagttcaacagacacaaaagaggcctgttaaaaaaaaaaattccgcagcagtgctgggagcagacctggagcgagctactttactttcgtttagttcataatatatattttttttaccccttcagtgatggcatcaggagggagaccccctctccaactcccctacccctggaaattctgcagccgtctctcctctcttgggtttcaatatttatckttagggatgaattatgtccaggcataaattatgtttgacacatcttgatgctgggggaagaaattaaatttttcactgctctgaaaaacattccgcagaacatatcacgctcagagtgcatcctgaaaaaaccaagcgtgctgtttagttttacaaaattaaacggacggcctgtctgaagcatcggaagggttggaggataatgatcagtgagtgaatgaaaggaaaaaaaaaatgaaggctgatagaatcacagacttggagcccccacatgaaggaggactgagctgggcccggcgagaaagaccccctctgtgaggggaggttagaaaactctgcagaggcgccgt

SEQ ID NO: 941929 - DNA, 724 bp, Homo sapiens
tctcctgcttcagcctaccgagtaactgggattacaggtgcccaccaccacacttggccattttttgtgtttttagtagagacagggtttcgccatgttggccaggctggtctcgaactcctgacctcaggtgatctgcctcccaaagttctgsaattacaggcaggagccactgcacccggcccattacccaccctttaaccaaagaatcaaccacaaaataggaatcaacactggatggtctcaggagaagtgtgaaaatatcaggcagcaatttcacagaacagaaagaaaggagctacaaggacggggaggaatctgggctgataagaccctaacaaacaggagcgtgctgagctgggtgagaccggctgagtctcaaccgagccccaccccaaaccaaatgacatgctcattaccatacacctgcctccctcagcaccctgacagatccccagcatgcccatatttagtataaaaatggatggcaccacgattctaagaaacctctgtttttttttttcctagaaaacctcatgatgattctaccccctaataagaaaagcccataaaattagaaaccccaactccttcgtgcctgatgagttctcatgagtacgttaacatttctgtcttatgtgtgtactttcgctttgcaagaaaagcttcttgcctgtcccttcattctgattcatccctgaattctttcttgtgacaatgtcaa

SEQ ID NO: 941930 - DNA, 724 bp, Homo sapiens
tctcctgcttcagcctaccgagtaactgggattacaggtgcccaccaccacacttggccattttttgtgtttttagtagagacagggtttcgccatgttggccaggctggtctcgaactcctgacctcaggtgatctgcctcccaaagttctggaattacaggcaggagccactgcacccggcccattacccaccctttaaccaaagaatcaaccacaaaataggaatcaacactggatggtctcaggagaagtgtgaaartatcaggcagcaatttcacagaacagaaagaaaggagctacaaggacggggaggaatctgggctgataagaccctaacaaacaggagcgtgctgagctgggtgagaccggctgagtctcaaccgagccccaccccaaaccaaatgacatgctcattaccatacacctgcctccctcagcaccctgacagatccccagcatgcccatatttagtataaaaatggatggcaccacgattctaagaaacctctgtttttttttttcctagaaaacctcatgatgattctaccccctaataagaaaagcccataaaattagaaaccccaactccttcgtgcctgatgagttctcatgagtacgttaacatttctgtcttatgtgtgtactttcgctttgcaagaaaagcttcttgcctgtcccttcattctgattcatccctgaattctttcttgtgacaatgtcaa

SEQ ID NO: 941931 - DNA, 724 bp, Homo sapiens
tctcctgcttcagcctaccgagtaactgggattacaggtgcccaccaccacacttggccattttttgtgtttttagtagagacagggtttcgccatgttggccaggctggtctcgaactcctgacctcaggtgatctgcctcccaaagttctggaattacaggcaggagccactgcacccggcccattacccaccctttaaccaaagaatcaaccacaaaataggaatcaacactggatggtctcaggagaagtgtgaaaatatcaggcagcaatttcacagaacagaaagaaaggagctacaaggacggggaggaatctgggctgataagaccctaacaaacaggagcgtgctgagctgggtgagaccggctgagtctcaaccgagccccaccccaaaccaaatgacatgctcattaccatacacctgcctcccycagcaccctgacagatccccagcatgcccatatttagtataaaaatggatggcaccacgattctaagaaacctctgtttttttttttcctagaaaacctcatgatgattctaccccctaataagaaaagcccataaaattagaaaccccaactccttcgtgcctgatgagttctcatgagtacgttaacatttctgtcttatgtgtgtactttcgctttgcaagaaaagcttcttgcctgtcccttcattctgattcatccctgaattctttcttgtgacaatgtcaa

SEQ ID NO: 941932 - DNA, 660 bp, Homo sapiens
gtgtttgtcttttcagctaagtattgttacaaaagagtaaaaaagtttttaaaaagtaaaagtttataaagtaaaaatgttacagtacactaagattaatagagtattgaagaaaggaaaatatttttgatatagttagcgtatcataagtgtccagtgctgataaagrctacagcagtgagcagtaagtcctaggccttcccagtcactcaccactcattcactcacggactcagcgagagcaacgtccagtcccgcaagctccgttcctggtaagtgccttaggtggaccattttctatcttttagactatatttttactgtaccttttctgtgttttgagatagatacataaatactcaccattgcattactatcaactacggtatttagtatggtagcatgttgcccaatgcaataggctagaccgtatagccgaggcatatagtcagctacgtagagtgtaagtcttctttatgatgttcacacaatggaattgcctaataatgaatttctcaggatgtagccccatcgttaagtgatgcgtgactgcttttggtccaggagggaggtcctccaagaggtgcagcccttttgtcaccatggagacaaaaaggggttttacacaccccacatgttctttacacatcgggagagctg

SEQ ID NO: 941933 - DNA, 609 bp, Homo sapiens
ccaaaacaatcttgaacaggaagaactaagttagaagactcacacttcctgacttcaaaactcactacaaagctacagtaatcaaggtagagtggcactggcataagaacagacatatagatcaaaggaatagaattaagtgtcagtccagaaataaaccctcaaatttacagttaattgattttcaacattggtgccaagataattcaatgggagaaaaaatagtctcttcaatacacgggggtgggacaactagatatcyacatgcaaaagaatgaagttggacccctacctcacaccatatcaaaaaattaacacaaaatggattaaaggcctaaatgtaacagcgaaaactatacaaaccttaagaaatatatgaataagttattgtaaacttggattagtcaaaggctccttagatatcctgcccaaagcacaagtggcctaaggaaaaaaaaaaaacggaagtttataaacatttaaaaacgttgtactacaaaggacacaataaaaaataataaaaaacacaacccacagaacgggagacaatatttacgaaccatagatttgacaagcatttggatcctgaatatttaaagaactcttaca

SEQ ID NO: 941934 - DNA, 631 bp, Homo sapiens
tgggttctcttttgtttgttacatgctatgataatcattggtttaattaaccccataggctgtaaattctctgaagactgtgattctgtctgtcttgctctttctagtacctattaaagtgtcggcacataccaagtacgtgcttactaagtattttatgaaaaagcaaatgaataaacaaatgatactatctcagctactctgtcctctgcccaatgagcactgtctctgtctttgcctctgtctctctctctctctctacacacacacacacacacacacacacacacacacacayacacacaccctagctgagtttatgcaaacacctaatcttcttagcactcatccatggtctcagtgcttactcagacatgggtgtctgtgtttgtctaatcaaggtaaaccaggctgggaaaggactggtattgctttgaagcttttactaaggactgacataggttgggcttgaaatatgacctgaacagagcagttttgccatttgaatgtggagccttatattgaataaactgaaacttttccacttggttttttccatctctttggagaacaggactggacactaaagcaggctctggcaggagaatgtcctggtcttgcagaatcttct

SEQ ID NO: 941935 - DNA, 631 bp, Homo sapiens
tgggttctcttttgtttgttacatgctatgataatcattggtttaattaaccccataggctgtaaattctctgaagactgtgattctgtctgtcttgctctttctagtacctattaaagtgtcggcacataccaagtacgtgcttactaagtattttatgaaaaagcaaatgaataaacaaatgatactatctcagctactctgtcctctgcccaatgagcactgtctctgtctttgcctctgtctctctctctctctctacacacacacacacacacacacacacacacacacacatrcacacaccctagctgagtttatgcaaacacctaatcttcttagcactcatccatggtctcagtgcttactcagacatgggtgtctgtgtttgtctaatcaaggtaaaccaggctgggaaaggactggtattgctttgaagcttttactaaggactgacataggttgggcttgaaatatgacctgaacagagcagttttgccatttgaatgtggagccttatattgaataaactgaaacttttccacttggttttttccatctctttggagaacaggactggacactaaagcaggctctggcaggagaatgtcctggtcttgcagaatcttct

SEQ ID NO: 941936 - DNA, 611 bp, Homo sapiens
aagcagccaaactgcttctttaagcagatctctgatcccattcctcctgactgaaagaccgggatctctagccacttcctacaggcacattcaggctggcaacaggtcagtaccctctgggatggaggaccttccagaggaaggggcaggctgccatctttgctttttcacagccttcaccggtgatacctccaggtwagggaaaaaccaaggtgactagagtccagaatggacccacagaaaactgcagcagcctatgaaagagtggccagactgttaaaagaaaaacaaacaaacaaacaacaaaagcaaaaaggcccacaaaaaccccatccaaaggtcagcaactccaaagatcgaaagtagataagcccacaaagatgagaaagaaccaacaaaaaaacgctgaaaactcaaaaagccagagtgtcccttttcctccaaatgagtgcagcacttctccagcaagcggtcagaattgggctgaggctggtatggctgaaatgacagaagtaggcttcagaatgtggataaaaatgaacttcactgagctaaagaagcatgttgtaacccaatgcaaaggagctaagaatcatgataaaacaatgcag

SEQ ID NO: 941937 - DNA, 637 bp, Homo sapiens
aagaccagcctggccaacatggagaaactccattctgtactaaaaatacaaaaattagctgggcatggtgctgtgtgcctgtaatcccagctactcggaaggctgaggcaggagaatcacttgaacccaggagactgaggttacagtgagctgagatcatggcactgcactccaacctgggcaacagagtgagaagccatatcaaaaacaaaagaaaaaaacaatttagaatttgattttgggaagtttgttgaaaatatcaaaggttgaaaacacttgatttaggccaggcacggtggttcacacctgtaatcctagtactttgggaggccaaggtgggcgaactgcctgagctcagcagttcgagaccagactgggcaacatggtgaaaccccatctttactaaaatacaaaaaattagccaagcatgttggtgtgcacctgtagtcccagctgaggtgggagaatcgctwgaacctgggaggcagaggttgcaatgagccaagatcatgccactgcactccagcctgggcaacagcgaggttctgtctccaaaaacaaaacaaaacaacacttgatttaacaggatcacagataattatgaagaaatgccaaagtgactaaacatttcaaaggc

SEQ ID NO: 941938 - DNA, 585 bp, Homo sapiens
aattctgcagcctttatggaaagactaagagaggtactaataaagcatgcctccctatcctgagtcagtggagggacagctcatcctaaaggacaatttattacacaggcagctcccaatattagatgaaaactacagaatcagactgtaggaccagagagcamcttagagaacctcctgaaggtggccacctcagtcttttataatatataccaggaggaggaccaggtgaaagagaggaagcaaaagagaaggacataggctctagcagcttctttgcaggcttgcaaagtccaggatccctgagatgcatttactagttgctattggtgtggcaaattagggcactttaagaagggagtgcccagaaagcaagaagaaaccaacatgaccctgttcagaatgtggcagggaccactggaaatcggactgcccctggagatgaaggtgactgggttcagaacaatctcacaggtggtgttcaaacccctggctccagcagctcaaactgccattacagcacaggagctccaggtgattctggaaattgaaggaagaaaggtagatcttctggaccctgggacc

SEQ ID NO: 941939 - DNA, 585 bp, Homo sapiens
aattctgcagcctttatggaaagactaagagaggtactaataaagcatgcctccctatcctgagtcagtggagggacagctcatcctaaaggacaatttattacacaggcagctcccaatattagatgaaaactacagaatcagactgtaggaccagagagcaccttagagaacctcctgaaggtggccacctcagtcttttataatatataccaggaggaggaccaggtgaaagagaggaagcaaaagagaaggacataggctctagcagcttctttgcaggcttgcaaagtccaggatccctgagatgcatttactagttgctattggtgtggcaaattagggcactttaagaagggagtgcccagaaagcaagaaraaaccaacatgaccctgttcagaatgtggcagggaccactggaaatcggactgcccctggagatgaaggtgactgggttcagaacaatctcacaggtggtgttcaaacccctggctccagcagctcaaactgccattacagcacaggagctccaggtgattctggaaattgaaggaagaaaggtagatcttctggaccctgggacc

SEQ ID NO: 941940 - DNA, 602 bp, Homo sapiens
catcactttcaggtaccccaatcatatgtagatttggtcttttcacatagtcccatatttcttggaggctttgttcgtttctttttattcttttttctctaaacttctcttctcacttcatttcattcatttcgtcttccatcactgataccctttcttccagttgatcacatcggctactgaggcttctgcattcttcatgtagctctcatgccttggttttcagctccatcaggtcctttaaggacttctctgcattggttattctccttatccattcgtctaattttttttcaaagcttttaagttctttgccattggtttgaatttcctcctgtagctcagagtagtttgatcttctgaagccttcttctctcaattcctcaaagtcattctccatccagctttgttccattgccrgtgaggagctgcattccttttgaggtggagaggcactctggtttttagagtttccagttttttctgctctgtttttttcccatctttgtggttttatctatctttggtctttgatgatggtgatgtacagatgggtttttggtgtggatgtcctttctgttggttagttttccttctaacag

SEQ ID NO: 941941 - DNA, 604 bp, Homo sapiens
caatgccctatgcagcctcaggaaatgttgccctgcatcacggttgatccagctccaaccatggctaaaaggggccaaggtacagcttaggccattatttcagaagttgcaagccataagccttggtggcttccatgtggtgttaagtctgcaggtgcacagagtgcaagagttggggcttgagagcctctgygtagatttcagaggatgtatgaaaatgcctggatgttccaggaagaagtttgttgcatgcagccctcatggagaacctctactagaggagtgtggagggaaaatgtgggcttggagcccccacagagagtccccactggggcactgcctggtggagctgtgagaaaagggccaccatcttccagactgcagaatagtagatccaccggaagcttacaccatgcacctggaaaaaccacaggcactcaacgacatcccttcagaggagccatgagagctgagccctgtggaggcagagcttcccaaggccttgggagccctccccttgtatcaatgtggcctggacgtgagacatggagtcaaaggagattattttggggcattaatattaatggctgccctgctgggttca

SEQ ID NO: 941942 - DNA, 601 bp, Homo sapiens
ttgacaaataaaaaatacatatgcagtgtacaacgtgatgctttgatatacacatctcttgtaaaatgattattgaaataaagctaattaatatatttatcaccacacatagctaccattttttgcttgtttgtttttgtaatgagaacatttaggatctattctcttagcaaattttaagtacaccatacactattattaattttatttcaacatactgtatattagagttccagaatttattcatcatgaataactgaaactttttaacctttgaccaaaatctcccaattcccccactcccagccccagacaaccatcattctrttctctgcttctatgatgtcagcctttaccttaccacatataactgatatcatgcagtatttttttgggggggtgctggcttatttcaggtagcataatatctaccaagttcacccatgctgtcacaaatgacagggtcctcttcctcttcctcttcctcttcttcttctctttctccttctttttttttttttttttttttttttttgagatggagtttcactcttgttgcccaggctggagttcagtggcttgatctcagctcactgcaacc

SEQ ID NO: 941943 - DNA, 584 bp, Homo sapiens
atcagacatagatttggtcttttcacatagacccatatttcttggaggctttgttcatttctttttactcttttttctctaaacttctcttcttgcttcatttcattcatttgctcttcaatcactgataccctttcttccagttgatcgaatcggttactgaagcttctscattcatcacgtagttctcatgccatggttttcagctccatcaggtcatttaaggacttctctacactggttattctagttagccattcgtctaatcttttttcaagctttttagcttctttgtgatgggtactaacttcctcttttagctcggagaagtttgatcatctgaagccttcttctctcacctcgtcaaagtgattctctgtccagctttgttccattgctggtgaggatctgtgttcctttggagggggagaggcactctgatttttagaattttcagcttttctgctctgttttttccccatctttgtggttatatttacctttggtctttgatgatggtgacgtacagatggggttttagggtggatgtcctttctgtttgttagttttccttctaactgtca

SEQ ID NO: 941944 - DNA, 628 bp, Homo sapiens
aaaatgaaggagaaattgggacatttgcagataaacaaaaactgagggcactcattgcttgtagacatgccctgtgagaaatgctaaagagaattctttggactgaaatgaaaagacaatagaaagtaatttgaagacatatgaagaaataaagaacacggtaaaatataactccataggtatttattatagccagtatttttgtatctttggtttataagttattttctttataatttaaaagacaaatgaacaaaatgctacctatgtcaaagggcaaacaatgtataaagatataataagtgataattacaacaaagkgggtggtataagttatatctgagcacatttttgaatgttatttaaattaatttggtattaggtcatataaaattgttataatttaagataatctaaatacccaggataaccactaggaaaataactaaaaaaatgcacaataaataaattagaagagaataaaaatagcacatatgcacaaaaaggcacatacacaaatgtgattaaacaaaaagaaggtagtaatagcgaaactgaggaatgatctcccctcccctgaatatatggcatagagaaaacaaacaaaaaaacagtattcttaccctta

SEQ ID NO: 941945 - DNA, 569 bp, Homo sapiens
tgggtataaagtgttatctcatagtggtgttgatttgcatttccctgatgattactaatgttaaacacctttcacatacctactggccatgtttatgtcttctctggtataataatgtctattcagctctttaatatactacaaaatattattaaaccctaaaaaataagaatgattctatcatttgccaaaacatgaatgagcctaaaggacattatgctaagtgaattaaaccagacacagaaagaaaaatattgcatgatctcacttacatgmaaaatctttttttaaaaaagtcaaaaacaacagagatagagaacaaaataatgattaccaagggcatgagtcggggagaaaatggagagatgtagtttggaggacacaatgtacaagacgattggaatgaataagtctacagatctaatgtataacattaggatattggtgataaagttgtactatattttaatttcatgctaaacaaaattctttagcagctctttccaaaaatcaaaatgaatagataaccatgtgagttaatgaatatgtttatttgcttcattctggta

SEQ ID NO: 941946 - DNA, 612 bp, Homo sapiens
tcttgggacatgtctgtctacagtggttggtggttccaggttgcaagtttctccagtgctttggctgaattacatggaaacataaagaaaatccaggcacctcaccgtagtgccaacctcaagtcccaaggtctctaagaagtcaccttgctctttccacctctcagagtcttcctaggtttgactgtttttactgtagtaaaatatacataacacaaaatgtatgatttaaccagttttaggtgtatggttctaagtatacttagtatagcacttaagtacattaacaytgtggggcaaccatcactaccacccttctctagaatacttttcatcttgcaaaactgaaactgattcattaaacaccatttctccctatttctgcctccccccagcccttggaaaccaccattctaataacccaagctatgatttttgaagtatttgtccttttgtgactggcttatctcacttgaaataatgtcctcagcgttcatctatgttgtagcatgtgtcaggatttcctttctaaggctggatgacattccattgcatatactgcattttgtttatctccttctttgttgatgggacactcaggttgcatctgcc

SEQ ID NO: 941947 - DNA, 647 bp, Homo sapiens
gctgaccctttgggtgggcatgctactcttcagttagttgggccctcttcactagttttttcactagtttttagcacctgcttgcccctgttagcaggtatggacttttacctgaacactcagattagaaagagatggaaaaaccacatggccttgcagaataagggagatctcatctccatgcaatgaggaatcagtggcaggcctctttgcagaacctccctggaagggaattgctatggttgcatgtgtcccacaaagtttatgtgttggaaacttaatccccaatgcagcagttttgagaggagggagtaatgtacagaaaaatatccagaaatctgtacagttgatatggcttggctctatgtccctacccaaatctcctgttgaattgtggtctttagtgttggaggagaggcctggggggagatgattggatcatrggggcagatttcccccttgctgttcttgtgatagtgagtgagttctcatgagattatcactccccctcctgctccaccatgtgaaggatgtgtttgctttctcttccccttcttccatgattttaagttttctgaggcttccccaaccatgcttcctgtacagcctgtggaactgtgagtcaactaaacctctttaactcataa

SEQ ID NO: 941948 - DNA, 769 bp, Homo sapiens
tgtgtcccacaaagtttatgtgttggaaacttaatccccaatgcagcagttttgagaggagggagtaatgtacagaaaaatatccagaaatctgtacagttgatatggcttggctctatgtccctacccaaatctcctgttgaattgtggtctttagtgttggaggagaggcctggggggagatgattggatcataggggcagatttcccccttgctgttcttgtgatagtgagtgagttctcatgagattatcactccccctcctgctccaccatgtgaaggatgtgtttgctttctcttccccttcttccatgattttaagttttctgaggcttccccaaccatgcttcctgtacagcctgtggaactgtgagtcaactaaacctctttaactcataaattacccagtctcaggtcattctttatagcagtgtgagaacagattartacaacagggttccccatggatttgttataaaaattaggttgtggatgtctatcataaaactccaggaggctgggcaaagggtgattggaaagcagtgagcaggcactttcagagctcatgtgggacatggggggactcctgcattcctaccagccagagtggagcgtccttgtagaaaatctggtgcgttcagttgacatcccagaaaagtcatgtcttggcaggaggagtaaagaagccctaaataaagtctaatctaacccctttccttcagtcaaagcttcaaaacaaacctcaaaagggtcagggtaatttctaag

SEQ ID NO: 941949 - DNA, 569 bp, Homo sapiens
aggaaatcaagttaatagcagaaaacaatgtaatagaaaacggaataataaagaaagtcaataagataaaaagttctttgaaaagatcaataaaattgataaactcctaataaaaagtcataaaacaaactaccaacatcactaataaaagagggaataaaaattacagactatgtagagattaaagaaataatatggggatattatagaagctttacggcaacaaatttgacaacccagaggaaatgggaaaatttttcaaaagaaaaattactaaagcccagtgaagaaaaaatagataayctgaatagctttataaccattaaagaaattaactttgtaattaaaaactttcacacaaggaaaattccaggctccagtgacttctctagtgaattcaatcaaatatttaaggaagtagtagtatcacttttatacaaacttgcagaaagtaaaggaggaggaaagactttctaacttaatttatgggatcagcataatcctgatatcaaactcagagaaaagatactacaagaaaaaaatcttataggccaatgtccacaaggaat

SEQ ID NO: 941950 - DNA, 569 bp, Homo sapiens
aggaaatcaagttaatagcagaaaacaatgtaatagaaaacggaataataaagaaagtcaataagataaaaagttctttgaaaagatcaataaaattgataaactcctaataaaaagtcataaaacaaactaccaacatcactaataaaagagggaataaaaattacagactatgtagagattaaagaaataatatggggatattatagaagctttacggcaacaaatttgacaacccagaggaaatgggaaaatttttcaaaagaaaaattactaaagcccagtgaagaaaaaatagataacctgaatagctttataaccrttaaagaaattaactttgtaattaaaaactttcacacaaggaaaattccaggctccagtgacttctctagtgaattcaatcaaatatttaaggaagtagtagtatcacttttatacaaacttgcagaaagtaaaggaggaggaaagactttctaacttaatttatgggatcagcataatcctgatatcaaactcagagaaaagatactacaagaaaaaaatcttataggccaatgtccacaaggaat

SEQ ID NO: 941951 - DNA, 569 bp, Homo sapiens
aggaaatcaagttaatagcagaaaacaatgtaatagaaaacggaataataaagaaagtcaataagataaaaagttctttgaaaagatcaataaaattgataaactcctaataaaaagtcataaaacaaactaccaacatcactaataaaagagggaataaaaattacagactatgtagagattaaagaaataatatggggatattatagaagctttacggcaacaaatttgacaacccagaggaaatgggaaaatttttcaaaagaaaaattactaaagcccagtgaagaaaaaatagataacctgaatagctttataaccattaaagaaattaactttgtaattaaaaacyttcacacaaggaaaattccaggctccagtgacttctctagtgaattcaatcaaatatttaaggaagtagtagtatcacttttatacaaacttgcagaaagtaaaggaggaggaaagactttctaacttaatttatgggatcagcataatcctgatatcaaactcagagaaaagatactacaagaaaaaaatcttataggccaatgtccacaaggaat

SEQ ID NO: 941952 - DNA, 569 bp, Homo sapiens
aggaaatcaagttaatagcagaaaacaatgtaatagaaaacggaataataaagaaagtcaataagataaaaagttctttgaaaagatcaataaaattgataaactcctaataaaaagtcataaaacaaactaccaacatcactaataaaagagggaataaaaattacagactatgtagagattaaagaaataatatggggatattatagaagctttacggcaacaaatttgacaacccagaggaaatgggaaaatttttcaaaagaaaaattactaaagcccagtgaagaaaaaatagataacctgaatagctttataaccattaaagaaattaactttgtaattaaaaactttcacacaaggaaaattccrggctccagtgacttctctagtgaattcaatcaaatatttaaggaagtagtagtatcacttttatacaaacttgcagaaagtaaaggaggaggaaagactttctaacttaatttatgggatcagcataatcctgatatcaaactcagagaaaagatactacaagaaaaaaatcttataggccaatgtccacaaggaat

SEQ ID NO: 941953 - DNA, 607 bp, Homo sapiens
tgagccactgcgcccagctaccttggagcttttatataccttgtcaatccaacctggctttttctttctggcaggatgaactacctcttagcacaaagtattgcaatcaactgttcctcacctgtgtgaaaaacagcctttagaaggttgaactaaataaaaaaatatataatctcacacttttaaataggkgggccttcattttagcttttcgtaggttagtctaaagtgatacaaatgaatatatcttttattgattagctggaaataatttagactctctgtctctttcaaattattaaaaacagataaagtggctactctgggatggatctgattttatttctccactgtttttcattttttgattttttaatttttcattttcttaattttcttgataatcaggaaaggctgaatattatgctctgtagaaagctacttgggtctttggatatgttgatgtgactacaaaaataacaataaaaatagtttacagcacttactgtgagttggacactattcttactgctttacatatgctaactcaatgtatctaaaacccctttgaggatggttctatttctcctattttatagatgaggaa

SEQ ID NO: 941954 - DNA, 547 bp, Homo sapiens
ggaggccattatcctaaatgaattaacacacgaacagaaaaccaaacactgcatgttctcacaagtgggaactaaacattaggtactcatggacataaagactgcaacagtcaacattgggtactactaaagtagggagaaaaaagggaagtaagagttgaaaaactattgggcattatgctcagtacctgggtgacaggatcacatttgtactccaaaccttaacatcacacaaaatacccaggtaacaagcctgcacttgtagaccctgaatcaaaaataaaagttgaaaaaataagctattttggctcccaattagtcttacatatttgatccaaatttcacyacatttggctgatagtcttaataattgtatttctgttctgttttcacttggagttttcttccttaggtttttattctttggggatttgtgagagaatgagggctttttgtttgttttattgtttttaagaatttctaaaaggaaagtagcattaaaatgcctttattccaccatctttaactagaactatctgtagccatg

SEQ ID NO: 941955 - DNA, 636 bp, Homo sapiens
agaaaggaccccccgctggagggggcacctcacgtctggggccacaggatgcagggtggggaggacagaaaggaccccccgctggagggggcaccccacatctggggccacaggatgcagggtggggagggcagaaaggaccccccgckggagggggcacctcacgtctggggccacaggatgcagggtggggaggacagaaaggaccccccgctggagggggcaccccacatctggggccacaggatgcagggtggggagggcagaaaggaccccccgcgggagggggcacctcacgtctggggccacaggatgcagggtggggagggcagaaagaacccccgcgtgcctaagcaggttctggtgggcgtcctggctgggtgtaggcagaggctggctcccggaggcccgaggggggctctgagaagggggcggcctgagggggagcccaggacagcccctatgctgcccccgtccagcccggcccctcaggctgtgtttcctgagacctcgctagtctaacccaaacctcccagctctgtcattcaaaggaatggattaggtccccgtgggtccatttccctgttttgggtgctgaggacagagcttctggacagactcagccctcgccctctg

SEQ ID NO: 941956 - DNA, 642 bp, Homo sapiens
ggcatagctcagaggaaagtccgaggacaaggagagacagatccccatgttactcacacatctgatgaatcctgggagagcccccagttgagatgggatagtccccttgacccctttgcgggacttgtgaaggggtggcttgctttctcagcccacagtgctcaaaccctttgcgtggtggaggtagcggggagggtgcagggagcatgcaggtgagcaggtgcaggagctggggcaagcaactttgggcaccagcaagaacgaaccccgtaggggcccatggcagtgcctaggcattgcccatgacccctggagccycagcgggtgtgtgtcacagtgcactcttttagctttgccatccatggattgcttaaatgttaaacagttcagtggagagtcaatgcgacagcctcttgcacccacacctgtgcccttttccagtgtccaggaggaatgaggtcgtgtgaaaaaattggagggtggtgaatatggaagattttagtgagcagaggaagtggctctcggcaagaaggggagctagaagggggatggaatgggaagataatggagttcggctgtcccaggctgaactcttctccaaagtcctgccatcaagccatccctctgaagtcaggctgcttc

SEQ ID NO: 941957 - DNA, 796 bp, Homo sapiens
aaagcatcttagcagataagcctattaaaattgtgcctttgtaacaatgttgtggttgctagaataaataccattaacaaatgccttttgagtatgcttgatagtgcttttgttttggattcactttttatgctttaaccttcatttgcctctagaaacccaaaacacaataaagtacagaataagaccttacgtaataaaattcagaattttcttaaattgcatgtctgagtgttctaaaaatttttcaacatttccctttcacaagtgacttattcccccagttaagttattcacggtttcaccccacagcgtgaggggcagatagaaaaaaaaaaaaggaaacatcactaccgaattgaaagtagggtataatactaagttcacaggaaatcaagaaaaaatgacatacctgaaatctctcttttggtaaaatctatttcaggtgcataccacccctttcccggaaaagaacagataacctctttcttggttattttaatggggcaggatcagatgaggaggtgtgggatgctaactsatgttagatcacacaagcataataaataccaagctatgcttgataaaatgaacgtaaggcaaaagtgttacagtctctgattttaatgagtcaatctcaaggcaaagctataaccttttccatgtgaaccttaaaacggaaatcctacgtgtttggctcagctaccatagacatgtcttgccccagagttccagtgtatttttcacctttagtttcttggctcctctccgcctctacaccagcctcatatccaca

SEQ ID NO: 941958 - DNA, 612 bp, Homo sapiens
aagaccagcctggccaacatggagaaactccattctgtactaaaaatacaaaaattagctgggcatggtgctgtgtgcctgtaatcccagctactcggaaggctgaggcaggagaatcacttgaacccaggagactgaggttacagtgagctgagatcatggcactgcactccaacctgggcaacagagtgagaagccatatcaaaaacaaaagaaaaaaacaatttagaatttgattttgggaagtttgttgaaaatatcaaaggttgaaaacacttgatttaggccaggcacggtggttcacacctgtaatcctagtactttgggaggccaaggtgggcgaactgcctgagctcagcagttcgagaccagactgggcaacatggtgaaaccccatctttactaaaatacaaaaaattagccaagcatgttggtgtgcacctgtagtcccagctgaggtgggagaatcgctwgaacctgggaggcagaggttgcaatgagccaagatcatgccactgcactccagcctgggcaacagcgaggttctgtctccaaaaacaaaacaaaacaacacttgatttaacaggatcacagataattatgaagaaatgc

SEQ ID NO: 941959 - DNA, 461 bp, Homo sapiens
atgagatatcatctcacgccagttagaatggtgatcattaaaaagtcaggaaacaacagacgctggagaggatgtggagaaataggaatgcttttacactgttggtgggagtgtaaattagctcaaccattgccgaacacagtgtggcgattcctcaaggatctagaactagaattaccatttgacccagcaatcccattactrgttatatacccaaaggattataaatcatgctagtataaagacacatgcacatgtatgtttattgtggcactattcacaatagcaaagacttggaaccaaaccaaatgtccatcaatgatagactggattaagaaaatgtggcacatatacaccatggaatactatgcagccataaaaaagatgagttcgtgtcctttgcagggacatggatgaagctggaaactgtcattctcagcagactatcacaaggacagaaa

SEQ ID NO: 941960 - DNA, 600 bp, Homo sapiens
ggatgaaaagagttagtacacacacaattgttagaggaggatctggcaaaaatatattagacatagctatttttattattgatgtatagattatgcagtaaactatatcaacatcaataatcctttttacccagaaacaagttggagagaagaaaaggaaaatgaattttaaaaactgaatgaaaggtaaaagtatcattggaatatttggagctgactgtaaagactgtgacaccttccgattttttgtcccttatcatcaattcaggtattccctgaagcacaatcagttgaccaaactaagagcagtgccctcaggaaagaataaaatgaatagtttaatttatcaacatcatttacccaggttatttgagttctttttatttatttatttwttttttgagacggaatctcgctgtcgcccaggttggagtgcagtggcgcgatctcggctcgctgcaggctccgcctcccaggttcacgccattctcctgcctcaacctcccgtgtagttgggactataggcgcccgccacctcgcccggctaattttttgtatttttagtagagacggggtttcaccgtgttagccaggatggtc

SEQ ID NO: 941961 - DNA, 712 bp, Homo sapiens
tggaacaattgtattgaaaaataatatggcagtttcttcaaaagttaaccatacacctaggatatgatcatgtattcctctcctaagtatttatttcaagagaaatgaaagcatgtctatacaatggtttgcacatgamtgttaatagcagctttattcataattgccagaaactggaaacaatccaaacatccatcaacaggtgaataggtaaacaaattttggtatgtccattcaatacagtaccgcttagcaataaaaaggaaggaaccattaataacactaacatggataaatctcaagataattatattgagtgaatgaaccgaagcccccaaaacaagaatatgatacatactatgtgattctattgatataaaattttacaagatatgaattaatctggggatgaagattggggacaggtggggcagaggtgggagggagatattacaaagggacatgaggaaactttgggggtgatataaatgttccccatcttgatcaaaatgatgttttcataggtgtatgcatatgtcacactcatcaaattgtacactttaagtacaggcagtctattgtgtgtcacttatatctcaattaattaaaagcaaacaaaaccaaaacaaacaagaaaagaggtatgtgggtggataaaaaaatagagcatagacttgtgaaagagataccaattaggagattactccagaag

SEQ ID NO: 941962 - DNA, 698 bp, Homo sapiens
gaacaattgtattgaaaaataatatggcagtttcttcaaaagttaaccatacacctaggatatgatcatgtattcctctcctaagtatttatttcaagagaaatgaaagcatgtctatacaatggtttgcacatgaatgttaatagcagctttattcataattgccagaaactggaaacaatccaaacatccatcaacaggtgaataggtaaacaaattttggtatgtccattcaatacagtaccgcttagcaataaaaaggaaggaaccattaataacmctaacatggataaatctcaagataattatattgagtgaatgaaccgaagcccccaaaacaagaatatgatacatactatgtgattctattgatataaaattttacaagatatgaattaatctggggatgaagattggggacaggtggggcagaggtgggagggagatattacaaagggacatgaggaaactttgggggtgatataaatgttccccatcttgatcaaaatgatgttttcataggtgtatgcatatgtcacactcatcaaattgtacactttaagtacaggcagtctattgtgtgtcacttatatctcaattaattaaaagcaaacaaaaccaaaacaaacaagaaaagaggtatgtgggtggataaaaaaatagagcatagacttgtgaaagagataccaattaggaga

SEQ ID NO: 941963 - DNA, 523 bp, Homo sapiens
atactgcatgttctcacttataagtggaaggggcaggatgcggtggctcatgcctgtaatcccagcattttgggaggccgaggtgggcagatcatttaagtccagtagttcaagactagcctgggcaacatggggggacccccgtctctacgaaaaatacaaaaaataagccaggcatggtggcctacacatgtagttctagctacttgggaggctaaggtgggaagatcgcttgagcctgggaggtcgaggttgtagtgagccaggatcacaacactgcactccagcctgggcgacagaacgagaccttgtctcaaaaaaaacaaaaaaakgtgggcactaacatggggtacatataggcataaagatgggaacaatacacactggactccaaaatggggtagggatgaaagagagggaagactggaaaactatcagctactatgttcactatctgggtgatgggtcagtcataccccaaacctcaccatcatacaatatacctttgtaacaaacctgcata

SEQ ID NO: 941964 - DNA, 845 bp, Homo sapiens
ggtagggtggtgcatgcctgtaatcccagctactggggaggctgagacaggggaatcgcttgaacccggcaggcgtaggttgcagtgagccaagatcacaccactgcactccagcctgggagacagagcgagactccatctcaaaaaaaaaaaaaaaaaaaaagtaagcagatgaatacccatgtaccttgcagcactatcacaatagccaagaggtgaagaaaccccagtgtccatcaacagaggaatgaataacaaaacacggcatatgcatacaatggaatattagcctcaagagggaaacaaattytaacagatgatatgacgtggatgaactttgaatacattaggttcagtaaaataagccagtcacaaaaggaccaataccatataattccacttttatgtggtacctagagcagtcaacttcatagagacagaaaacagaatgatggttgccaggggctgggagcagaggagaatgggcagttattgtttaatgggtgcagagtttcagttttgcaaattgaaaagagttccagagatgcatggtggtgatggtagtaaaacgatgtgaatgcactcagtgccacaaaactgtacatttaaaaatggtgaaatggtaaattttatgtctattttaccccaattttaaaaaaataaataattgtttaaagagaaggcagagcgtacaaagaagcatgcctgtagtattgatcactaaaagaattaattgttcctgttggtaacaggttaggccttcggccctccgtgagaaagatctgggaagttgcagggccttcccctaaagccacagtaagtcagtgtctgaactttcctccagt

SEQ ID NO: 941965 - DNA, 609 bp, Homo sapiens
gtgtgccatggtggtttgctgcacctatcaacccatcacctaggttttaagccctgcatgcattagctatttgtcctgatgctctcccttccctttcccccaccctccacaggccctagtgtgtgttgttcctctccctgtgtccatgtgttcacattgttcaactcccacttatgagtgagaacatgcagtgtttggttctctgttcctgtgttagtttgctgaggatggtggcttccagcttgtgatggcgaattttatatgtcaagttgacttggcaatagagtgcttagatatttagctaaatattattctggatgtttctctgagagtgtttttggatgagattaacatttaatgtggtagactgagtaaaacagattgtcgtccctaacgtgggtgggcctgagccaatcaactgaaggcctgaatagaacgaaaaggctsacccctccctccaataagacagaattttttccttactgactgcctttgaactgggacattggcttttttcttgccttcagacactaacttaaatactggctcttcctgggtctcaaaccttctagcctttagtctggaactaaaccattggctctcctacat

SEQ ID NO: 941966 - DNA, 770 bp, Homo sapiens
tcagttccactgtggtacatcatgtgcattcctagaagccaccacactatgcaggatcatgccttaaaaaccacagaggctatgggaagagtggggtgagaggcagagcactcaaatgcatgagcagtgacattaaaaaaatgaacctgacaatggagtacgggaaaaacagcagataggaggcaggactaacttgcagctcccacttggatggacggagcagcatgtggagacccacactgtgaacttttgctccaggaagtactgcaggaacataccaggaaagccaagagaatccacagaccctttgaaggaggtrgattgctgctccaggctctgggacagccaaggaaatgtgagtctgcttgctttctcagcaggaggcttgtagcctggggcaagttctcagccctgctcacactccaaccctggggcatggtggaagtgagactggccttttgggctgtgggctgcatgagagctgggtgagtcctgtggctgctggcttcctcccacttctttggcaacctgtgtgacgcagtagaggcagccataatccccctgggaacaaaactgcattggcctgggagccgtaccaccatcacccacagcatctgcagcaagccccacccaaggagagtctgagctcagacatgcctaaccctgcctccacctgatggtctttctctacccaccctggtagctgaagacaaaggacataatctcttgagagctccatggctccacccaccacctgatcctccctatac

SEQ ID NO: 941967 - DNA, 586 bp, Homo sapiens
tcgccatccttgagaacaccctggactgccaaaatggcacacctttgagatgcagttccatttgcctcttcacccttccaactcagaggtcacctttttttttttttttttttttttttgagacggagtctcgctctgtcgcccaggctggagtgcagtggcgggatctcggctcactgcaagctccgcctcccgggttcacgccattctcctgcctcagcctcccaagtagctgggactacaggcgcccgccactacacccggctaattttttgtatttttagtagagacggggtttcacygttttagccgggatggtctcgatctcctgacctcgtgatccgcccgcctcggcctcccaaagtgctgggattacaggcgtgagccaccgtgcccagccgaggtcaccttttatgctggttaagcctctagccctgccctatctctgcagaatttaggtttccctctgccatgcttctgtagtgctgagtctacatctccgtggccacacttgccatgctgtgtgcaagcttctgtgcgtctcactctttgcattcaccgtgcttatgccatcatctgccatgga

SEQ ID NO: 941968 - DNA, 586 bp, Homo sapiens
tcgccatccttgagaacaccctggactgccaaaatggcacacctttgagatgcagttccatttgcctcttcacccttccaactcagaggtcacctttttttttttttttttttttttttgagacggagtctcgctctgtcgcccaggctggagtgcagtggcgggatctcggctcactgcaagctccgcctcccgggttcacgccattctcctgcctcagcctcccaagtagctgggactacaggcgcccgccactacacccggctaattttttgtatttttagtagagacggggtttcaccgttttagccgggatggtctcgatctcctgacctcrtgatccgcccgcctcggcctcccaaagtgctgggattacaggcgtgagccaccgtgcccagccgaggtcaccttttatgctggttaagcctctagccctgccctatctctgcagaatttaggtttccctctgccatgcttctgtagtgctgagtctacatctccgtggccacacttgccatgctgtgtgcaagcttctgtgcgtctcactctttgcattcaccgtgcttatgccatcatctgccatgga

SEQ ID NO: 941969 - DNA, 586 bp, Homo sapiens
tcgccatccttgagaacaccctggactgccaaaatggcacacctttgagatgcagttccatttgcctcttcacccttccaactcagaggtcacctttttttttttttttttttttttttgagacggagtctcgctctgtcgcccaggctggagtgcagtggcgggatctcggctcactgcaagctccgcctcccgggttcacgccattctcctgcctcagcctcccaagtagctgggactacaggcgcccgccactacacccggctaattttttgtatttttagtagagacggggtttcaccgttttagccgggatggtctcgatctcctgacctcgtgatccgcccgcctcggcctcccaaagtgctgggattacaggcgtgagccaccgygcccagccgaggtcaccttttatgctggttaagcctctagccctgccctatctctgcagaatttaggtttccctctgccatgcttctgtagtgctgagtctacatctccgtggccacacttgccatgctgtgtgcaagcttctgtgcgtctcactctttgcattcaccgtgcttatgccatcatctgccatgga

SEQ ID NO: 941970 - DNA, 657 bp, Homo sapiens
gttccagaccagcctgaccaacatggagaaaccccgcctctactaaaaatacaaaattagccgggtgtggtgccacgtgtctgtaatcccagctactcgggaggccgaggcaggagaatcgcttgaatccaggaggcggaggttgcggtgagccaagatcatgccattgcactccagcctgggcaacaagaacgaaactctgtctcaaaaagaaaacgtacgggyattgccttcccactgacttcaaaaacaaaaacaaagggcaaacagaaaagcaaagcattccttccatctaggaggggtcattcctatagtttaaaagcttaaaagtaccaagtttatgtggtaacttccaaatttgtctttgtaaagaacaaagctatctattttacatccaacacatagccaatgataccaagaacatatacaaaatacatttccataaggtagaggtaaaaactaatagcctgagagctactggattctgacttctcttatttacttgtaaatcctaccgtctcaaacctagatggttgacaatcccaagactgagtgtacaaattaaagccatgttctaaagccacttcgtcctaattagcacccccacttacagcaaaagcagagaaaacatctacaatgaaattcaaagttactatc

SEQ ID NO: 941971 - DNA, 624 bp, Homo sapiens
aggccgaggtgggaggactgcctgagcccaggaggctgaggcttcagtgagctgagatcacaccactgtgttccagcgtggacgacagagcaagaccctgcctccataaaaaataattcaaaactatgaggcatggatgaatatgagtttgcaggcagattcccccatgtggtcaggacacatgaatatgccacttctgtacatcayctgttgcagtatttcttgtattaaattccagtgatccactctaaatgtatgtccttttcaatgtcatccataactttagataagtgattttctttttttttctttttctttttttttttttttagatggagtctcgctctgtcgcccaggctggagtgcagtggcgcgatctcggctcactgcaagctccgcctcccgggttcacgccattctcctgcctcagcctcccgagtagctgggactacaggtgcccgccaccacgcctggctaatttttttgtatttttagttgagacggggtttcaccgtgttagccaggatggtctcgatctcctgacctcgtgatccgcccgcctcggcctcccaaagtgctgggattacaggcatgagccaccacacccggctgtgattttcttat

SEQ ID NO: 941972 - DNA, 600 bp, Homo sapiens
cccaactgaaaacctgagcaaaggggctggatacgatggctcacgcctgtaatcccagcactttgggaggccgaggtgggcagatcacctgagtctaggagtttgaggccagcctagacaacatggtgaaacccagtctttacaaaaatacaaaaaaaattagctgggtgagtggcacacacctgcagtyccagctactcagaaggctgaggtgggaggaccacttgagcccaggaggtggaggttaacagccagccgagattaggccactgcagtccagcctgggcaacagagtaagaccccatctaaaaataaaataaaataaaataaaggttttaaaaagactgagcaaaggcttaacaaacactttaaaaaaaggatatacaagatatacaggcagccaaaaactgttcaacatcattaaccattagagaaatgcaaattaaccatagttaatgccactacatacttgtgagaagaccacgcacacacagaacaattgctggcaaagtcaaatactggaggggatgtggagccactggggctcccattggttgctggtggaaggcagcatggtgcagccatcctggaagatggttt

SEQ ID NO: 941973 - DNA, 591 bp, Homo sapiens
gagataaataggttacataggacctgcacccaaaaatattattagaactaaatggaaaaagacaaatatgtaatcaaatagtatacaaataagtacacataataagcctaacaggtacagtgatagaaagatgaaatggataaattgggatccaaagaaggaatattcagttttatcagtgtgggcagtaggaagtgtcaggaaaagcttcatactggaagcaaagctttaactaagtcatcagggatgaaaaagtgtctttgaggaagataaaagggaaagatagaaggaatagcacatgcacactggccttgcatgacttgggctcwgcaagtagttcactttcgctgggtgcaattggcaaggaaagtcacagaggagagcaggaacagattgaggaaggccaatgatgcccttccaagggagctggagttggtcatataaataacagagaaccacagaatgcctttaactataaggaaggcatagttttgtgttttagaaaggtttttctggcaggagtatgaaggatgaatcagaggtgtatgcaatttgagggagggtgtgcaatttgaagaagaaactaaagag

SEQ ID NO: 941974 - DNA, 617 bp, Homo sapiens
tgtgcgggtgcccaccccacatttcccttccacactgccctagcaaaggttcaccatgagtgccctgccccggcagcaaacatctgcctggacatccaagcatttccatacaacctgtgaaatctaggcagaggttctcaaatctcaatacttgacttctgtgcacctctacaaaaaaatacaaaaaattagggagggagggatgtggtggcacatgcctgtggtcccagctacatgggggactcacacacaagaatcacttgaactgggaagcagagtttgcagtgagccaagatcatgccactgcactcaagcctgggcaacagactgaggctctgtctcaaatattartaacaataagataaaataaataaataaaaagatcattcatcacgaccaagtagggttataccagggatgcaaggatggttcaacatacatacaaatgaattaacgtgacacatcataccaaaagaatgaaggaaaaaaaccatataatcatttcaaatgatgatgaaaaagcatttgataacattcaatatccctgcatgataagaattctcaaaaatcagggtatagaaggaacatacctcaaaacaataaaagtcaagtcacat

SEQ ID NO: 941975 - DNA, 617 bp, Homo sapiens
tgtgcgggtgcccaccccacatttcccttccacactgccctagcaaaggttcaccatgagtgccctgccccggcagcaaacatctgcctggacatccaagcatttccatacaacctgtgaaatctaggcagaggttctcaaatctcaatacttgacttctgtgcacctctacaaaaaaatacaaaaaattagggagggagggatgtggtggcacatgcctgtggtcccagctacatgggggactcacacacaagaatcacttgaactgggaagcagagtttgcagtgagccaagatcatgccactgcactcaagcctgggcaacagactgaggctctgtctcaaatattagtaacaataagataaaataaataaataaaaagatcattcatcacgaccaagtagggttataccagggatgcaaggatggttcaacatacatacaaatsaattaacgtgacacatcataccaaaagaatgaaggaaaaaaaccatataatcatttcaaatgatgatgaaaaagcatttgataacattcaatatccctgcatgataagaattctcaaaaatcagggtatagaaggaacatacctcaaaacaataaaagtcaagtcacat

SEQ ID NO: 941976 - DNA, 743 bp, Homo sapiens
agcatttagccccggctgcagtggtgtccagtatcacgctggagactaaggcctttccaaccctcctgattcggcccccaccatgccacctgccccagccccaccccatgtaattttccctcccccaaagagaaaacacagcggaacccttttgtggaaaggccatcagccgtgcaaatacccacccctccctgagagctgtggctcccagcagttcccgcccctcccaagcagaaagtgtcctctcccctggtagggccgggctgaccgcccacgggacaggtggcccctcggtgaggtcaactcaaagggctcctcattcccacggaagcgccggaggggcaggccattccctggcaaacgagccaaagacgagacatacacacacacacacacacacacacacacacacacac[327 bp omitted]

SEQ ID NO: 941977 - DNA, 658 bp, Homo sapiens
agaggcaaaatggcagcgttttaacttgtatacagcctcctagggacatccggctggggagggaagaacgcctcaactgagcatgcatacaactcagtaaacacactgtgcatgctctcccaagcactagcaggccactgtgcatgtgggcagccaaccccaagggaagaatcaggggagaagggacacctgtccccggaagtatgccaacgtataagaccccaggtcgaaaggtcaaaccccacatatctccttcaagttgcccacttgggcctcttccaagtgtactttccttccttttgttcttgctctaaasctttttaataaacattcactcctgctctacagtttgtctctgtctcttcttcggctttctgtccctcagtcaaattctttcttctaaggaggcaagaattgacattgctgaggacctgcatggatttgccactgctaacagggggagatatggtatgtgctcattttaggtagggaagttggtggaggcctctttaaggaagtgacatcttaaactgatcccacaaagatgaggaaatgccaacctcctgaatcgccaggagagaatattgcagaaggattcacaaaggtaaacaccttggccttaaaaggagcttggcatgctttagaaacctaaaggaag

SEQ ID NO: 941978 - DNA, 589 bp, Homo sapiens
tccttcctttggctatgatgcctgattggagttactcatccttgtgcccatacattagctaaacccattaacctgacaggactccactgatgtccttttcaacaagcagcccaacagccgatttaaccaatatagatttattgcttaacgctaragagaagagagccagggagggaggaaatgagggagagcactagcaacccctcctcccgcatcctgatgggcagccagctatcctctcctccagcaattactgacactaattagtggcttactgcagatctgagtgaagagactgacacaggcacaatcctgcctaccatattccaagcgcagtcagagtcctcaggaaaggcccctgtcaagggcctgtctaggaagaacttggcagctcagaaaccaagcagattggaaggggtggagggaagatctataaaatggcctcataaccagggtctgttctgcttcctgctcccagctccggtctggctgctgcttttctcagctgaggccctgggcttctgtggtgaacagcactcagctggctgcaaatcatggaggcatatggtttagattcgtgaagccaagt

SEQ ID NO: 941979 - DNA, 601 bp, Homo sapiens
accaccatgcccagctaatttttgcattttttgtagagacagggttttactgtgttgcctaggctggtctagaactcctgggctcaagcagcacgcccccatcagcctcctaaagtgctgggattacaggtatgagccgagaaggctgactgttttaaaaaatatttcctggatataagtcctttgtcagatacgtgccttgcaaatatttttttctagtctgtacttattttttcatcttctaattagagcttttcacagaggaaaagttttttattttgatgatgttcaatgtatatacttttaaagttttwtggataatggttttggtattagtcctaaaaacccttctgcacgcactagttcctaaagaatcccttacattttttgttaagttttatacttttacatttacatttaaacctgtgacccattttgagttaattttttagtaaggtatgaaatttattttacctttactttttgcctatggttatctcatggctcctgcaccattggttgaaaaaactattttattacattgaattgtttttgctgcagcattgtgtagttttcaacgtatctatcttacacaggtcta

SEQ ID NO: 941980 - DNA, 599 bp, Homo sapiens
atttgtatttcctgagatattgaaggagagtataggagataaagggttaaggatgaatccttggtttaggcttgagcaaacagaagatgtgagttgatattaactgagatgggaaaggctgaaaaaggaacaggcttggggagagcagttcaggagtttggttttgaacatgtgatgtttgagatctccaatagactaaagtaatatgtactgtagggagctggatatacaattgcaggagttagatgtacagaaggcaatagcagctctggataggtccaagtagattataaatttgaaagtcatcagcatatacatactactgacatccttggggcagaygtgatcagcgagagaacaggaacagaggagttataaagtctgagtccaaagacacgtctattaaaagtttgagtaaataagtaagaactagcaaagaagaataagataaagtggctagttaggagaacaccaagaaggtagtatcctggaaaccaagggaagaaagtatatcggggaagaaggaatgatcaatgatatcaagtgctattgatgaggcaagtcagatgaggcctgagagatgaccacagtaacataca

SEQ ID NO: 941981 - DNA, 754 bp, Homo sapiens
tttatcatgagctgggcattatgaatgcaacaaaagaaaaatatggattctttggggccttatattcaaggggtggggtggaataaataaaaatatagcaggcagtggtataatactgcaatagagaaacatgaatacaaaactatgagggaaaatgggccctgggatggggcatggggaaagaggagctgctgttgtaagcagtgggagagggggtcaaggaaagcctcactggtacctgagctttgagcagagatctgaaggaggtgagagagcaagtcctttgtctatcagggtgctatagactgacagtttatattcctctaaaattcttagttgaaatcctatcgccaaaggtatgacattaggaaggagggtgtctaggaggcgattaggtcatgaaggtgaacagagccctcattaatgaaattagtgcccttatgaaagagaccagagagctccctttgccccttctccataacagagcatggtgagaagagagccatctatgaaacagaaaggggaccctcaccagacacygaatgtgccagcaccttgatcttggacttcctagcctctagaaccataagaaatgcatttctgttaattataagccacccattctatggtatttttgtcgtaacagcccaaacggactagaacactagaactttcaggcagagggaatggaaaagacacatataccaaagaaggagccttcttgttttggttcagagaattttacagaggctag

SEQ ID NO: 941982 - DNA, 572 bp, Homo sapiens
ctggccaacatggtgaaaccccatctctactaaaaaaagaaatacaaaaattagctgggcgtggtggcgcatgcctgtagtcccagttgcaagggaggctgatgtaggagaattgcttgaacccgggaggcagaggttgcagtgagccgagattgcaccgctgcactccagcctggcgacagagcaagactctgcctcaaaaaaaaaaaraaaagaaaaaaagaaaaacagcaaaccttggggaagcgtaaaaatctgatttcccgacttaccatattaaaatattcaaatgtccaatttccaataaaaatgtagaaggtattcaaagacacaagaatacagagcctactcaaggaaaacaaattccttccttaaggaagcccagatattggacttactaaacaaagattttaaataaattaagtgtcatcaaaaatgacaaataactaaaagaaatgaggccaacaatgtctgaactgagttggaaattgtaaaaagaaaccaagtaggaatctaaagctgaaaagtaaaatgaccgaaatttaaaaatccactagaggttttaacaaccc

SEQ ID NO: 941983 - DNA, 572 bp, Homo sapiens
ctggccaacatggtgaaaccccatctctactaaaaaaagaaatacaaaaattagctgggcgtggtggcgcatgcctgtagtcccagttgcaagggaggctgatgtaggagaattgcttgaacccgggaggcagaggttgcagtgagccgagattgcaccgctgcactccagcctggcgacagagcaagactctgcctcaaaaaaaaaaagaaaagaaaaaaagaaaaacagcaaaccttggggaagcgtaaaaatctgatttcccgacttaccatattaaaatattcaaatgtccaatttccaataaaaaygtagaaggtattcaaagacacaagaatacagagcctactcaaggaaaacaaattccttccttaaggaagcccagatattggacttactaaacaaagattttaaataaattaagtgtcatcaaaaatgacaaataactaaaagaaatgaggccaacaatgtctgaactgagttggaaattgtaaaaagaaaccaagtaggaatctaaagctgaaaagtaaaatgaccgaaatttaaaaatccactagaggttttaacaaccc

SEQ ID NO: 941984 - DNA, 541 bp, Homo sapiens
actgagtaacaagcagaggttggaagaatttggagggctcagaagaagacactaagctgagggaatgtttgaaacttctaagagacggattaaatggttgtgaccaaaatgctgatagtgacatggacagtgaaggctaagctgatgaggtctcagaagaaaatgaggaatgtattggaaaccggagtataggtcacccatgttttgtcctggcacagagcttggctgcatgtcctacggatctgtggaagactgaacttaagactgatgacctagggtatctggcagaagaaatttctaagcagcaaagcattcaagatgtggcctgactgctcctaacagcctttratcaaatataggagcaaagaaatgacttaaagttggaactgatatttaaaagggaatcaaagcataaagtctggaaagtttacagcctggtcctgtggtacagaaagaatccaagcccaagcaggctgtggagcaaccacttgctagagagattagcatgactcaaatggagccaagtaacaatccaagacaa

SEQ ID NO: 941985 - DNA, 716 bp, Homo sapiens
gggctttggaagtgctcatctctgtcaagtcatctgttaattcctctgttgtgaagtctctgagatcttgaatttctccaagatccatgtattgaaatctttactctcctgcttccaccaccttttttttttttttttttttttttttgccatatccacgatctcttttatgatttccttgattggctctgtcataaatcctgtgaagtcatatacaacatccggatatagttttctccagaaggaatttattgttttggggtcaatggcttctatggctttttctgtaacagtcacgccatcttcagtgccagtggtgtcatccttccagtctttcatggtgttctatcagggttctcttccatagcattaaccatcctttccatggagtaccattgtaatgaaccttaaagttccttatgccctcctcatctagaggccgaattagagacactgtctgggggcacatagaccactttgatgtctttgrtgttgaactgctggggttctgggtggccaggggcatgctcaatatcaaaggagcttcaaaaggcagccccttactagaaaggtatgtcctgacttcagggacaaagcatggtgaaacctatccagaaaaatggttctcactgtccaggcctttgtattgtgcaaccaaaagactggaagctgatgtttatcttttctcttcaaggctgggtgttagcagttttata

SEQ ID NO: 941986 - DNA, 716 bp, Homo sapiens
gggctttggaagtgctcatctctgtcaagtcatctgttaattcctctgttgtgaagtctctgagatcttgaatttctccaagatccatgtattgaaatctttactctcctgcttccaccaccttttttttttttttttttttttttttgccatatccacgatctcttttatgatttccttgattggctctgtcataaatcctgtgaagtcatatacaacatccggatatagttttctccagaaggaatttattgttttggggtcaatggcttctatggctttttctgtaacagtcacgccatcttcagtgccagtggtgtcatccttccagtctttcatggtgttctatcagggttctcttccatagcattaaccatcctttccatggagtaccattgtaatgaaccttaaagttccttatgccctcctcatctagaggccgaattagagacactgtctgggggcacatagaccactttgatgtctttggtgttgaactgctggggttctgggtggccrggggcatgctcaatatcaaaggagcttcaaaaggcagccccttactagaaaggtatgtcctgacttcagggacaaagcatggtgaaacctatccagaaaaatggttctcactgtccaggcctttgtattgtgcaaccaaaagactggaagctgatgtttatcttttctcttcaaggctgggtgttagcagttttata

SEQ ID NO: 941987 - DNA, 521 bp, Homo sapiens
atttacaaatactttttcccattctgtgggatgtcttttcacttttttgatggtatcttaggaagcacaaaagttttaattttgttgatgttcaatttattcattttttctttggtagctcatgctttgggtgtcatatctaagaaaccactacctaatctaaaattaatctaagattttgccctatgttttcctcaaggggttttaaagtattagctctttcatttaggtctttgatcaattttgagttgatttatatatgtatatcatgaggtagggggtccaacttcattcctgaagcctcctgaaacatatctagayctttgtttaaagcgtaatttacgtccccagatactttgaatgtttaacttcaattgctttcaagaaactattctttactactctaagttgtatgtctttagacaagtttcttaatctttatatgccttagcttcctcatctgtaaaacagggataataatataacctatctcaaagggttgtgaggattaaatcagttag

SEQ ID NO: 941988 - DNA, 513 bp, Homo sapiens
tactccttgagaatagcaaccccaagacaaataattctcagattctccaaggttgaaacaaaggaaaaaatgttaagggcagccagagagaaagttcagattacctacaaagggtagcccatcagattaacagtgggtctctctgcacaaaccctacaagccagaaaagagtggtgcccaatagtcaacaatcttaaagaaaagattttgcaaaccagaatttcayatccagccaaactaagtttcataagtggaggagaaataaaatcctttacagacaagcaaacgctgaaggattttgtgaccaccaggcttgacttacaagaactcctgaagggagtactaaatatagaaaggaaaaactgataccagccactgcaaaaacatactaaaatataaagaccaacgaaactaagaagaaactgcatcaactaatgtgcaaaatgaccagctagcatcataatgacaggatcaaattcacacataccaatattaacattaaatgtaaatggg

SEQ ID NO: 941989 - DNA, 513 bp, Homo sapiens
tactccttgagaatagcaaccccaagacaaataattctcagattctccaaggttgaaacaaaggaaaaaatgttaagggcagccagagagaaagttcagattacctacaaagggtagcccatcagattaacagtgggtctctctgcacaaaccctacaagccagaaaagagtggtgcccaatagtcaacaatcttaaagaaaagattttgcaaaccagaatttcatatccagccaaactaagtttcataagtggaggagaaataaaatcctttacagacaagcaaacgctgaaggattttgtgaccaccaggcttgmcttacaagaactcctgaagggagtactaaatatagaaaggaaaaactgataccagccactgcaaaaacatactaaaatataaagaccaacgaaactaagaagaaactgcatcaactaatgtgcaaaatgaccagctagcatcataatgacaggatcaaattcacacataccaatattaacattaaatgtaaatggg

SEQ ID NO: 941990 - DNA, 596 bp, Homo sapiens
aggcatgtaccaacacacctggttaatttttatatttttagtagagctggggtttcaccatgttggccaggctggtcttgaactcctgacctcagatgatctacataccttggcctcccaaagtgctgcaattacaggtgtgagccaccgtgcctggcctgggtttatttttggactttccaattctatttcactagtctgtgtgttctttttatgccagtaccgtgctgttttaattactgtagctttgaaatcaggaagtgtgagtcctccaatattcttctttttcaatattattctagctatttagagccccttgcaattctacgtgaatttgagaatgaacttttctgtttctgaaaaaaaaaagtcattggaattttgatagagattgtattgaatttgtagattgctttgggtagtattccatcttagcaatacagatgctctgcaayttacaacagggttacattctgataaacccatcataacctgaaaatgttgtaagtcagaagtacatttttgacttatgatattttcaacttattacagatttctctggacataaccacattgtaagttgaggagcatactga

SEQ ID NO: 941991 - DNA, 591 bp, Homo sapiens
ttccccatatgaatccacatgaaggcagacggttgtgcttagacaagcctctacagtgttcactaaatgcattagtaataaaatactcttttacatttctactctcattcacattttcttacatatgtttataattagtactggttggctggttggagatttttaaaatctttttggtttagattacctarccaccatctgttgtcacagaattttcagtgtcattaagatgagtcaaggccgggcgcggtggctcacgcctgtaattccagcactttgggaggccgaggcgggcggatcacgaggtcaggagatcgagaccatcctggctaacatggtgaaacctcgtctctactaaaaatacaaaaaattagccgggcgtggtggcggtcgcctgtaatcccagctactcgggagactgaggcaggagaatggcgtgaacctgggaggtggagcttgcagtgagcggagatcatgccactgcactccaggctgggtgacagagcgagattccgcctcaaaaaaaaaaaaaaaaagatgagtcaatacaattcacactttctcttggtaactttatgcctgtgtgtcagt

SEQ ID NO: 941992 - DNA, 473 bp, Homo sapiens
tgcaccatccgaagctcatccagttcctgctccaggactcccaggccagggccctgtaacccaacaaagcagggggtcactctcctacttgagaagcatcctgccccattgctgcattcctaatcatgtatagtcacagcagactcacctcacattctcctgccagccccgatgggaggcattttatatacctttatttctcacaactctgaaaggagtgctgttttgtgctcattttgctgataaggaagctgaggttcagagaggttaaaggaacttgctcmatatcacatagctggtcagtttattgagttgagacagtagtctaactccaaagcccataactgaattacaatcactgtggtttgaatgtttgtcccatccaagacttatgtgaaacttaatccccaatgcggcagtatggagaagtgaggcctgtaagaggtggctgggtcatgaggactctgccctca

SEQ ID NO: 941993 - DNA, 604 bp, Homo sapiens
gagtcctgacaggcaaatggcatcatgatggagcattccttgggactggcaacattcggctgccagtgtgggggcagggaggcagtctattattaggaacatgcctgagatgtgagtttgcagaattcattgctctasattaaaatcacttttgcagggaacaaactctggagatggtggaggtacgtagacttcctctcagcttgaaagatgtatcaaactttaagaggggcttggaccacccatttgcaaattgctttttcatgcagttaattttatttatttttcatccaaatcttaaagcagacccctcctttaaaagtgtatggccagccgcgctggctcatgcctgtaatcccagcactttgaaaggccaagatgggtggatcacctgaagtcaggaattggagaccagcctgaccaatgtggtgaaaccctgtctctactaaaaatacaaaaattagccaggtgttgtggcgggcacctgtaatcccagctactcgggaagctgaggcaagagaattgcttgaacccaggagttggaggttgcactgagccaagatcatgccattgcactccatcctgggcaacaagagtgaaactc

SEQ ID NO: 941994 - DNA, 574 bp, Homo sapiens
tgtctgcacagactccctggccaaggcacatgagtgctcctcccagccctgccctctggcccccgtttcagaagggaccactcgggacagtcaatccaagtgatgtgtccaagcaggccctcctaggagctatcagggtgcaaatgcaggtcataatcacaccagccacccaccctttgaccgctgctccccagacacccccaacgcctgagccctgccgcgaggggtatggccagcctgccatctccaggagttgccggagcaccccaggctggtccatggtgctgggtccagccctcagaaagacctttccagcargcttgggttcctgcctcttgggtggtctgataaactgtcccctggctggtgtttgggccaactgtaccagcttccatctgatgtttctggcagaggaattcttgaggcctctgcacctcgttagccctcagaatgggactcactaggctcaagtgtgggtcattactcggatctgtgagcttgttgctgtgaccttgggtccgctgaccagatggcccagatgcagggggcccgggaagccccaggccctgcagga

SEQ ID NO: 941995 - DNA, 574 bp, Homo sapiens
tgtctgcacagactccctggccaaggcacatgagtgctcctcccagccctgccctctggcccccgtttcagaagggaccactcgggacagtcaatccaagtgatgtgtccaagcaggccctcctaggagctatcagggtgcaaatgcaggtcataatcacaccagccacccaccctttgaccgctgctccccagacacccccaacgcctgagccctgccgcgaggggtatggccagcctgccatctccaggagttgccggagcaccccaggctggtccatggtgctgggtccagccctcagaaagacctttccagcaagcttggrttcctgcctcttgggtggtctgataaactgtcccctggctggtgtttgggccaactgtaccagcttccatctgatgtttctggcagaggaattcttgaggcctctgcacctcgttagccctcagaatgggactcactaggctcaagtgtgggtcattactcggatctgtgagcttgttgctgtgaccttgggtccgctgaccagatggcccagatgcagggggcccgggaagccccaggccctgcagga

SEQ ID NO: 941996 - DNA, 727 bp, Homo sapiens
tcttctaattcaattcaactctgagatgatctacctggaggtaggctcaggccccacatgttgaggccccagtcccacaaggctgcccctacttcagataccagttgcaagccctgggttgttttcccagtgcttctgaccaaatgaccataaattagggtttctatgaccccatccttgggtttcattaatttgctaccacagctcatggaactcagggaagcacttatgtttactggtttattaaaaagggtattatgggctgggcgtggtggctcacggctgtaatcccagcactttgggaggctgatgtgggtggatcacctgaggtcaggagttcaagaccagcctggccaacatggtgaaaccccatctctactaaatatacaaaaatcaactgggcttggtggcgggcacctgtaatcctagctacttgggaggctgaggcaggagaatctcttgaacccgggaggcggaggttgcagtgagccaagatcacaccactgcactycagtctaggtgacaagagcaaaactctgtctcaaaaaaaaaaaaaaaaggatattatgaaggctacaggggaagagatgcatagggcgaggtatgggggaaggggacatgaagcctccatgccctctccaggcaccatcctccaggaacctccactgtcgtgaagccctctgaaccctgctttgttgtgtttgtatagaagctcattacataggca

SEQ ID NO: 941997 - DNA, 799 bp, Homo sapiens
agagctgatgcctgctcccaggggtgtaatgcagaatgaggactgtgttcacactcggggacaggagttcagggacagtgcaggtggccaccaggggttctgggggagaatggcgcaggatcactggctcaccaggagcctggttgagcatacaaggacttgagattgaacctggatggctgggaggcactttgggaaaaaaaaaggataaaaaatgaaaacataaaaacagtatcaaagagaactgtgccgtgttccactctttaccaagccactttccaactttcaggctgtttttttatcaaggttccaacagtgaccacccccaggggcatrcctcaggcaggctgggggttagggagcccacccctccccactgggctcccacaccgcattgtcactggtcactaaacaagccacttgccagaccccagccacttacctgaaccaagcctgtccttttgctaggctttctaacctgaagtgctttattggggcctgtgggtccagcccagctagggaacaccccagtgccctgcagaaagtggtttgtgtgaatgatgcagaaaaccaagaaggttacaaggcagagcgtgattgattccctggggctttattgtaataactttaatcttctggaactcatctggtatgaatttaggagctgggcggcatttcactgaaattccccattaatgcagctctcactgctctgccggccttggtggttgtggagtttgccacatgtatgattttgccctgggctccttattaatgagccttgaaaagagggtgtgga

SEQ ID NO: 941998 - DNA, 793 bp, Homo sapiens
attcctccacgtattcctaggaagcatgcccacctgggttgctgctgttcacgctgaagaatattatccttcctctcgcatttccctgggggttagcagagctctttggtcacatgggtttctaagaagatgcaccttctggctkgatctgaaagtgaatacttggggagggaacctctgaaagatgaccattttccaaacctccatttccaagcaggcttggtgagcataaaagaagccgccagcctttcaaagaggagtcctcactggcagattttcacagcacatttggggcctgaaatttttttaaggcctcaccttgtattctaagctactaaatttagctgctttttagcgtggttctttgctcctaaagcctatgacttctccagtttcccacccttcaaaatgtgtggtttgtgatttttttttttttttaagagaaagaaaagtaggccaggtgcagtggctcatgcctgtaatctcagtgatttgggaggccaaggcaggaggatcactggaggccagaagttcgaggccagcctgggcaacatagtgagaccttgtctctcttaaaaaaaaaaaataataataataaaactagctgagtgtggtgacatgcacctgtagtcccagctacttgggaggctgaggcagaggatcatttgagccccccagagtttgaggcttccgtgaaccatgatcacaccactgcactccaccttaggggaaagaacgagaccctgtctctacaagaaaaagcaagaaaaataagatgattttaaaagggcag

SEQ ID NO: 941999 - DNA, 793 bp, Homo sapiens
attcctccacgtattcctaggaagcatgcccacctgggttgctgctgttcacgctgaagaatattatccttcctctcgcatttccctgggggttagcagagctctttggtcacatgggtttctaagaagatgcaccttctggctggatctgaaagtgaatacttggggagggaacctctgaaagatgaccattttccaaacctccatttccaagcaggcttggtgagcataaaagaagccgccagcctttcaaagaggagtcctcactggcagattttcacagcacatttggggcctgaaatttttttaaggcctcaccttgtattctaagctactaaatttagctrctttttagcgtggttctttgctcctaaagcctatgacttctccagtttcccacccttcaaaatgtgtggtttgtgatttttttttttttttaagagaaagaaaagtaggccaggtgcagtggctcatgcctgtaatctcagtgatttgggaggccaaggcaggaggatcactggaggccagaagttcgaggccagcctgggcaacatagtgagaccttgtctctcttaaaaaaaaaaaataataataataaaactagctgagtgtggtgacatgcacctgtagtcccagctacttgggaggctgaggcagaggatcatttgagccccccagagtttgaggcttccgtgaaccatgatcacaccactgcactccaccttaggggaaagaacgagaccctgtctctacaagaaaaagcaagaaaaataagatgattttaaaagggcag

SEQ ID NO: 942000 - DNA, 609 bp, Homo sapiens
gtcatagatgtgcaagtttacctggcccagtggatctcagtgtggctgcagagtagaattgcctgctgggggtcagggagaggtttttaaaaataccagtgccaggccgggtgtggtggctcacgcctgtaatcccagcattttgggaggcccaggcaggtggatcaggaggtcgggagatccagaycatcctggttaacacggtgaaaccccatctctactaaaaatacaaaaaattagccgagcatggtggtgggcgcctgtagtcccagctactcgggaggctgaggcaggagaatggcgtgaacccgggaagcggagcttgcagtgagccgagattgcaccactgcactccagcctgggcagcagagcgagactccgtctcaaaaaaaaaaaaaaaaggcagtgccaagataccaaagattctgacccaatccatgtgaggtggggcctgagcattagaggtttttttttctttagttttggcaggtggttctaacatgcaacaagggttgaaaatcattgataggactctaacttcatcttttaagatgagcaaacagatccacagaggttgtataaaatagaagcacataacttccagtagtc

SEQ ID NO: 942001 - DNA, 631 bp, Homo sapiens
cccagtggatctcagtgtggctgcagagtagaattgcctgctgggggtcagggagaggtttttaaaaataccagtgccaggccgggtgtggtggctcacgcctgtaatcccagcattttgggaggcccaggcaggtggatcaggaggtcgggagatccagaccatcctggttaacacggtgaaaccccatctctactaaaaatacaaaaaattagccgrgcatggtggtgggcgcctgtagtcccagctactcgggaggctgaggcaggagaatggcgtgaacccgggaagcggagcttgcagtgagccgagattgcaccactgcactccagcctgggcagcagagcgagactccgtctcaaaaaaaaaaaaaaaaggcagtgccaagataccaaagattctgacccaatccatgtgaggtggggcctgagcattagaggtttttttttctttagttttggcaggtggttctaacatgcaacaagggttgaaaatcattgataggactctaacttcatcttttaagatgagcaaacagatccacagaggttgtataaaatagaagcacataacttccagtagtcagtgtactatgcctctttgaaagatccttgtccccaacttgtatata

SEQ ID NO: 942002 - DNA, 480 bp, Homo sapiens
gcagtcatagatgtgcaagtttacctggcccagtggatctcagtgtggctgcagagtagaattgcctgctgggggtcagggagaggtttttaaaaataccagtgccaggccgggtgtggtggctcacgcctgtaatcccagcattttgggaggcccaggcaggtggatcaggaggtcgggagatccagaccatcctggttaacacggtgaaaccccatctctactaaaaatacaaaaaattagccgagcatggtggygggcgcctgtagtcccagctactcgggaggctgaggcaggagaatggcgtgaacccgggaagcggagcttgcagtgagccgagattgcaccactgcactccagcctgggcagcagagcgagactccgtctcaaaaaaaaaaaaaaaaggcagtgccaagataccaaagattctgacccaatccatgtgaggtggggcctgagcattagaggtttttttttctt

SEQ ID NO: 942003 - DNA, 587 bp, Homo sapiens
gctattttcatgctaatggcacttcaatatttttcatctgcctcttcttacatgttggccgaggtttatactatgaatgatttacattttccagaaacctgaaatattggcattatctacctgctcacaactatagcaaaagcattcacaggatacatgctcccatgaggccagatatcattctgaggcgctacaataattacaaatctactatcagccatcccatatattggaactgaccttgtccagtgaatctgaggtggattctcagttgacaaagccacccttaaaggaytttttgccttccatttcatcttatccttcataattacagctctagcatctgttcaccctttattcttacaggaaacaggatctaacaacccttcaggggtttcatcagatgctgacaaaattaccttccaccccaagttatatgttaacttgatgtctaagttaaaaagctgctgacttctagacagagccttaataaatatatagggaggctgaaaattaatattctatcactttgatgtttaatagtttgtaaacatttagatatttatttgaaagggcagaaagattca

SEQ ID NO: 942004 - DNA, 606 bp, Homo sapiens
gaacaggagtggtgagagtcgttttccttttcttcttccagttctcaaaaggaatacttttagcttttgctcgttcagtataattttggctgcgtgtttgtcacagatggccctaattattttgaagtaagtttctttaatgcctgatrttgaagtttttttaacatgaagttgttgttgagggttttttaacatgaatttattgagggtttttaacatgaaggaatgttgaattttatcaaaagccttttctgtgcctattaagatgatcatgtggttattgtttttagttctgtttatgtgatgtatcacagttagatttgcacaggttaaaccaactttgcatggcaggaataaaacctacttggtcatggttggattagctttttgatgtgcttctagatttggattgctagtgttttactgaggatttttgcatttgtgttcatcagggatactagaagttttatcttttcattttgtctttgccagattttggtatcaggatgatgctggccttatagaatgagctagggaggagttcctcctccttgaatttttggaatagtatcagtaggattgtgactggcttttctttttgcctct

SEQ ID NO: 942005 - DNA, 594 bp, Homo sapiens
cagaagatgataggaaaatgtgggaaagtttggaacttcctagagacttgttgagtggctttgacaaaactactgacagtgatatgaaccataaggtgtcaggtagagatgaggaacttattaggaactggagcaaaggtgactcttgttatgttttagcaagtagactggtggcattttgtccctgccatagagatttgtggaattttgaacttgaaagagatgatttagggtatctaatggaagaaatttctaagcagcaaagcattcaagaggtggcttgggtgctgttaaaggtatttagtttcaaaagggaaacagagcataaaagtttggaaaatttgcagcctgacaatgcaatagaaaagaaaatctcatcttctgaggaaaaattcaagctggctgcagaaatttgcataagtaatgaggagctgawtgttaatccccaagacaatggggaaaacgtctccagagcatgtcagagacctttgtggcagctcctcacatcacaggcttgaaggcctaggaggaaaaaatggtttcaggggctgggcccagggtctccgtgctgtgtgcagcccagggacttggtga

SEQ ID NO: 942006 - DNA, 632 bp, Homo sapiens
tataaatggtactttttcctgtactctcacataattctttctcctgtaaccctgtgaaaaggtgccttccaccagaaagaggtgctttctgaggcctccccaggcatgtagaactatgagtcaattatacctcttttcttataaattatccagtctccaacagttctttatagcagtgggagaatggaataatacagtaaattggtacccaggtagtgaggcacgactataaaggtatctgaaaatgtgtaagtaactttggaactgagtaatgggcagagattggaacagtttggaagactcagaagaatacagaaagatgtgggaaagtttggaagttcctagagacttgttgaatggtttccatcaaaatgctgatagtgatatggacaatgaagcccagtctgagggagtctyagatggagatgaggaacttattggggactggagcaaaggtcactcttgctatgcttcagcaaagagactggaggcattttgccactgccctagagatctgtggaactctgaatttgagagagatgatctgaaattggaactcatgtttaaaagggaagcagagtataaaagtctggaaaatttgcagcctgaccatgtgatagaaaagaaaaacc

SEQ ID NO: 942007 - DNA, 608 bp, Homo sapiens
aacaatttctgcagttaacacaatcattacagggtcctgaggtgacatatatcctcagcttatgaagatgatgggattaagagattaaagtaaagacaggcataggaaattataagagtattgattggggaaatgataaaygcccatgaaatcttcacaattcatttcattctgccatggtttcagccagtccctccgttcggggtccctgactttccacaacaccttctcatttgagtagactatgccagagggaaaatctgggactcaagggctgcagattttttctttgtcccacagggtaccccattaatgtggtgttctcccctttcccctatggacagggcttcctgagagctgaactgcagtggttgtttttgctcttctgggtctgtccacccagtggagctcctggaatccaggctggtactggggagtttctgcaaagcattctttaatgtgatctgtcttcaggtctttcatccatggataccagcacctgttccagtggaggtagcaggggagtgaagtggactctgtgagggtccttgcttgtatttttgtttagtgcactggttttatgttgtttggcttctggccaggaggtg

SEQ ID NO: 942008 - DNA, 608 bp, Homo sapiens
aacaatttctgcagttaacacaatcattacagggtcctgaggtgacatatatcctcagcttatgaagatgatgggattaagagattaaagtaaagacaggcataggaaattataagagtattgattggggaaatgataaacgyccatgaaatcttcacaattcatttcattctgccatggtttcagccagtccctccgttcggggtccctgactttccacaacaccttctcatttgagtagactatgccagagggaaaatctgggactcaagggctgcagattttttctttgtcccacagggtaccccattaatgtggtgttctcccctttcccctatggacagggcttcctgagagctgaactgcagtggttgtttttgctcttctgggtctgtccacccagtggagctcctggaatccaggctggtactggggagtttctgcaaagcattctttaatgtgatctgtcttcaggtctttcatccatggataccagcacctgttccagtggaggtagcaggggagtgaagtggactctgtgagggtccttgcttgtatttttgtttagtgcactggttttatgttgtttggcttctggccaggaggtg

SEQ ID NO: 942009 - DNA, 608 bp, Homo sapiens
aacaatttctgcagttaacacaatcattacagggtcctgaggtgacatatatcctcagcttatgaagatgatgggattaagagattaaagtaaagacaggcataggaaattataagagtattgattggggaaatgataaacgcccatgaaatcttcacaattcatttcattctgccatggtttcagccagtccctccgttcggggtccctgactttccacaacaccttctcatttgagtagactatgccagagggaaaatctgggactcaagggctgcagattttttctttgtcccacagggtaccccrttaatgtggtgttctcccctttcccctatggacagggcttcctgagagctgaactgcagtggttgtttttgctcttctgggtctgtccacccagtggagctcctggaatccaggctggtactggggagtttctgcaaagcattctttaatgtgatctgtcttcaggtctttcatccatggataccagcacctgttccagtggaggtagcaggggagtgaagtggactctgtgagggtccttgcttgtatttttgtttagtgcactggttttatgttgtttggcttctggccaggaggtg

SEQ ID NO: 942010 - DNA, 608 bp, Homo sapiens
aacaatttctgcagttaacacaatcattacagggtcctgaggtgacatatatcctcagcttatgaagatgatgggattaagagattaaagtaaagacaggcataggaaattataagagtattgattggggaaatgataaacgcccatgaaatcttcacaattcatttcattctgccatggtttcagccagtccctccgttcggggtccctgactttccacaacaccttctcatttgagtagactatgccagagggaaaatctgggactcaagggctgcagattttttctttgtcccacagggtaccccattaaygtggtgttctcccctttcccctatggacagggcttcctgagagctgaactgcagtggttgtttttgctcttctgggtctgtccacccagtggagctcctggaatccaggctggtactggggagtttctgcaaagcattctttaatgtgatctgtcttcaggtctttcatccatggataccagcacctgttccagtggaggtagcaggggagtgaagtggactctgtgagggtccttgcttgtatttttgtttagtgcactggttttatgttgtttggcttctggccaggaggtg

SEQ ID NO: 942011 - DNA, 577 bp, Homo sapiens
acctttagtctttgatgttggtgactcacagatggggttttgctataagtgacctttttgttgatattgatactattcctttctgtttgttagttttccttctaacaatcaggtccctcagctgcaggtctgttggagtttgctggagtttcactccagaccctgtttgccttggtatcaccagcagaggctgcagaacagtaaatattgcagaacagcaaatattgctgcctgatccttcttctggaagcttcttcctagaggggcagctgcctatatggggcatctatcagcctctattggkaggtgtctcccagttaggctacatggaggtcagggacccacttgaggggccagtctgtccattctcagagctcaaatgccatgctgggagaaccaccgctctcttcagagctgtcagacagggatgtttaagtcttcagaaattgtctgctggcttttgttcagctatgccctgcccacagaagtggagtccagaggcagtaggccttgttgagctgtggtggggtctgcccagtttgagcttccaggcagctttctttacctactcaagcct

SEQ ID NO: 942012 - DNA, 577 bp, Homo sapiens
acctttagtctttgatgttggtgactcacagatggggttttgctataagtgacctttttgttgatattgatactattcctttctgtttgttagttttccttctaacaatcaggtccctcagctgcaggtctgttggagtttgctggagtttcactccagaccctgtttgccttggtatcaccagcagaggctgcagaacagtaaatattgcagaacagcaaatattgctgcctgatccttcttctggaagcttcttcctagaggggcagctgcctatatggggcatctatcagcctctattgggwggtgtctcccagttaggctacatggaggtcagggacccacttgaggggccagtctgtccattctcagagctcaaatgccatgctgggagaaccaccgctctcttcagagctgtcagacagggatgtttaagtcttcagaaattgtctgctggcttttgttcagctatgccctgcccacagaagtggagtccagaggcagtaggccttgttgagctgtggtggggtctgcccagtttgagcttccaggcagctttctttacctactcaagcct

SEQ ID NO: 942013 - DNA, 577 bp, Homo sapiens
acctttagtctttgatgttggtgactcacagatggggttttgctataagtgacctttttgttgatattgatactattcctttctgtttgttagttttccttctaacaatcaggtccctcagctgcaggtctgttggagtttgctggagtttcactccagaccctgtttgccttggtatcaccagcagaggctgcagaacagtaaatattgcagaacagcaaatattgctgcctgatccttcttctggaagcttcttcctagaggggcagctgcctatatggggcatctatcagcctctattgggaggtgtctcccagttaggctacatggaggtcagggacccacttgaggggccagtctgtccattctcagagctcaaatgccatgctgggagaaccacygctctcttcagagctgtcagacagggatgtttaagtcttcagaaattgtctgctggcttttgttcagctatgccctgcccacagaagtggagtccagaggcagtaggccttgttgagctgtggtggggtctgcccagtttgagcttccaggcagctttctttacctactcaagcct

SEQ ID NO: 942014 - DNA, 646 bp, Homo sapiens
taagtccagtgaattccataagcatgagcccactgccacacttctttagccataaagtgagtgccttggtcagaggcaatgctatgtggaataccatgacagtggataaggcattccacgagtccaaggatggtagtcttggcagaagcattgcatgctggacaggcaaacctatatcctgagtaagtgtctatgcyggtgaggacaaacctctgccctttccatgatggaagaggtccaatatagtcaacctgccaccaggtagctggctgatcaccccgaggaatggtgccatatcaagggctcagtgttggtctctgttgctggcaaattgggcactcagcaatggctgtagccaggtcagccttggtgagtggaagtccctgttgctgagcccatgaataacctccatccctgccaccaagaccactttgttcatgggcccattgggcgatgacaggggtggctggggaaagacgctgagtggtgtccacagaatgggtcatcctatccacttgattattaaaatcctcctctactgaggtcacccactggtgagcactcacatgggatacaaatatcttcatggtttttcaccactcacagaggtccatccacatacctcgtccccaaatttctttgtcac

SEQ ID NO: 942015 - DNA, 646 bp, Homo sapiens
taagtccagtgaattccataagcatgagcccactgccacacttctttagccataaagtgagtgccttggtcagaggcaatgctatgtggaataccatgacagtggataaggcattccacgagtccaaggatggtagtcttggcagaagcattgcatgctggacaggcaaacctatatcctgagtaagtgtctatgccggtgaggacaaacctctgccctttccatgatggaagaggtccaatatagtcaacctgccaccaggtagctggctgatcaccccgaggaatggtgccatatcragggctcagtgttggtctctgttgctggcaaattgggcactcagcaatggctgtagccaggtcagccttggtgagtggaagtccctgttgctgagcccatgaataacctccatccctgccaccaagaccactttgttcatgggcccattgggcgatgacaggggtggctggggaaagacgctgagtggtgtccacagaatgggtcatcctatccacttgattattaaaatcctcctctactgaggtcacccactggtgagcactcacatgggatacaaatatcttcatggtttttcaccactcacagaggtccatccacatacctcgtccccaaatttctttgtcac

SEQ ID NO: 942016 - DNA, 682 bp, Homo sapiens
tcctccctaaactgctcctgaaaccagtgcttgagatattttgcagaccctgcacttgatggatcaggtggcaccacccagatagataaactggatcatctgctcttgtggcctacacccaggaaccaactcaatgcaagaggtcagcttcaattccctatgatttcatgtggcgaactaaccaatcagtactcctggctcactggcttccccctacccaccaagtggtccttaaaactctgatccccaaatgctcgaggagactgatttgagtaatagtaaaactccaatctcctgcacagccagctctgcrtgaattactctatctctattgcaattcccctgccttgagaaatccgctgtgtctaggcagtgggcaaggtaaactcactgggcggttacaaaaccactggctcccctgtttctcaggccttcggacttggactgaatgcaccagcagctttcctggtgctccagcttgcagacagcagatcatgggacgccttggcctccataatcacgtgaggcaatgcccataataaatctcctcttatacacctctgtatatagcctattggtcctgtttctctggagaaccctaactagaacactacttgtattagttcgttctcatgctcctgataaagacatacccgagactgggtagtttttaaggaaaaag

SEQ ID NO: 942017 - DNA, 570 bp, Homo sapiens
aattactccctttccagaagggaaaaattggccaaagcaaaggagctataggccctatgcaggtccaaaacccagcagggcagtcattaaatcttaaagctctgaaataatctcctttgactctgtgtctcacatccagaccacactggtgaaagggctgggctcccaaggccttgggcagttctgtccctgtggctctgcagggctcagctcccatggctgttctcaagggygttgagtgcctgtggcttttccaggtgcacagtgcaagctgttggtggatctaccattctggggtctggaggatggtggtcttcgtctcacagccccactaggcagtgccccactggaaactctgcatgggggtttcaaccccacatttcccttctgcactaccctagtagaggttctccatgagggctccactcctgcagcagacttctgcctagacattcggccatttccatacatcttctgaaatctaggcagagactcccaagccttaactcttgtcctctgcacacccacaggcttaatgccatgtggaggccaccaatacttgcagcttgc

SEQ ID NO: 942018 - DNA, 545 bp, Homo sapiens
gtcttcttgccctgtataacattaaccagttttgtataccaccccaaaattctattttaacatcttttattcagtgcctataatacttaatctctcaagttctcttgaaaccaactttaccatcccactcattctctcattaattaggtaaacgagtttttaaaaaaccaggtacataaatctaaacataatgctctctttataaawgtaaataaataaaatacaattttaactcataaaaaattatacccacgctggtgcagagcctctcctttaatcccagcactttgggaggccaaggtgggtggaccacctgaggtcaggagtttgagaccagcctgaccagcatggtgaaaccttgtctctactaaaaatacaaaaattagccaggcgtggtggcaggtgcctataatcccatctacttgggaggctgaggcaggagaattgcttgaaccccggaggtggaggttgcagtgagccgagatcgtgccattgcactctctagcctgggcagcaagagcgaaactgtctcaaaaaaaaaaaaa

SEQ ID NO: 942019 - DNA, 607 bp, Homo sapiens
tggtggtttggaagcccctcaaattcaattcagagccatgttgcccataaaatgtaaggattgtccaattcaacgcagaaactcccatctgtgaagccttggtatcgggagggcttatgaaatcaataaagctcatctgccaccaaggagagcctcagtttctgacaatggaggctagaacttacaaaactaaatgaaattatttcttaaaaactcaactgcccctaatttaaaaggaatatgataagttcagaaatgaaggtttttgattacaggatcccaggcctatgaaagaatgtctggctacaaaaataagattcctgttttcttactaattataaaagcacttattatgacagcccataattacttagatatggccattccaaargacaaattatgtctacttaaaggtaactacaacaaaaacacagtatagcacagatatctactctacgcctgtaatcctggctccttgctctagcattaaagtggttaaatgaactggcaaaatctctcattagggggagccaagaggtagttccagcatttggacctacagtgaagttccagcatttggactcacagtgaagaatgcagtctcaga

SEQ ID NO: 942020 - DNA, 594 bp, Homo sapiens
cacctgaacttttgattcagtgttgctggaatgggtgggtctttctctcaactccctgagatcttcaccttccccatcctgccacaggcaaggcttttctctctctcctttccctttcttattttttctattactcagggtaaccatcyttcccagagatcacaagtcaaaactctctggtcagaggttggattaatgatgatggggcccaacagggggcaagtttgagccttgccagtttgatattgggtgctaagcagagtggcaggtcataaactgcttctttgacttttacaaattgttcaatttattttattctattttatttatttatttttgagatggagttccatgctgttgctcaggctggagtgcagtggcacaatcacagctcaatgtaacctctacctcctagattcaagtgattctcctgcctcagcctcccaagtagctgggattacaggcacgtaccaccatgcctggctagtttttgcatttttagtacagacagggtttcaccacattgtccaggctggtttctaactcctgacctcaagtgatccgccccacttggcctcccaaagtgctgggatt

SEQ ID NO: 942021 - DNA, 594 bp, Homo sapiens
cacctgaacttttgattcagtgttgctggaatgggtgggtctttctctcaactccctgagatcttcaccttccccatcctgccacaggcaaggcttttctctctctcctttccctttcttattttttctattactcagggtaaccatctttcccagagatcacaagtcaaaactctctggtcagaggttggattaaygatgatggggcccaacagggggcaagtttgagccttgccagtttgatattgggtgctaagcagagtggcaggtcataaactgcttctttgacttttacaaattgttcaatttattttattctattttatttatttatttttgagatggagttccatgctgttgctcaggctggagtgcagtggcacaatcacagctcaatgtaacctctacctcctagattcaagtgattctcctgcctcagcctcccaagtagctgggattacaggcacgtaccaccatgcctggctagtttttgcatttttagtacagacagggtttcaccacattgtccaggctggtttctaactcctgacctcaagtgatccgccccacttggcctcccaaagtgctgggatt

SEQ ID NO: 942022 - DNA, 771 bp, Homo sapiens
tcccacgccaggaccacgggtggagctgcccaccagtcacccacccacactcctcaacccttggcgatgggaccaggcactgtggagcaggcggcggtgcccgtcagggaggctcggaccatgtgggagcccaccgcgtgggggctcaggcatggcaggctgcaggtcctgagccctgccccatggggaggtggctgaggccyggtaagaattcaagccgggtgcggacaagccagcagtgctgggggacccggtgccccctccacagctactggcccggatgctaagcccctcattgcccagcgccagtggcgctggcaggctgctctgagtgcggggcctgccgagcccgcgcccacctggaactggtgctggcccgcgagcacgcagccctggttgccacccgcgcctctccttccacacctccctgcacgcaaagggagccagctccagcttctgccagcccagagaggggttcccacagtgcagcggtgggctgaagggctcctcaagtgcggccagagcagatgccaaggccgaggaggcaccaagagcaagtgagggctgctagcacattgtcacctctcacctttgcaccagcgtgaacaccatctgtgacaatgtggtccagggtctgcaccaccatgagatcctccagaccgactctcagcagtgagcttgtccccagcacctgctgcctcccagccttggagcttggattcctatggaattgggctctgctggacacaaactctttttagcatcagacct

SEQ ID NO: 942023 - DNA, 655 bp, Homo sapiens
gtcacagggttctaagactccgtgcttagctgtcttatgtttcaccccttgctttcttggtttcactagtttctgatgcttctgtaagagcaaagtcaagattcttcaagcagcctgcatctatgtttccctcacaaagtaattataaacttgactggcttagatcatgagctatgcttactgaaaaatttgggctttcaggttgaaagggatgtgattccattacttggttttcattatttcttatttgccccgtctagagagacatgaggccaattgtgtatataactctcttctgggccagtagtaccacttcatgtaacagtaatacctattattttcacaaatgtgatcttagatattttttttctttctctttttcttttcttttcttttttttttttttgagacagagtctckctctgttgcccaggctgcagtggtgctgtctcagctcactgcaacctctgcctcttgggctcaagcgattctcgtgcctcagcctcccaagtagctgggattacaggcatgtgctactatgcctggctaattttgtgtttttagtagagatggggtttcaccatgttggccaggctggtctcgaactcctggcctcaagtgatccacccaactcatcctcccaaagttctgggat

SEQ ID NO: 942024 - DNA, 560 bp, Homo sapiens
gtgatccacctgcctcagcatcctgaagtgctgggattacgggcatgagccactgcacccagccaatgatttcttaataagtatatgaattgctatgtgcatacatctttctccaattcttgaatatgatttaatttacttaacattcaattataatttcttaatattattaacttgcttggcatattcattttgcaaaaggcacagaaatatttgttgtggaagtgatggccgtttatttcccaaaaatcagtattctctctttcaagtggagaggtgtcgctgaaaaaaatacctrtctagtgtcccagtgggaatctttcccagccccacctgtagttaagtacagccatattgtaatcaattaaaggagagaaaaatgagctcctcttccagacttgcccataaggaccttccatgaggcactccttttgcctttttcctcttctggatggtcggattagagaaaacccctgggaggaccgtagaaggcttagaagctgggctcctgactgattatgtgggggagattctcctgttgaactgcacttggaccatct

SEQ ID NO: 942025 - DNA, 789 bp, Homo sapiens
taccagaggtacaaagaggagccagtaccattcctgctgaaactattccaaaccacagaaaaagagagactcctccctaattcattttatgaggccagcatcatcctggtactaaaatctgacagagacacaacataaaaagaaaatttcaggccaatatccctgatgaacattgatgcaaaaatccccaataaaatgctggcaaaccaaatacagcagcacatcacaaagcttatccaccacaaccaagtcrgcttcatccctgggatccaagactggttcaacatatgcaaatcaataaacataatttatcacataaacagaaccaatgacaaaaaccacatgattatctcagtagatgcagaaaaggactttgataaaactcaacaccacttcatgctaaaaactctcaataaactcggcattgatggaacatatctcaaactaataagagctatttatgacaaatccatagccaatatcatactgaatgggcaaaagctggaaacattcacctagaaaactggcacaagacaaggatgcccccctcaccactcctattcagcatggtattggaggttctggtcagggttatcaggcaagataagaaaataagggatattcaaatacgaagagaggaagttaaactgtctacatttgcagatgacatgattgtatatttagaaaaccccatcatctcagcccaaaaactccttaagctgataagcaacttcagcaaagtctcaggatacaaaatcaatgtgtaaaaatcacaagcattcttataca

SEQ ID NO: 942026 - DNA, 789 bp, Homo sapiens
taccagaggtacaaagaggagccagtaccattcctgctgaaactattccaaaccacagaaaaagagagactcctccctaattcattttatgaggccagcatcatcctggtactaaaatctgacagagacacaacataaaaagaaaatttcaggccaatatccctgatgaacattgatgcaaaaatccccaataaaatgctggcaaaccaaatacagcagcacatcacaaagcttatccaccacaaccaagtcggcttcatccctgggatccaagactggttcaacatatgcaaatcaataaacataatttatcacataaacagaaccaatgacaaaaaccacatgattatctcagtagatgcagaaaaggactttgataaaactcaacaccacttcatgctaaaaactctcaataaactcggcattgatggaacatatckcaaactaataagagctatttatgacaaatccatagccaatatcatactgaatgggcaaaagctggaaacattcacctagaaaactggcacaagacaaggatgcccccctcaccactcctattcagcatggtattggaggttctggtcagggttatcaggcaagataagaaaataagggatattcaaatacgaagagaggaagttaaactgtctacatttgcagatgacatgattgtatatttagaaaaccccatcatctcagcccaaaaactccttaagctgataagcaacttcagcaaagtctcaggatacaaaatcaatgtgtaaaaatcacaagcattcttataca

SEQ ID NO: 942027 - DNA, 610 bp, Homo sapiens; identical to SEQ ID NO: 934675

SEQ ID NO: 942028 - DNA, 822 bp, Homo sapiens
aaattcaggggcctgttctctccataaaatttctaggggtccagtggtgtggatcatgtcaaaatatcccttttaaggtgaaggacagttgttgcatctggcctcttttacaaccaagaaagagacacaacacctagtgaaccaatttggatttgagcggcaacacattgctcatttgggtgcactactctggcccacttaccaattgacctaaaaagctgctaattttgagtggggcccagaacaaggggaggctctgcagcaggtttaggttactgtggcttctctgccacttgaaccatgtcattcatgagatccagtggtgcttgaagtgtcagaggcaggtagggatgcagttgacaggcccccataggtggataacactgtgggtctttaggagtttgaagcaatgtcctgcctttatccatagataactattttccttttgagagatagctcttggtctgctactgggccttagtagaaactgaacacttgaccatgggccaccaagttaccctatgacctgagctgcccatcatgaatttggtgttctgtgactcatcaagtcataaagttggacatgcacagcagcaccatcgtcaaatggaagtagtatgtacatgatccagcctgaasaggtcatgaagttacaagtaagttaaataaggaagtggccccaaatgctgatggtttgttctgctacaagaccttctctctcctagcctacacctgtggcctcatggagagtaccttatgataagttgagagaggaagagaagactagggcctggtttacagatgattctgcacgatatgcag

SEQ ID NO: 942029 - DNA, 651 bp, Homo sapiens
acattgagcccccactatgaaaccattccccagggtgataacatggctacctggttgcagcttgattacattgaactacctccatcatagaaagggctgtgtttttctttattagaatagacactctggatacgccttctatgcatgcaatgcttctaccaaaactaccattcatgaacttacaaaataccattcatgaacttacagaactatcattaatgaacttaaacataccttgttcagcatcatggtactccacagagcagcatcacttctgacctggaaactcacttcacaggcaaagaagcatggcaatgggttygtgctcatggaattccctgatcttagcaagttttccattatcctaaagtagctggtttaataagacaatgggatggttttttgaagactgttacagtgccagcttgatgataatactttgctgagctggggcaatgttgttcagaggctgtaaaaactctgaatcagtgtctaatatatgatactgtttctcctatagccaggattcatgggtccaggaatcacggggtggaaatgggagtggcatcagtcaccattacccctagtgaccccctagcaacatttttgattcctgtttcagtaagtatgctctgctggactagaggtctt

SEQ ID NO: 942030 - DNA, 749 bp, Homo sapiens
aaccattaataactagcattcattgatctactatgtgtcaggatctaggtgaaatacttcatactatatatgatttaatcttcatgagcatatatccttgtcacaaagcagagttaggggtatgagagagtatctctgagagaaagtggttataaaaggtcatgtttttttacagtacatttgtcatagtggcatgataaattgggtgccaaaacatgtttycattacagaatcattgttttagaaataaatacaggaatgtttaggcatgtccttggactggacttgggaatacatggttcacaaaacaaacacgcttcttcccagcattcttcaaacaagaatcccaaaatctggcaactgaaagaaattttatgatgaaataattggaactctcttaaagggaaagtcttgtggtcctcaagtctggaaggcagagcaaaactggttgtattttcttccatataaggagtatgaaaaagagaggtccacttctttaaaaacttttgatcttgctctagtccaatctattttccacattgcagccaggacttttgttccgaaacaaaaatacaggttcttaaaaattaccttgctaaatttatttataaaaataaaattattctccccattttcaatgccttcttcattcccagatgttgaattagtgcagctttgaacccctggagaatgctcttctcaaagcacaccccaggcatcttctggtgcccgtgatgtcccctagaact

SEQ ID NO: 942031 - DNA, 638 bp, Homo sapiens
tatctatgccaattatgcattctggcactgggaaaatgaccacaggatgagtccagggacccaccggacccactgtaagtcagacctgagctaaaactccataaatcactggatctccataaacccttactttaactggaggaccagtatgatgttttgggtttcctagaatcaatgtcagttcagagccagtgtccagtagtctccaaaatgtctgatcatttccctttccccagtgcacagttaccctggtaaaaggcaggaggtctccttggagaaggacaggagaaagattcactgcatgaattcttggtaatatagtggggtccttccttaaggtgacttgcctccccttcattcaaagggttctgggtctataaactggctcaagtctggatattgattgaggagayttgattctctgtttttataattcaaattagtcttttgtccgttcaacttagaagttttctgcttatataaattaagtagaaatgcagtaggcttccaatcaatttcacttctaggaacactgtgattaattagtcaatgccagagctctacaccaatcagactattctgattgctgctttgtctctgctgtccattacagtagctacacccaccttgcctttgat

SEQ ID NO: 942032 - DNA, 555 bp, Homo sapiens
cacttataagtgggagctaagctatgaggatgcgtaggtataagagtgatataatggactttggggagccagggtaggggaaagattgggagggggttaagggataaaagactacatactgggtacagtgtacactgctcaggtgacagatgcactcaaatctcagaaataaccactaaagaatttatccatgtaaccaaaaaccacttgtacctcaaaacttttgaaayaaaaacataaaaaagaagctggcctgtttgaaaaacttaaatagtttaatgagtaaaaggatacctcacttttagcaacaaaagtagaaattacaagaattgagcatttgttacaagaaatgattattcttcagcagatgtgaggtcacacttcccctcagtacccaattttgtctgcctgtaggaattccagtgtatcccagctttccccacttcagcatttctgggacccccaggtaaaggttcacatgttagagaaattgggagtggggagtgttgtcagtttagttatctggctgctgtctgtgctcagtttcccctctct

SEQ ID NO: 942033 - DNA, 792 bp, Homo sapiens
ctgacttgtaatctggactctgaaatagagaatcatcctgaattcccacagaggaatgaagtttgctagtttgaaactgcaatggagatggtccaatgacttgattgcttttgtagcctacagtgaaatttcctcttcattccttgagtttaaataaatgtcaggaatactgaaaaggttgaaactgacatatttctattagcgaattcatagtggttggatgtagtgagataaaatgggctcagaaatcacccactctccaggtatgctgctctgcttgtatcatttgtgacctatgttgatgctttttgtactcattggattcttaaagtgtcacagatataagtacaaatgggatgcattaactactcttctttttttcttttcttttttttttttgttttcgagacggagtcttgctctgtcgcccaggctggagtgctgtggcgcaatctcggctcactgcaagggatggtcttgatctcctgacctcatgatctgccctccttggcctcccaaagtgctgggattacaggcgtgagccaccgcacccagcccactaactacctttaattatccagaggttctctgctagaaamatatgagagttataaggggtctttttattcagtaaatgtttatgagaaagtttcaaaccatcccaccctccaaaaaaaaatacaacaggagatttctgaaatttgtcttttccataaatctgagtaaggagctgataaaatacttcttcatctctgaagccaggaagagaaggacagtcaacataaaactact

SEQ ID NO: 942034 - DNA, 755 bp, Homo sapiens
atactagacatgcccaggaaaatgctaaaaccggcctggacagctctggccatgatgcacatagtaacggccacctattttgccatcacggatgtgttgtaggattaaaaatagacttatgcaagtgacaattacaagccatttataactataaaacttaacaaaatagctgccagtttgctgaatctgaaaaagaaacctgtcacatttactgaattagtttaaccatagaattcagatgttaaaagaaactagactaaaggaagaacttctacaagctctcctgtcataagatttttacagtttctcttgactggaaacatgtaggttgctacaaaaagttactaaaggaacttttatctcacatctgccctgttttcctgaactttacgtaaagttcttaactagcttaacttaaatttaacaaacaggttggcygggcactgtggctcacgtctgtaatcctagcactttgggaggccaaggcaggtggatcacctgaggtcaggagtttgagactggcctgggcaacatagtaaaacctcacttctagtaaaaatacaacaattagccgggtgtggtggcacacgcctgtaatcccaggtactcggcaggctgaagcacgagaatctcttgaacctgggaagcagaggttgcagtgagacaagatcgtgccactgtaccccagcctgggcaatagagcaaaactctgtctccaaaaaaaaaaaaaaacagacagacagaaagaaagaggt

SEQ ID NO: 942035 - DNA, 394 bp, Homo sapiens
ataatgtggaacatggtaagaccagtgaaatccatgagcatgagcccactgccgcacttctttagctataaagtaagtgccttggtcagaagcaatggtgtgtgtggaataccatgacggtggaaaaggcattctgtgagtccacggatggtagtcttggcagaagcattgtgtgtaggrtaggcaaactcatatctagagtgtctattccagtgaggacaaatctctgtgctttcaatgatggaaatataagcaacctgccaatgagtagctggctgatctcccctaggaatggtgccatattgaaggttcagtgctggtctctgctgttggcaaattgggcgctcagcagtggctgtagccaggtcagctttggtgagtggaagtccatgtt

SEQ ID NO: 942036 - DNA, 658 bp, Homo sapiens
cctcacacatgcacacagcattaattagcttttgttttttgttttctgtttttgcttttttgacacagactcactctgttgcccaggctggagtgcttgagtggggtgatctcagcttaatgcaacctctgtctcccaggttcaggtgagtcttgtgcctcagcctccggagtagctaggactataggaatgcaccaccaygccgggctaattttttttttttttgtatttttagtagagacggggttttgcactgttggccaggctggtctcgaactcctggcctcaagtgatccacccaccctggccttccaaataatttgctttttaatgtgcaaatcttaaatatgctcagatagccaaaggctactggatattttagaaaaaatttaatatgaagtaaagaaaacaaagcagggaggaaaaaattgtcaaaaaatacatcattcctgtgagactacatcaaacaaaaagcttctgcagagcaaaggaaacaatcaacaaaatgaaaaggtaacctattgatcaggagaaaatatgtgtgaaccatatatctgatgagttaatatccaaaatatataaggaacccacacaactcaatagcaaaataataataatcataacctaatttaaaaatgggcaaagacctgaatagaca

SEQ ID NO: 942037 - DNA, 658 bp, Homo sapiens
cctcacacatgcacacagcattaattagcttttgttttttgttttctgtttttgcttttttgacacagactcactctgttgcccaggctggagtgcttgagtggggtgatctcagcttaatgcaacctctgtctcccaggttcaggtgagtcttgtgcctcagcctccggagtagctaggactataggaatgcaccaccacgccgggctaattttttttttttttgtatttttagtagagacggggttttgcactgttggccaggctggtctcgaactcctggcctcaagtgatccacccaccctggccttccaaataatttgctttttaatgtgcaaatcttaaatatgctcagatagccaaaggctactggatattttagaaaaaatttaatatgaagtaaagaaaacaaagcagggaggaaaaaattgtcaaaaaatacatcattcctgtgagactacatcaaacaaaaagcttctgcagagcaaaggaaacaatcaacaraatgaaaaggtaacctattgatcaggagaaaatatgtgtgaaccatatatctgatgagttaatatccaaaatatataaggaacccacacaactcaatagcaaaataataataatcataacctaatttaaaaatgggcaaagacctgaatagaca

SEQ ID NO: 942038 - DNA, 680 bp, Homo sapiens
cccaggtcaatctcagactgctgtgctagcagcgagcaaggctccgtgggtgtgggacctgctgaaccaggcatgggagggaatcctgtggtctgctggttgcgaagactgtgggaaaagtgtggtgtttgggcaggagtgtactgtttctccaggtacagtcactcatggcttcccttggctaggaaagggaaattccctgaccccttgcacttcccaggtaaggcgacaccccaccctgcttmggcttgccctccatgggctgcacccactgtccaactggtcctaatgagatgaaccattttcctcagttggaaatacagaaatcacctgttctgtttcgatctctctgggaactatagactggagctgttcctattcagccatcttggaagtgacccccgcccacagttgtttttaaattaaactttttatttggagtttgttgtagattcacatgcatttgtaagaaatagtagagatacatcccttctaccctttacccagtttccctccagtggtaacctctcacaaaactatagtgcaatctcacagctaggaaatggacatcaatccagtcaagatacagaacagttgcatcatgataaggtcctttggatagaaatgtaggctgttgggggcctttttagtctgcactcattggtgtttctgggttgcca

SEQ ID NO: 942039 - DNA, 680 bp, Homo sapiens
cccaggtcaatctcagactgctgtgctagcagcgagcaaggctccgtgggtgtgggacctgctgaaccaggcatgggagggaatcctgtggtctgctggttgcgaagactgtgggaaaagtgtggtgtttgggcaggagtgtactgtttctccaggtacagtcactcatggcttcccttggctaggaaagggaaattccctgaccccttgcacttcccaggtaaggcgacaccccaccctgcttcggcttgccctccatgggctgcacccactgtccaactggtcctaatgagatgaaccattttcctcagttggaaatacagaratcacctgttctgtttcgatctctctgggaactatagactggagctgttcctattcagccatcttggaagtgacccccgcccacagttgtttttaaattaaactttttatttggagtttgttgtagattcacatgcatttgtaagaaatagtagagatacatcccttctaccctttacccagtttccctccagtggtaacctctcacaaaactatagtgcaatctcacagctaggaaatggacatcaatccagtcaagatacagaacagttgcatcatgataaggtcctttggatagaaatgtaggctgttgggggcctttttagtctgcactcattggtgtttctgggttgcca

SEQ ID NO: 942040 - DNA, 680 bp, Homo sapiens
cccaggtcaatctcagactgctgtgctagcagcgagcaaggctccgtgggtgtgggacctgctgaaccaggcatgggagggaatcctgtggtctgctggttgcgaagactgtgggaaaagtgtggtgtttgggcaggagtgtactgtttctccaggtacagtcactcatggcttcccttggctaggaaagggaaattccctgaccccttgcacttcccaggtaaggcgacaccccaccctgcttcggcttgccctccatgggctgcacccactgtccaactggtcctaatgagatgaaccattttcctcagttggaaatacagaaatcacctgttctgtttcgatctctctgggaactatagactggagctgttcctattcagccatcttggaagtgacccccgcccacagttgtttttaaattaaactttttatttggagttkgttgtagattcacatgcatttgtaagaaatagtagagatacatcccttctaccctttacccagtttccctccagtggtaacctctcacaaaactatagtgcaatctcacagctaggaaatggacatcaatccagtcaagatacagaacagttgcatcatgataaggtcctttggatagaaatgtaggctgttgggggcctttttagtctgcactcattggtgtttctgggttgcca

SEQ ID NO: 942041 - DNA, 623 bp, Homo sapiens
cttacctaagcaagcctgggcaatggcaggtgcccctcccccagcctcgctgccgccttgcagtttgatctcagactgctgtgctagcaatcagcgagactccatgggcgtaggaccctccgagccaggtgtgggatataatctcgtggtgcgccgtttttttaagccggtcggaaaagcgcagtattcgggtgggagtgacccgattttccaggtgcgtccatcacccctttctttgactgggaaagggaactccctgaacccttgctmttcccaagtgaggcaatgcctcgccctgcttcggctcgcgcacggtgcatgcacccactgacctgcacccactgtctggcactccctagtgagatgaacctggtacctcagatggaaatgcagaaatcacccatcttctgcgtcgctcacgctgggagctgtagacccgagctgttcctattcagccatcttggctcctccctccagacacaagtctttaaaatgctgatcagagcattgaaaactgaaacagacacaataccgacctcctgtggtagactgactcatggtcccacagatgtccatccacatcctaaaccccagaacctattaccttacatggttcaaaggat

SEQ ID NO: 942042 - DNA, 623 bp, Homo sapiens
cttacctaagcaagcctgggcaatggcaggtgcccctcccccagcctcgctgccgccttgcagtttgatctcagactgctgtgctagcaatcagcgagactccatgggcgtaggaccctccgagccaggtgtgggatataatctcgtggtgcgccgtttttttaagccggtcggaaaagcgcagtattcgggtgggagtgacccgattttccaggtgcgtccatcacccctttctttgactgggaaagggaactccctgaacccttgctattcccaagtgaggcaatgcctcgccctgcttcggctcgcgcacggtgcatgcacccactgacctgcacccactgtctggcactccctagtgagatgaaccyggtacctcagatggaaatgcagaaatcacccatcttctgcgtcgctcacgctgggagctgtagacccgagctgttcctattcagccatcttggctcctccctccagacacaagtctttaaaatgctgatcagagcattgaaaactgaaacagacacaataccgacctcctgtggtagactgactcatggtcccacagatgtccatccacatcctaaaccccagaacctattaccttacatggttcaaaggat

SEQ ID NO: 942043 - DNA, 785 bp, Homo sapiens
tggaaactttttgtgccaatgttattttagatttatgctaataaaaatttattccagttttaagactttaaatcctcctacatttacttgccaaatacaccgtgtgagttcttgaacaagttgcctccttgcatcagtccattttcatgctgctgataaagacatacctgagactggggaatttacaaaagaaatagtttcattggacttacagtttcacatggctggggaggcctcacaatcgtggtggaaggcaaggaggagcaagtcacatcttacatagatggcagcggcaaaatgagagcttgtgcagaaaaactcccgtttttaaaaccatcagatctcatgtgacccattcactatcacaaggacagcacaggagagacctgccctcatgattcaatcatctctcactgggttccttcccacaatatgtgggaattatggaagctccaaggtgagatttgtgtggggacacagggctaaaccatattgttctgcccggcccctgtaaaatctcatatctgcacatttcaaaaccaattatgccttcccaacagtcccccaaactctcaactcatttcagcattawctcaaaagtccacagccaaagtctcatctgagacaaggcaagtcccttcctcctatgaccctgtaaaatcaaaagcaagttagttccttcctagatacaatggggatacaggcattgggtaaatacagccattccaaatgggagaaattggctgaaacaaaggggctaaaggccccaggcaagtctgaaatcc

SEQ ID NO: 942044 - DNA, 545 bp, Homo sapiens
actgttagaaggaaaactaacaaacagaaaggacatcctcaccaaaaccccatctgtacgtcaccatcatcaaagaccaaaggtagataaaaaccacaaagatggggaaaaaacagagcagaaaaactgaaaattctaaaaatcagagcacctctcctcctccaaaggaatacagctcctcaccagcaacggaacaaaggtggaaagagaatgacttcggcaagttgagagaagaaggctacagatgatcaaacttcttygagctaaaggaggaagttcaaacccatggcaaagaagttaaaaatcttaaaaaaagactagacgaatggctaactagaataaccaattcagagaagtccttaaaggaccagatggagctgaaaaccagggcacaagagctacgtgacaaaggcacatgcctcagtagtcgattcaatcaactggaagaaagggtatcagtgatggaagatcaaatgaatgaaatgaagagagaagagaaatttagagaaaaaagaataaaaagaaacaaagaaagcctccaagaa

SEQ ID NO: 942045 - DNA, 655 bp, Homo sapiens
tagtcccagctattcaggaggctgaggcaggagaatggcgtgaacccaagaggtggagcttgcagtgagccgagttcgcgccactgcactccagcctgggtgacagggcgagattctgtctcaaaaaaaaaaaaaaaaaaaaaaaagatagatgcaaacgarcaaacaaataaaaaaaccctacacctaggcatattatattcaaactccagaaaatcaaagacaaaaaatgttgtaagaaaccagatggggaaaaacactttatccatagaggagcaaagataaaaattacatccaacttcgcctcagaaaccatgcaaacaagaagagagtgcactgacatatttaaagtgttgagagaaagaaaaaacagtcaacctaaaattctgaactctgtgaaagtatccttcaaaaatgaaggagaaataaaaactttctcagacaataaaaattaaggaatttattgacagtagacctgcctttcaataaatatccaaagaagttgttcagagagaaggaaattgaatctacaaaggatacgcattacagaatgaataaatgaaaagaacatcagccacagaaacagcactaaacaaccaagtagactgaatgacttagccactttgatgcttaccagtctctgctgttggtgccc

SEQ ID NO: 942046 - DNA, 587 bp, Homo sapiens
cctctaactagagagtcagcctgtcctttgaagcattgaagccaggcattgacttctctctactatgaaagtcctagatggtatcttttcccaatagaaggctgttttatcaccactgaaaatctgtttaatgtaaccaccttcaataatratcttagctagattttctggataacttgctgcagctcctacgtcagcacttgctgcttcaccttgcactttaatgtgatggagatagctcttcccataaacctcatgaaccagcctctgttagcttctaacttttcttctgcagcttcctcacctctctcagccttcatagaattgaagagtagggccttgctttggattaggctttggcttaatgtgaggctttgtggttgattttttttgtatccagaccactaaatttttctctgtttatcagtaaaataaggctgttttgctttcttatcactcatatgttcactggagtagaactttcagtttccctcagaacttttcctttgcattcacaacttggctaagtgttcggtgcaagatgcatagtttttggcctatctcagcttccaacatgacttcctcac

SEQ ID NO: 942047 - DNA, 637 bp, Homo sapiens
ttcataaaatgggattttcttttctatggcattgtcaggctgcaaattttccaaacttttatgctctgcttcccttataaaactgaatgcttttaacagcactcaagtcacctcttgaatgctttcctgcttagaaatttattccaccagataccctaaatcatctctctcaagtccaaagttccacaaatctgtagggcaggggcaaaatgccaccactctctttgctaaaacataacaagagtcacctttgctccagttcccaacaagatcctcatctccatctgagaccaccatagcctgaaccttattgtccatattgctatcaggctttttgtcaaagccattcaacaagtctctaagaagttccaaactttcccacattttcctgtcttcttctgagccttccaaactgttccaacctctgcctgttacacagttccaaagttgtttccacattttyaggtatcttttcagtagcaccccactctgctggtaccaatttactgtgctagtccattttcacactgctgataaagacatactcaagagtgggcaatttacaaaagaaagaggtttaattggacttacagttccacatggctggggaggcctcacaaacatggtggagggcaag

SEQ ID NO: 942048 - DNA, 625 bp, Homo sapiens
ttggatgtcctttctttctttctcttctctgattgctctggctaggacttctagtactatgttgaataagcatggtgaaagtgggcatccttgtcttgttccagttctcaggggaaatgcttttaacttttccccattcagtataaggttggmtgtggatttgtcatagatggcttttattaccttaaggcatgtcccttctatgccgattttgctgagggtcttaaccataaagggatactggattttgtcaaatgctttttctgcatctattaagatgatcatgtgatttttgtttttaattctgtttatgtggtgtatcacatttattgacttacatatgttaaaccattcctgaattgttggtataaaacccacttcattatggtggattatctttttcatatgctgttggattttgttaactagtattttggtgaagatttttgcatttatgttcatcagggatattggtctgtagttttctttttttgttatgttctttcctggttttggtgttagggtgatgctggcttcatagaatgatttagggaggattccctctttctctatctttggaatagtgtcaataggattagtgccaattcttctttgaatgtctgat

SEQ ID NO: 942049 - DNA, 602 bp, Homo sapiens
taatttttttgtattttttttctttagcagagacaaggtttcactatgttagccaggatggtctcaatcacctgaccttgtgatccactcgcctcggcgtcccaaagtgctggggttacaggtgtgagccactgcacccgatctttttttcacttttaaatcaaaacagatcattcatacaagagaagaaatacatatgtagagatgacaaatcattcagtgggcctctctgtaatgcttccygctccagtccctgagtagctccccccgcccagctgtgcacgtcttcttctttgtgatgtggtctctacacagatttgggattcattttccctcgcttctctttttagttttaccacatattaatgtatccttaaacaatatgttcttaagccttgcttccttttgccgtttatagaagcagagtcaaacaatatatatttttccatgacatgcttttagctttcagcactgtggttttgcagtctctccaggttgatgggtgcagctgtggtccattcgttttcttagctgaataatactcctgttgtaggaatagatggcagcaagcgtaacccctcttcatggatgggtacctgggt

SEQ ID NO: 942050 - DNA, 625 bp, Homo sapiens
gggaggagaccaatgtgctaactgtcagctcagcagactgtggagtttctgttcttggttgtggtggggggtctctctcaggaatcttcttcaaaattttgcttccctcccccactggttgtccttttcatagacrtctcacccacgatagcagggaatgagcccctctaaactattccctcagaacaataaaaagatgatgaaggtgatgatgaggataaagaggatggtgacagacaccacgacatcatgaacccttactgagggcttcctaaaggccaggctctgagctctgtgctctctgcagcttgtttcatttcatctgcgtagtctcccagttattagtgcacatttcaggattattttacagactagaaaaggagcaacacattttcatataacttgtaccagatcatgaagtcaaaaagggtgaagcccaatttgaaccaggcagtctaaggccagacacatggcatctggccagtcctctccctgcatccaccctgccccctccaatccttgtcactcaggacaatgcccctgctcactgtgcccttccctttgggggttccttgtagaccacagctagaccagtgggtgccacaatcactgtgtcaagtatgga

SEQ ID NO: 942051 - DNA, 766 bp, Homo sapiens
tggctcatgcctgtaatcccagcactttggggaagccgaggcggacggatcacaaggtcagggagttcgagaccagcctggccaacatggtgaaaccctgtgtctactaaaaatacaaaaattagccaggtgtggtggcaggcacctataaccccggctactcgggaggccttggcaggcaaatcactcaaaaccggaaggcagaggttgcagtgagcccagattgcaccactgcattccagcctgggagaaagagcaaaaccccatctcaaaaaaaaaaaaaaaaaaaaagattcaggttccctgagaggctcctctgctgtgacacaaacccattgagggtgcagcagccacctgagcccctccacatcacccttgtgggacttggcaggcaaggggaattgacacaaatgtgccagtgttcatgacgcttgttgtgccatgagtaataaagcatttttttctctgacccaggattctcaygtcttctgccagaatccacaaaactgtgcaggctaaccttgttagcttgcaagaagagtaaaatctgactttcgtcagtacttaaccacctatgtgactcgtctcctgctactgtcccctcagtgcctcaggccagccacatggtctccttgatgtcctcagaacacatttggcacaccctttcttaaagcctttgtatgggcttttgttttcttcctgaaatgctcttcccccagatatcaatttagctccctcccctctgtcaagtctttgctctaacttg

SEQ ID NO: 942052 - DNA, 766 bp, Homo sapiens
tggctcatgcctgtaatcccagcactttggggaagccgaggcggacggatcacaaggtcagggagttcgagaccagcctggccaacatggtgaaaccctgtgtctactaaaaatacaaaaattagccaggtgtggtggcaggcacctataaccccggctactcgggaggccttggcaggcaaatcactcaaaaccggaaggcagaggttgcagtgagcccagattgcaccactgcattccagcctgggagaaagagcaaaaccccatctcaaaaaaaaaaaaaaaaaaaaagattcaggttccctgagaggctcctctgctgtgacacaaacccattgagggtgcagcagccacctgagcccctccacatcacccttgtgggacttggcaggcaaggggaattgacacaaatgtgccagtgttcatgacgcttgttgtgccatgagtaataaagcatttttttctctgacccaggattctcacgtcttctgccagaatccacaaaactgtgcaggctaaccttgttagcttgcaagaagagtaaaatctgactttmgtcagtacttaaccacctatgtgactcgtctcctgctactgtcccctcagtgcctcaggccagccacatggtctccttgatgtcctcagaacacatttggcacaccctttcttaaagcctttgtatgggcttttgttttcttcctgaaatgctcttcccccagatatcaatttagctccctcccctctgtcaagtctttgctctaacttg

SEQ ID NO: 942053 - DNA, 598 bp, Homo sapiens
cagcctgcccctgtctaccccttgcagcagggagcctgcgagcaaatgagtgcagtaacctgagcgagtgctttggggaattggcaggaataaaccccatttactcagctcgccaagctcaaccccttgttggagggagcacataagtgagggagtgtgcgatctgactgaccatttttgggtgctggcaggtgcaaactcggtgtgggccacgcggcaatgaccttgtgggggttcctgcgacccctgaagccacagaagtcacgttacaatgatctttctgctctgccctccgcagatggcttaagtgttaatagctcagtgggagggcaaagagccaatgtgaaagccttcttttgggtatcagcactcacggctctctacctcttgtcctgcgtctaggaaaaatgagtttgcacgaacaaattgaaggatggcgaacrtggaggattttattgaactatgaaagtggctctccgtgggcaggggagctaaaaaggcgacgggacaggcaggtaatcttcccaagtctagcagtctctggctagacacttctctatcaagtcatccctctgaagtcaagttgcttctttctaat

SEQ ID NO: 942054 - DNA, 602 bp, Homo sapiens
gcccaagctggagtgcaatggtgcgatctcagctcactgcaacctctacctcccaggttcaagcgattctcctgcctcagcctcccgtgtagctgcgattacagccatgtgccaccacgctaggataatttttgtatttttggtagtgacggggtttcaccatgttggccaggctggcctcgaactcctgacctcaagtgatctgcctgcctcagcctcccaaagtgctgggattacaggcgtaaaccaccacacctggccccaaatcttatttttgttcttagttttagtttgataatctaagatatagattagaatgtactgtatgaatcctttccccatgttttgttaccttaaataatatgrtattctaactattctgccataatcctgagtctcgtcttccttggcctgtggctgtccatgacacagagccaacatacttgtagtggacattggttttcagttgtgttttctgctaatgtagagttactggttagttctaattaaactgggggtgctgaggctaggcctgctgaggaatttatacccagattcaaaaggcattgagtttcatgttataaaagaagttgtgtagttaa

SEQ ID NO: 942055 - DNA, 718 bp, Homo sapiens
gtgccaatgtgctactaatggctgccagaattaaaatactttctccatgtctagaatatatttagacttctaaaatgtgaattagaaaaattacacaattgagaaaaaaatgttacgtttccccttctcttttctccctcctttcccatgttaataattaaagtatacaccataaagaagtctgactacaatgtagtcgattacaaagatttatgaacaagatagagattctgaagtaaatcagaaagttaaaaaattatcgattcccaggtgagatgaccaaataggaacagctccggtctgcagctcccagcaagaccaatgcakaaggtgggtgatttctgcatttccaattgaggtacccggttcatctcattgggataggttagacagtgggtacagcccacagagggcaaggagaagcagggtggggcatcgctgcacccaggaagcgcagggggttagggaactccctcccctagccaagggaagctgtgagggaccctgccctgagcgactatgcactctggctcagatacaacacttttccccatggtcttcacaacccacagaccaggagattcccttgggtgcttacaccacaacagccctgggtttcaagcacaaaactgggtggtcatttgggcagacaccaagctagctgcaggagttttttttccataccccagtggcacctagaatgccagcgagacagaac

SEQ ID NO: 942056 - DNA, 598 bp, Homo sapiens
gcgactatgcactctggctcagatacaacacttttccccatggtcttcacaacccacagaccaggagattcccttgggtgcttacaccacaacagccctgggtttcaagcacaaaactgggtggtcatttgggcagacaccaagctagctgcaggagttttttttccataccccagtggcacctagaatgccagcgagacagaaccattcacacccctgaaaagggggctgaagctaaggagccaactggtcttgctcagcagattccatccctatggagcccagcaagctaagatccactggcttgaaattcttgctgccagcacagcagtcagacctgggacactcgagcttggtgtggggagggatgtccatcattactgaggctcgagtaggcagttttcccctcacagtgtaaataaagccacygggaagtttggactgggtgaagcccaccacagcaccacaaagccactatagccaaactgcctctctagattcctcctctctgggcagggcatctctgaaagaaaagcagcagccccagtcagggtcttatagataaaactcctatctccctgggacagaacacctgagg

SEQ ID NO: 942057 - DNA, 763 bp, Homo sapiens
acagaacatttcatccaacagccatagaatacacattctattcaacagcacatggaactttctccaagatagaccatatgataggccataaaacaaacctcaataaatttcagaaaactgaaattatatcaagcactctctcagatcacagtggaataaaactggaaatcaactccaaaagaaaccttcagaaccatgcaaatacatggcaattaaataatctgctcctgaatgagcactgggtcaaaaactaaatcaagatggaaattaaaaaattttttggctgggcgcagtggctcatgcctgtaatcccagcactttgggaggccaaggcgggtggatcacgaggtcaggagatcgagaccatcctggcyaacactgtgaaaccccgtctctactaaaaatacaaaaaaatgtagccgggcgtggtggcgggcacctgtagttccagctactcaggaggctgaggaaggagaatggcgtgaacccgggaggtggagcttgcagtgagtcaagatcgcgccatcgcactccagcctgggcaacagagcaagactccgtctcaaaaaataaataaataaataaataaaaaataattttttgaactgaatgacaataatgacacaacctatcaaaacctctgggatacagcaaaggcggtgctaagaggaaagttcatagccctaagcacctacatcaaaaagagtgaaagagcacaaactgacattctaaggtcacacctcaaggaactagagaaataaca

SEQ ID NO: 942058 - DNA, 779 bp, Homo sapiens
gagtcctgtacatggagccaaatgacaggactcttattccaattctgacattaactttatttaagccaatctctgagacttaaatctcccatctagagagtagaccacctaatttttaagatccttgtagcattaaaagttttagaattcttttttggggtggggagggggacaggctctcactttgtcacccaggctagagtacagtggcacaatcttggcttactgcagtatcaacctcctgggctcaagcaatcctcccagctcagctcctcaagtagctgsgactacaggcacatgctaccatgctgggctaattttttgtattttttgtagaagagcggtctcatcatgttgcccaggctggtctcgaattcctaagctcaagtaatccacccaccttggcctcccaaagtgctaggattacaggggtgagccaccacgcccagccaaacttttagaattcttaagctgtatttttctgccctaaaattgtcaatgtactaaataatttcttcaggttaaggaaatgaaggagctgaaggtaataaactcttaagctgtgtaagatttaattcaatacttcatttaatggactcattgacatctgatattttattaaatacatctttctcaccaaaaactttaagttaattaatttttttttttctttttgagacggagtctcactctgtcacccaggctggagtgcagtagcgcaatctcggctcactgcaagctccgcctcccaggctcacgccattctcccgcctcagcct

SEQ ID NO: 942059 - DNA, 779 bp, Homo sapiens
gagtcctgtacatggagccaaatgacaggactcttattccaattctgacattaactttatttaagccaatctctgagacttaaatctcccatctagagagtagaccacctaatttttaagatccttgtagcattaaaagttttagaattcttttttggggtggggagggggacaggctctcactttgtcacccaggctagagtacagtggcacaatcttggcttactgcagtatcaacctcctgggctcaagcaatcctcccagctcagctcctcaagtagctgggactacaggcacatgctaccatgctgggctaattttttgtattttttgtagaagagcggtctcatcatgttgcccaggctggtctcgaattcctaagctcaagtaatccacccaccttggcctcccaaagtgctaggattacaggggtgagccaccacgcccagccaaacttttagaattcttaagctgtatttttctgccctaaaattgtcartgtactaaataatttcttcaggttaaggaaatgaaggagctgaaggtaataaactcttaagctgtgtaagatttaattcaatacttcatttaatggactcattgacatctgatattttattaaatacatctttctcaccaaaaactttaagttaattaatttttttttttctttttgagacggagtctcactctgtcacccaggctggagtgcagtagcgcaatctcggctcactgcaagctccgcctcccaggctcacgccattctcccgcctcagcct

SEQ ID NO: 942060 - DNA, 712 bp, Homo sapiens
atccaaactcttaggaatacataaggcaaggttctcaaacagaactttttttttttttttttttttttttgagatggagtctcactctgtcgcccaggctggagtgcagtggtatgatctcgactcactgcaagctctgcctcccgggttcatgccattctcctgcctcagactcccaagtagctgggactacaggcacctgccaccacacctggctagttttttgtatttttagtagagacagggtttccctgtgttagtcaggatcgtcttgatcccctgacctcgtgatccgcctgcctcagcctcccaaagtgctgggattacaggcgtgagccaccaygcccagactctcaaacagaacttctaagagtattagttcaatcaaaaatttgtgtccccacttttgtagatcctacctcagcaaagcagtgtggggcccagggctttcatttccattgtgaaaaccagttttctgaaacatccaacaacccatagaatactgtggttatcattaactaaagatttcactttttgccacagctaataacttccactccagtttttttttggcttgtttagtttctttccttttccatgggctaactttgtatttggttagttttcctctgtgatttccatcattttttaaaaatactactggagtgtatcttcaagcatttgcagaacttttaaaacctgcatttctctc

SEQ ID NO: 942061 - DNA, 557 bp, Homo sapiens
tgtctcagtctcaattatgtattcttgaactggagacacgagcacaggatgggtttgaggacccaatgggtcccctttgagacaaatctgagctaaaactccatcaatcacctgccctccatgagcccctactctgactggtgggccacagtgactttttggatctcctggaattaatgtcagttcagaacccgtgtccggcagcctctgataaacctgtctatttcctcttccccaatgcacagctaccctggtaaaaggccaaagttgaacagtatcagtttttggcagtgtacctgggtccttcctccaagggacacagcctcctttttattcaaggggttttgggtctgtaaactggctcaagtctggggattaattgaggggccatgactctgttttttatgatttgaattagacktttattcacttgacctagaacttttctgtttatacagatcaagtaggaatttagtaggcttcctatatctatttcatttaggatcaccatggtggatcaatttgccaatgccaaaggtctgctctagtcagactgc

SEQ ID NO: 942062 - DNA, 573 bp, Homo sapiens
aggaagagaaaatatatctactattcattcagtggaagtggatcatcataaaactcttcatccttgtggtcttcaagttgcatatgctgaagaagaggaggaagaggaggggttggtctcgctgtctcaggggtggcagcggcagaaggaaatccaagtatgagtggactcacgctctttaagagtcaattataggctgggcgcagtggctcacgcctgtaatcccaacactttgggaggscaaggcaggcggatctcttgaggtcaggagtttgagaccagcctggccaacatgacgcaaccccatctctactaaaaatacaaaaattagccagatgtggtagctacttgggaggctgaggcaggagaattgcttgagctgggaggcggaggttgcagtgagccatgattgcaccactgtactccagcctgggcgatgtagtgagactcggtatatatataaaaaagagtcaactataatttcacacaaatatatgccttctggcttcttttgaaaagcaggaagaactgccaccctgggcctgccctcctatagagtaatgatggctggcg

SEQ ID NO: 942063 - DNA, 573 bp, Homo sapiens
aggaagagaaaatatatctactattcattcagtggaagtggatcatcataaaactcttcatccttgtggtcttcaagttgcatatgctgaagaagaggaggaagaggaggggttggtctcgctgtctcaggggtggcagcggcagaaggaaatccaagtatgagtggactcacgctctttaagagtcaattataggctgggcgcagtggctcacgcctgtaatcccaacactttgggaggccaaggcaggcggatcwcttgaggtcaggagtttgagaccagcctggccaacatgacgcaaccccatctctactaaaaatacaaaaattagccagatgtggtagctacttgggaggctgaggcaggagaattgcttgagctgggaggcggaggttgcagtgagccatgattgcaccactgtactccagcctgggcgatgtagtgagactcggtatatatataaaaaagagtcaactataatttcacacaaatatatgccttctggcttcttttgaaaagcaggaagaactgccaccctgggcctgccctcctatagagtaatgatggctggcg

SEQ ID NO: 942064 - DNA, 599 bp, Homo sapiens
ctcacacctattagtgtaattaaattagaatagatcataggtataaaagtaaaaaatgtaaaactgttaaaactttttaaataaatcagaaaaaaagcttttgaccttgggctaggcaaagaattcttagccacaataccatcagcacaaccaataaaagacaaaaaaaaaaaacgatcatttggacttcctcataattaaaattatttgctctgtgaaaaacatagtagaatgaaaggcaaactaccaactgagaaaaaatatttgcaaatcacatgtctgacaaaagacttgtatccagaatrtataaaaaactatcaaaactcagcaataaagaaaccaataaaagaatggacaaaaatctgaatggacacattatcaaaaaagttacagatgacaaacacctgaagcacaatgagaaactgctacacactttttacaatggctaatattaaaaattcataaataagtaactgaccatgacaagtgctggcgagaatatagagcaactgaaactctcacagggtacctgtgggaatgcaaaattgtacagtcaccataaaaagctgtttgatatttcttataaaataaaacacact

SEQ ID NO: 942065 - DNA, 607 bp, Homo sapiens
tggcagatcatggccagactgctgcttttttgtttgtttgtttttttgagatggagtttcactcttattgcccaggctggagtgcaatggcacaatctcagttcactgcaacctctgcctcccaggttcaagcgattttcctgcytcagcctcccaaatagctgggattacaggcatgggccacgatacctggctaattttgtatttttagtagagatggggtttctccatgttggtcaggctggtcttgaactcccgacctcaggtgatctgcctgccttggcctcctgaagtgatgggattacaggcgtgagccaccacgactggccagactgcttctttaagtgggaccccaacccatttctcctcactgggcaggacctccctgtggggtcttcagccactccacctaggcttatagggacagagctctgaactttccctgggatggagcttccagggggaggggtggctgttatctctgtggtgcagttgattcagccattccagtctgctggctttgcagagtccaaattttctggacaaggatgggttccctccagtagagcaaacctgctctaccaaaaagcagccagactgcttcttt

SEQ ID NO: 942066 - DNA, 733 bp, Homo sapiens
aaataaaatatgttctgttgccgggtgcggtggctcacgcctgtaatcccagcactttgggaggctgaggcgggcagatcacctgaggtcgggagttggagactaacctgaccaacatggagaaaccacgtctctactaaaaatataaaattagccaggcatggtggcgcatgcctgtaatcccagctactcgggaggctgaggcaggagaattgcttgaaccagggaggtggaggttgcagtgagccgagatcacaccactgcactccagcctgggcaacaaaagcgaaactccgtctcaaaaaaaaaaaaaaagttctgtcctccttccttgacaaatacaccttcataaggacaaacacacctggaaggctgggtttgtgtttagaattctcaggctccttggagaccacaggaggagctgtagcgggtkggggagcccgcctctcagcctctggcctccggcttcacactcgcctcttcttttctttttgccccaggttctgtccttttccctgaggggctgtgcatgctcaggtgtaggcactccaggctgtaagcacatgttctgtccacaccccctgccaacagccacctcctggtcactcctggggtttaggggtgcccaaacaggtggctcagacaaccctcaggaggatgcacacaggacgcaggctggggccattgaacagggaactccagggccccaggtgccagatcatggtcaaggggc

SEQ ID NO: 942067 - DNA, 600 bp, Homo sapiens
tggatccaaaagcacccggtttcgaagtctgtcttcaaaggaagacccccagatagagttgccggataaaatagaggacacccaattaaatgtgagtttcagatacaccatgaatgagtttgtgctgtaagtatttgcatgggacatatcgtacttcaactaaaatgtcmctggttgtttattagaaatgcacatttaactgggtgtcctgtttttttgttttgttttgttttggtttttttttttttttttggagatggagtctcccgctgtcacccaggctggagtgcagtggcgccatctcagctcattgtaacctctgcctcccgggttcaagtgattctcctgcctcagcatcccgagtggctgggattacaggtgcgtgccaccacgcccagctaatttttctatttttagtagagatgaggtttcaccgtgtcagccaggatgggcttgatctcttaacttcgtgatccgcccgcctcggcctcccaaagtgctgggattgcaggtgtgagccactgcgcctggcctgggtgtcctgtatttttatttgttcaatctggcaaccccgccgtcggagtctcagcctcggaactg

SEQ ID NO: 942068 - DNA, 604 bp, Homo sapiens
tatgataggaaggaagtcgggtttaatcaggactgtagttatgccaagtgaattcaaaaagtgggatatgggagtcaaggctaaatgcaagggagtgattaaactgattagctatgacattaaataaggaaggagttaaatgagatcacaaagggatgaggtaaagtgaaagggtagtaggatcaatggattaaaataaaagtcactgtgtggttgaataattgtagaagtttcgtactaagcagaatgagctggagtaacagatgtggccacagagaggaatgcttaaaattgaatagaattattacaaatgataagatctagtatatgactatgcatatgagtggctacagcagtgtaaatgacaagaacactggaaaggaggtcaaasaacacaaagactagagtgtctgaaggatcaaatccacatatattaaaattgctaggacttaatagtagcattctacagtttaccactgagttagggaaaaaaacctttgagagatgaaggggaatgacccaagggtttttagatgacagcagcaatgagaggttatgggtgatgacatgaaattaaaatccggatatttcagggagtaaagag

SEQ ID NO: 942069 - DNA, 588 bp, Homo sapiens
gcctccagcttttccaggtgcacagtgtaagctgtcaggggatctaccattctggggtctggaggatagcatccctcttctcacagctccactaggcagtgccccagtggggactctgtgtggtagctccaaatccacatttcccctttgcactacccttgcagaggttctccatgagggttccacccctgcagcagacttctgcctggacatccaggcatttccatacatcctctaagatctaggtgaaggttcccaaacctcaattctagccttctgtgcacctgtagacccaggaccatgtggaagctgccaggcttggggtttgcatcctctgaagcaacagctcaagctgtatcttggccccttttagccatagctggaactggagtggctaggatgcaggacaccaaatcctgaggctgcacagaccagcagggccctgggcccrgcccatgaaaccatttttccctcttaggcctccagacctgtgatgggagggactgctgtgaagatctgtgacatggcctggagacattttccccattgtcctggtgattaacattcagctccttgttacttgtgcaa

SEQ ID NO: 942070 - DNA, 766 bp, Homo sapiens
ttatttctcagttctctagtcttttccattgatctatgtgtctatttttataccagtaccatgctattttggttactagagctttgtaatataatttgaagtcaggtaatattatgcctcccgctttgttctttttgcttaggattgcttttcctattcgggctcttttttggttccatatgaattttagaatggtttttttttctaattctgtgaaaaatgacgttggcattttgataggcattgccttgaatctgcagagtgctttggacaatatggtcattttaatgacattgagccttctaatccgtgagtttgggatgtttttccacttgtttatctacaatttctttcatcagtgttttgcagttctccttgtagagacctttcagttctttagttaaatttattcccagatattttatttattttctgtagccattgtaaatgggrttggcttctggatttttttctcagctagctcgttgttgatgtataaaaatatcactaattatttttatttatttatttattcttattttttgagatggagtcttgctctgttgcccaggctggagtgcagtgatgcaatctcggctcactgaaagctctgcctctcgggttcatgccattctcctgcctcagcctcctgagtagctgggactacaggcacccaccacagcacctggctaattttttgtatttttagagagacggggtttcaccgtgttacctaggatggtctcgatctcctgaccttgtaatc

SEQ ID NO: 942071 - DNA, 664 bp, Homo sapiens
ctgttgaggctagacgcatttggtttatgttaatataatgcttcaaattctttaatttaaaataaattttatagaatgccctttaattgattataattatctcatacaattcaaacttgtaaatttgtgtaagttctttatagattctggatattagaccttcgtcagatgcatttcccccacttctctaggttgtctatttactctgttgatagtttcttttgctgtgcagaagctctttagtttaattagcccccatttgtgaatttttgattttgttgtaattgcttttggcgtcttcatcatgaaatctttgctcgtttctgtgtccggcatggcattgcttaggtggtcttccaaagtttttatagttttgggttttacatgtaagtcattaatacatacaggattaatttttgtacayggtacaaggaaggagtccgcatatggctagccagttatcccagtatcatttattgaataagtagtcctttccctattgcttgtttttgtcaagtttgtcaaagatcagatagttgtaggtgtgcattcttatttctgggctctctattctgttccattggtctatgtgtctgtcattgtaccagtaccatgctgtttggttactgcagccccgtagtataaagttggatagcgtgatgcc

SEQ ID NO: 942072 - DNA, 758 bp, Homo sapiens
gcatggacaactacttgcaaatgtccggtttggaaagcctcactgtggaggtcacatttaagtgacagatgagaagaagccagcgagaaggacagtggggccgcagccgctcatttcaaacatgaaggtgcacgtgcctcctgcaagatccaactcagcaggtccggggtggccctgagtgtctgcatttctttctttccttctttcctttccttcttctttccttccttccttccgcctttcttttttttgacggagtctcrctttgtcaccaggctggagtgcagtggcacgatctcagttcactgcaactctgcctcccaggttcaagtgattctcctgcacagcctcccgagtcaggcgtgcgccaccacaccaggataatatttgtatttttagtagagacggggtttcaccatgttggccaggatgatcttgatctcttgacctcgtgatccgcccacctcggcctcccaaaattctgggattacaggtgtgaaccaccacgcctggccttgcctttctcaccagctctcagggctgttgacactgcaggaccacactgtgagtggccagggactagcagaggacagggggcagagggtggatccaggtccagacgacagagtaccttgaaggcaagtggggagtttggattttattctcaggatagtaggaagccaggcagaggagtgacatgactgaaggatgcttctagaagctcattttggctgctgcgtaaagacttgctagggcca

SEQ ID NO: 942073 - DNA, 579 bp, Homo sapiens
cttgctctgtcacccaggctggagtacagtggtgcagtcatggctcactgcagcctcgatctcctgggctcaagcgattctcccacctcagcctctggttgctggaaccataggcatccaccatgtgtacctaatttttgtatatttgtagagactgggtctcacttatttgcccagattcattttaaccttttctacgtgtgcaatacaagtgtgcattaaggatatccacaaggctgtgtaaccctctccgcgaccattcccagagctttcctaatcagaaaactgtaaccattgcacagtaattgcccttccctgaactcccagcccccggcgagcggggctyatggctgaataacactgcactgcatgtgcagactacattttgtttatccacttatccctccagggtccttgggttgtttccaccctctggctgctgtgaatagcgctgctgtgaacatgggtgtaatgcgcttgcttcagttcctgcattcagcccttctgggtatatactgaggagaggaattgctggggcgcatggtaattctatgtttagggttttgaggatccactgaa

SEQ ID NO: 942074 - DNA, 623 bp, Homo sapiens
tgtatttttaatagagacgaggtttcaccatgttagccaggatggtctcgatctcctgacctcgtgatctgcccgcctcagcctcccaaagtgctaggattacaggcatgagccaccgcgcccggccagcactgttttttttatcttggtaggggcagttcaggaactttcatgtagcctttattgcaaaayaggtctcacttttgagaactgaaagtaaaatcctaagcactcccaccaactgaaaagatcccccttgaccaaaggaccccagagaaaccttaaaaactgagttaacagccatgacaggacagaaggtcagacatgcctcgctgtaccctgtcccttttgtggtttaggcacaactgaccaacattaatgttaaaatagagatcataagactgacagaagagactctggcaaaacgataccaaattataaacaggaccaaaggccatgctaggcaaggattaagtcatgcacccctatacttaaagaagaaactatattctgtcacaggtggtttttttttcctctaacagttaaacaagcactagcctcaagataaacaatattaaaacaattacaactcaaccactgccagacactcactgaccctcctg

SEQ ID NO: 942075 - DNA, 722 bp, Homo sapiens
ttttcaaccgtgtggatgtattacttcttaacaaacattcatgaaagtaaaagatgaggaaaaggtattttaaaaggaaaaaaatgtgtataactgaatataaaacatactacttaacagaaaaaatagatctaaaatgcttagaacccacaaaaaagttaaatgaaattttagcttaatgctgttgcatatttctgctttataattgcagcatgagatgtgatgtctttttataggaagtaggtttactcatattaacctcattttacagatagagaaacagagcttgggagactaagtgacttagccaaagtcacacagcttttaaagtcatggagtgggtatttgaaacmtgggcagcatagagttcatgctgtgatattgcacagcttcaagagaagtctctggctgtttttccatctactccttgtctttctccttctgccttttcttttttttttttaatttaattttattttactttaagttccaggatgcatgtgcagaacatgcaggtttgttacataggcatacatgtgccatggtggtttgctgcacctaacaacctgtcatctaggttttaagccccgcatgcattaggtatttgtcctaatgctctcctcccgccttttcaatgtgaaccttcccacccaccctgcttttcttgtcttcttcccatagcttcagcaggctccaggtgccgcagccctgactcctcaggg

SEQ ID NO: 942076 - DNA, 651 bp, Homo sapiens
ttttttttttttagataaattctctgttgcccaggctggagtacagtggtgggatcacagctcactgcagccttgacctccctggctcaagtgatcctgccacctcaccctcaccgagtagctgggaccacaggtgttcaccatcatatgtggctaatatttttattttaatttttgtagagactggatccctgtgttgcccaagctggtctccaactcctgggctcaagtgatcctcctgtctcagctttccaaagtgttgggattacaagtgagagctactgtgctcagtgtggtctgtgtatctttactaagcttttgatcaaagacttttttaattttaaagaagtctgatttatcattttttcttgttatggtcatgctttctgtttttgtctaataaatcyttgcctaccccaaggttacgaagatcttctccttccctagtaaaatctgagcttcgtgggggcagacaccttatggttctcctcctgctcttctcacttgtgtcctgtacaacacctggcccctaggaggtacacggcggtgttcatggaaggagcaaatgagttgtcttaaggattcataataatgtattctaagcacttgatatactgcctggcacatgcaaaatgagcattcaggaatctg

SEQ ID NO: 942077 - DNA, 651 bp, Homo sapiens
ttttttttttttagataaattctctgttgcccaggctggagtacagtggtgggatcacagctcactgcagccttgacctccctggctcaagtgatcctgccacctcaccctcaccgagtagctgggaccacaggtgttcaccatcatatgtggctaatatttttattttaatttttgtagagactggatccctgtgttgcccaagctggtctccaactcctgggctcaagtgatcctcctgtctcagctttccaaagtgttgggattacaagtgagagctactgtgctcagtgtggtctgtgtatctttactaagcttttgatcaaagacttttttaattttaaagaagtctgatttatcattttttcttgttatggtcatgctttctgtttttgtctaataaatctttgcctaccccaaggttacgaagwtcttctccttccctagtaaaatctgagcttcgtgggggcagacaccttatggttctcctcctgctcttctcacttgtgtcctgtacaacacctggcccctaggaggtacacggcggtgttcatggaaggagcaaatgagttgtcttaaggattcataataatgtattctaagcacttgatatactgcctggcacatgcaaaatgagcattcaggaatctg

SEQ ID NO: 942078 - DNA, 613 bp, Homo sapiens
gtcaccagatacttgaggactacaggatgtttgcacttgggacatagatcttcgtcattcaatcctgatgaccagtgaatgatttgtctatagcctagtggggaaggtgtatctgcacaattctagtaattaaggaactgtcacatgtttgaagagaatactgtgggagccatgagagagcagcttaagtcaagacagcctgcaacacaggggatctaagmtgcattttgctagctattaaagcgcactttggaaggacacagtgtatgcaaaggcacagaatggaggagaatggctctttctgggagtctggggtcacccaccgtggatgatacctataggtaagcatattaggtagctagaggggcaagacttagagagatgattgggggccagactgcaggcaatgggaattatgtagcaggttttgagtgagagtgatgtaattaattttccttcttagcagcatagtggaattgaaaaaatgctatcattgatgttgaagatggaccaccatgaagactggaggccaggagactagttgaaaggcagatacaggaacaaaaccatgtagtctgttctggaatagagacatgtatgagaaaggttaaga

SEQ ID NO: 942079 - DNA, 613 bp, Homo sapiens
gtcaccagatacttgaggactacaggatgtttgcacttgggacatagatcttcgtcattcaatcctgatgaccagtgaatgatttgtctatagcctagtggggaaggtgtatctgcacaattctagtaattaaggaactgtcacatgtttgaagagaatactgtgggagccatgagagagcagcttaagtcaagacagcctgcaacacaggggatctaagctgcattttgctagctattaaagygcactttggaaggacacagtgtatgcaaaggcacagaatggaggagaatggctctttctgggagtctggggtcacccaccgtggatgatacctataggtaagcatattaggtagctagaggggcaagacttagagagatgattgggggccagactgcaggcaatgggaattatgtagcaggttttgagtgagagtgatgtaattaattttccttcttagcagcatagtggaattgaaaaaatgctatcattgatgttgaagatggaccaccatgaagactggaggccaggagactagttgaaaggcagatacaggaacaaaaccatgtagtctgttctggaatagagacatgtatgagaaaggttaaga

SEQ ID NO: 942080 - DNA, 706 bp, Homo sapiens
ctgtcactcactttaaaattactacagtggcgatattgagatatctagtgtgcttaaatgacctcatcttgtaaaggagggcaatagtcaactaaagagctggtgtcaataacagaataatgtttatctcagactcttgtgggaaactttcatgtagatgtgccctctgatatctctggatacatcatacgtagagatttgtgagaatctcttcaacttcttgcttcagccaggttttgcatcagtgagatgcagagccctagggagaggggactcacttactgctcctgctggctgactgaacaacttccaggtaagaggaagggtcgtcccctctgatataggagttgatggcttccttcaccaaatctttctggagctgggcttgggccagctgactccacacagcaggctcattgcatctctccgcaaactcatatgcccggtccaggtttccaatgtgctcgatcaggacctaggggttatgagaggacttccattctctgcaacatctagtcagctccaaaaaaaaagacacatttttgtttggtttcctgttctgcctaaagctgcatgaccrtttcacttcagtcagaagcaatcaggtactaagcatttctcagatggacaggttgagggaagagacaagagctattatatgagaagggggatgccgaacaaagaagagacactccaataaagaggc

SEQ ID NO: 942081 - DNA, 624 bp, Homo sapiens
agccatctgcccacctttgcctcccaaagtactgggattacaggcatgagccactgcacctgaccacttacagctttttaaatcttgatacctttaacccatctggatgagtatctaaattaaagttattctcatatgtgttagttatatctccccagaaaaactctactcttctagaaaatatggaccgcatcttttttttttttttgagatggagtctcgccctgtcrcccaggctggagtgcagtggtgcgatcttggctcactgcaacctccacctccgaggttcaagcgattctcctgccacagcctcccaagtagctgggactacaggcacgcgccaccacgcccagctactttttgtatttttagttgagacggggtttcaccatgttggccaggatggtctcgatttcttgacctcatgatccacccgcctcagcctcccaaagtgctgggattacaggcgcgagccaccgtgcctggtcatagaccacatcttagattaaaaaaaaaaaagtctccctccctggttacatacacagtagttgtttggtgtatgtttatagagtggatatttatgactaaacagactaaggtttgaccctgtactcatgagtagtc

SEQ ID NO: 942082 - DNA, 624 bp, Homo sapiens
agccatctgcccacctttgcctcccaaagtactgggattacaggcatgagccactgcacctgaccacttacagctttttaaatcttgatacctttaacccatctggatgagtatctaaattaaagttattctcatatgtgttagttatatctccccagaaaaactctactcttctagaaaatatggaccgcatcttttttttttttttgagatggagtctcgccctgtcacccaggctggagtgcagtggtgcgatcttggctcactgcaacctccacctccraggttcaagcgattctcctgccacagcctcccaagtagctgggactacaggcacgcgccaccacgcccagctactttttgtatttttagttgagacggggtttcaccatgttggccaggatggtctcgatttcttgacctcatgatccacccgcctcagcctcccaaagtgctgggattacaggcgcgagccaccgtgcctggtcatagaccacatcttagattaaaaaaaaaaaagtctccctccctggttacatacacagtagttgtttggtgtatgtttatagagtggatatttatgactaaacagactaaggtttgaccctgtactcatgagtagtc

SEQ ID NO: 942083 - DNA, 576 bp, Homo sapiens
ggagtcagtgatgtgaatatttgggacaagcatatttcatgcataggagaccccccagtaatagagatgtagaaaaagagcttgttttgtgtgtttgaggaccagccaaaggcaagaatagctggagtgcagtggctaatgtgtaaagactagagagtaagctgcaggacacagtgacagcaaggagaatggtgggaggatcttttaatactccaggggaaagtatgttgcttggactctggtggtaatcatgggtgcaataagaattaatgctgatttagaaaatattttcaagtagagtcaaaaaagtcttatacagtgtgaaaagagaaagaggaacagtggtgccattaactgagataaggaagaccatggatgtattaggccattcttgtgttactataaaggratacctaagactaggtaatttataaagcaaaggggtttaattggatcacagttctgcaggctgtaaaagcatggcattaatatctgatttgcttcctggcacgcttgaaggtatttcctgaggcccaggcagaaaatgaagcaggagcacacacatcacatggtgag

SEQ ID NO: 942084 - DNA, 653 bp, Homo sapiens
atggcaacagccagggcagatttgaaggactcagggacacacgcgctcatcctgctgtcttctccagtcctggagatggttcttggttctctcattttataggccagctatgtgtacaccaaaaagtgactgaggcaggtctcaatcaagatttatttagtaaatcaaggtttattaaattgaacaagtcgaggtttatttagccaaggttgaggacatgccctggaaaaaaagatacaagtcacaggaacatctatgacctgtgtttttcccaaaggcggtttcgggaacttcagtgttaaaaggagaaagagaatgcaggagagaaaaaaagaaagggagggagggtaggmagtgaggcagatgattacattcttgtgaggctctgattaacttcaaaaaatctacattttacatacaataaagagggaatagagaaaatgagactacaacacagggttgtgaaattacaactatatatttgggaacaaaaagaacagtttttgtgtgactcagttcccaaggttaactgtccttttgacatagtgagtttgggtcctgagttcaattttctttgacacttaggcatgtggccaggtgacagcacttatactgcttaatccgtgaagagtgaccaagtggaagtaaaccat

SEQ ID NO: 942085 - DNA, 562 bp, Homo sapiens
ctgtgatgtcttggaggaacaatgtaaaccggcagtgtaacaagagcaggtcatttatgagtagttgagaatggtgaataggagtatgactagacagaatatagtaggaatgacaactttttggggcgcagtctaagtagtgggggtgactgtgtaaagccctgttgcaaagagtagggtaaggatggatagacctaatagaatgaagggatgtattaagctcataagggttcttattgttcttcagaaatgtgagtgagtttaagggaagtaggggagagtacttgcgacttccaggaggaagaggagatatcagkctggctggctgacagacacagctttatcctggaatggtgaacccagtggggagggtcctataggtggatagtggttagagtactatagatgactaaatagggtccggttcatcgaggttgtagagtttgaggggtcagattcttaacaagaactgatcgtccagctagggtgtcttcctgtggctgggaatctggagtaggcaagagaagattagcagcagggcgaatttcctgtctagcctgct

SEQ ID NO: 942086 - DNA, 689 bp, Homo sapiens
gagtttgagtggctgaggcaatttcttcaaataagacaacaatgaactttgctgcaccagttggcttttgctttcacaaaagatttctctatagcacatgatgctctttaatagcattttacccacagcagaacttctctcaaaaktggattcagttctctcaaaccttgtatctgctttagcaactatgtttatggaatattctaaattatttgtagtcatttcaacaatgttcacaacatcttcaccaggaacagatttcatcttaggaaaccactttctttgctcatccataagaagcaactcctcattgcttcaagtttgatcatgagattgcagcactttagtcacacaacaggctctacttctaattctaattctcttacagtttctaccacatcagcagttacttcctgctctgaatttttgaatccctaaaagttatccatgagcgctgaaatcagcttcttccaaactcctattgatgctgatattttgaccttctcccatgaatcacaaatgttcttagtggcatctagaatggtgactcctttccagagggtttcaacttactttgcccacatctgtcagaggaatcactatctgtggcaactgtagcctcatgaaatagatttcgaaagttgagctgactccttgatccatgggctgcagaatggatgttgtgctag

SEQ ID NO: 942087 - DNA, 555 bp, Homo sapiens
gtttgagtggctgaggcaatttcttcaaataagacaacaatgaactttgctgcaccagttggcttttgctttcacaaaagatttctctatagcacatgatgctctttaatagcattttacccacagcagaacttctctcaaaattggattcagttctctcaaaccttgtatctgctttagcaactatgtttatggaatattctaaattatttgtagtcatttcaacaatgttcacaacatcttcaccaggaacagatttcatcttaggaaaccactttctttgctcatccataagaarcaactcctcattgcttcaagtttgatcatgagattgcagcactttagtcacacaacaggctctacttctaattctaattctcttacagtttctaccacatcagcagttacttcctgctctgaatttttgaatccctaaaagttatccatgagcgctgaaatcagcttcttccaaactcctattgatgctgatattttgaccttctcccatgaatcacaaatgttcttagtggcatctagaatggtgactcctttcca

SEQ ID NO: 942088 - DNA, 689 bp, Homo sapiens
gagtttgagtggctgaggcaatttcttcaaataagacaacaatgaactttgctgcaccagttggcttttgctttcacaaaagatttctctatagcacatgatgctctttaatagcattttacccacagcagaacttctctcaaaattggattcagttctctcaaaccttgtatctgctttagcaactatgtttatggaatattctaaattatttgtagtcatttcaacaatgttcacaacatcttcaccaggaacagatttcatcttaggaaaccactttctttgctcatccataagaagcaactcctcattscttcaagtttgatcatgagattgcagcactttagtcacacaacaggctctacttctaattctaattctcttacagtttctaccacatcagcagttacttcctgctctgaatttttgaatccctaaaagttatccatgagcgctgaaatcagcttcttccaaactcctattgatgctgatattttgaccttctcccatgaatcacaaatgttcttagtggcatctagaatggtgactcctttccagagggtttcaacttactttgcccacatctgtcagaggaatcactatctgtggcaactgtagcctcatgaaatagatttcgaaagttgagctgactccttgatccatgggctgcagaatggatgttgtgctag

SEQ ID NO: 942089 - DNA, 579 bp, Homo sapiens
tatctatgtcacagagcaaaaataacactttggtaatgctttaattaaaatcaagtacctagagttcattccatatttcaggcctgtaggagaaaaaaaaagcaaaaccacttccccttgcagtgatacacgaatggaaatatccgagacagcgaaacctgaatcagctacaaacagtatgaccttgcatgactaacttattctcccatccaatcaacatgtcatgaccgggcgcagtggctcatgcctgtaatcccagcactttgggaggctgaggtgggtggatcacgaggtcggagttcaagaccagcctggccaacgtagtgaaaccctgtctctactaaaaatacaaaaaattagccagacgtggtggcgggcgcctgtaatcccagctactcgggaggttgagscaggagaatagcttgaatgctggagggggaggttgcagtgagctattgcaccactccactccagcccaggcgacatgcgagactccgtctctaagtaaataaataaaaaataaacatgtcataagcacccaccatgttgtagacactaatgacaagtcccacaaactct

SEQ ID NO: 942090 - DNA, 571 bp, Homo sapiens
tgtgaaagcagaaattaacaccagctggttgttaagtgctaactttagtcttttaaaaggaaattgcaagacaatctcaaaccagtttctttttttctttttttttttttttttttgagacagtctggctctgtcccccaggctggagtgcagtggcaccatctcggctcactgcaagctctgcctcccgggttcatgccattctcctgcctcagcctcccgagtagctaggactacaggcgcccaccaccacgccctgctaatttttttgtatttttagtagagacagggtttcaccatgttggccaggatggtctcgaactcctgacctcrtgatccgcccatgtcggcctcccaaagtgctaggattccaggcttgagccaccgtgcccggcctcaaaccagtttcttacctagtgatgggtctcaggctgtagactactctctgccatcctaggagcaggaaaaaaaaaaactcatcttccctgttggaagcgagctcaaactacataaaggagttacctgccttctatcatcatggaagcagaaaaacttgccttcctattagaag

SEQ ID NO: 942091 - DNA, 645 bp, Homo sapiens
acaatcaagtggggctttttccaggtcctcccatgaaccaatcagtacacacttcctcctgctcatggaccaatcggcatgcacttcctctgagcctataaaaaccccaaactcagactcagacacttgtccagacgacctgcctgccaatgggagctacctacttcagstttcttctagactgagaactgttttgtcactcagtaaagctcatttctgttttgctcaccctccagttgtccacataacctcattttccctggatgtgagataagaacttgagactcccccaaacaaggagctgtaacacatccacggccagctctccatgctgacaggagccaaaggggttataacaccaaagccctccatctttgctagtgccacctgaccagcacacatgatgcaaagcagaggcagggctaggccagcccaagagatgaaggcagcagaagaggagaaagagagaagagctgtggcccttctgggagcctagaccttggggctccctgagccagggctctgatatgctgtaacaccctctttggggatctgtggctcttggtgtctctgagcttttgggaaccaacacgttcccctcatccagacactggtgcccacagtggaagacacttgtggtacttc

SEQ ID NO: 942092 - DNA, 645 bp, Homo sapiens
acaatcaagtggggctttttccaggtcctcccatgaaccaatcagtacacacttcctcctgctcatggaccaatcggcatgcacttcctctgagcctataaaaaccccaaactcagactcagacacttgtccagacgacctgcctgccaatgggagctacctacttcagctttcttctagactgagaactgttttgtcactcagtaaagctcatttctgttttgctcaccctccagttgtccacataacctcattttccctggatgtgagataagaacttgagactcccccaaacaaggagctgtaacacatccacggccagctctccatgctgacaggagccaaaggggttataacaccaaagccctccatctttgctagtgccacctgaccagcacacatgatgcaaagcagaggcagggctaggccagcccaagagatgaaggcagcagragaggagaaagagagaagagctgtggcccttctgggagcctagaccttggggctccctgagccagggctctgatatgctgtaacaccctctttggggatctgtggctcttggtgtctctgagcttttgggaaccaacacgttcccctcatccagacactggtgcccacagtggaagacacttgtggtacttc

SEQ ID NO: 942093 - DNA, 645 bp, Homo sapiens
acaatcaagtggggctttttccaggtcctcccatgaaccaatcagtacacacttcctcctgctcatggaccaatcggcatgcacttcctctgagcctataaaaaccccaaactcagactcagacacttgtccagacgacctgcctgccaatgggagctacctacttcagctttcttctagactgagaactgttttgtcactcagtaaagctcatttctgttttgctcaccctccagttgtccacataacctcattttccctggatgtgagataagaacttgagactcccccaaacaaggagctgtaacacatccacggccagctctccatgctgacaggagccaaaggggttataacaccaaagccctccatctttgctagtgccacctgaccagcacacatgatgcaaagcagaggcagggctaggccagcccaagagatgaaggcagcagamgaggagaaagagagaagagctgtggcccttctgggagcctagaccttggggctccctgagccagggctctgatatgctgtaacaccctctttggggatctgtggctcttggtgtctctgagcttttgggaaccaacacgttcccctcatccagacactggtgcccacagtggaagacacttgtggtacttc

SEQ ID NO: 942094 - DNA, 567 bp, Homo sapiens
attattattattattttttgtatttttagtagagacagggtttcaccgtgttagccaggatggtctcaatctcctgatctcgtgatccgcctgccttggcctcccaaagcaaagggtctttcttacaagggctcttagttgtcctgataacataagcaggtgaaatacattgttcaaggagacattaayaatggtgaacaagagcatatagagaggggaggaagacagggctgacccctaaagtcattctggtgatggcagggaagcaggggagggaggctgatctttggtaaatgcaggaacaagttggcttaggatagggctgcatacaaggaccacaagtttaacaagggccagcacttgagttctcacataataattatacagctaacactgtgggctggatgctgctctaattaatttacccctcccaacaacctgtgaaatgaggataccattactgtctccattttacaagtgaggcaactgaggcacagagggcaggaactgcccatggccacaagggctggaagtggtgcggtagggctggccctctgctgtgtgtcc

SEQ ID NO: 942095 - DNA, 567 bp, Homo sapiens
attattattattattttttgtatttttagtagagacagggtttcaccgtgttagccaggatggtctcaatctcctgatctcgtgatccgcctgccttggcctcccaaagcaaagggtctttcttacaagggctcttagttgtcctgataacataagcaggtgaaatacattgttcaaggagacattaacaatggtgaacaagagcatatagagaggggaggaagacagggctgacccctaaagtcattctkgtgatggcagggaagcaggggagggaggctgatctttggtaaatgcaggaacaagttggcttaggatagggctgcatacaaggaccacaagtttaacaagggccagcacttgagttctcacataataattatacagctaacactgtgggctggatgctgctctaattaatttacccctcccaacaacctgtgaaatgaggataccattactgtctccattttacaagtgaggcaactgaggcacagagggcaggaactgcccatggccacaagggctggaagtggtgcggtagggctggccctctgctgtgtgtcc

SEQ ID NO: 942096 - DNA, 468 bp, Homo sapiens
ccaactaaacagttattttatgttaactggtatccagatgtttccaaagaatattagtgaaatgcagacatctgcaactatacacagcacaaagcactgatctgatttttaacttaattaccacagatattccttagtatgctcaagtctaatgagcagtgcatgctaagtttctctaggagaaataaaaatcaaaagcagaaactagcttaagttgctayagtgatgaagaaaacaaaccagctcattactttaaaaaagattcagtgaaaaccacaattgactaagcttgaatttttcttccttttcctagctgactcaaaagcaaacacacaaaagcctccagctagagtcactgttttttttttataattaatcattaacaaaacatttatgaaaatccaaatggttttaaaattacttcaacctggttctcttaatagggtttgatttattcatcagaaatct

SEQ ID NO: 942097 - DNA, 634 bp, Homo sapiens
gagagacagcacaggggaaaatgccacatttaagccatcacatctcatgagctctcactatcatgaaaacagcatgggggaaactgctcccatgatccaatcaccttccaccaggtccctccttcgacatatggggattaccattcaagatgagatttgggtggggacacagagccaaaccatattattcttcccctggcccctcccaaatctcatgtccttttcacattccaaaaccaatcatgccttcccaacagtcccccacaaagtcttaactcattccagcaataagccaaaaatccaagtccagagtctcatctgagacaaagcaaatagtcayttgtcgcttccacctatgagcctataaaataaaaaaacaaggtagtcactgccaagatacaatgggagtacaggtattgggtaaatgctcctgttccaaatgggagaaattgaccaaaacaaaggggacacaggccccatgcaagtccaaaacccagcaaggcactcattaaatctgaagctataaaacgatctccttttacttcatatctcacatgaagagtatgctgatgcaaggggtaagctcccaaggccttgcacagctccacccttgtggcactgcagggtacagcca

SEQ ID NO: 942098 - DNA, 833 bp, Homo sapiens
caacagagtagacattcttctctctgcacatgatacatactctaaggttgaccacacaactgacataaaacaatcctccaatttaaaaaaaaaaataccaatcacacccttggacaacagtgcaataaaaatagaaatcattactaagaaaattgctcaaaatcatacaattacatggaaactaaacaatcagcttctgagtgacttttgagcaaataatgaaattcaggcagaaatcaagatgttctttgaaactaatgagaaaaaagataccacataccagaatctctgggacgcagctaaatcagtattatgagagaagtgtgtagcactaaacacccatatcaaaaagttagaaagatctcaagttaacagcctaagatcacaagtaggaactcaagaaacaaaagcaaaccaactgtaaggctagcagaagacaagaaacaaccaaaatcagagctgaactgaaggagactgagctgtgaaaaatcgtacagaagatcaacgaatccaggtattggttttttttaaagaattcataagatayatagaccactagcaagactgataaagaaaaaaaaagatccaaaacacagtcagaaatgacaaaagagatgttaccattgactccacatagaaacaaaaaatcgtcagagactactacaaacacctctatgcacatgagctagaaaacctagacaaaattaataaattcctggaaatctacaacctcccaagattaaatcccaaaatagaccaataacaagacccaaaattgaatcagtaataaaaagcctaccaaccagaaacccataaccaggtggattcacagc

SEQ ID NO: 942099 - DNA, 633 bp, Homo sapiens
gaatgaaaatgaaaatcaatatatcaaattttgtaggatgtaattaaaacaaagcttagagagaaacttttaacattaaatgcttatattagaaaagatggttctcaaattaatgatctaagcttatgccttaaaatacctagaaaaagatgatttaagtaaacctaaatcaaactgaaggaagaaaataacaaaaatacatgcagaaggccgggtgcggtggctcacgcctgtaatcccagcactttgggaggccgaggtgggcggatcatgaagtcaggagatcgagaccatcctggctaacacggtgaaactccttctgtactaaaaatacaaaaaaattagccaggcgtggtggcgggcacctaatgtcccagctactcgggaggctgaggcgggagaatggcacgtgaacccgggaggcggagcttgcagtgagccragatcgcaccactgcactccaacctgggccacagagcgagactctgtctccaaaaaaaaaaaaaaaaaaaaaaaaacatgcagaaattaatggatttaaaccaaaaaagagattttgttcaatttacaattggttatttgaaaagatcaatagcattgacaaatctttagccagatggagagagagagaga

SEQ ID NO: 942100 - DNA, 729 bp, Homo sapiens
gaacacttaagctctttatgttaagaaatggaagggccaagggtgttacagaaccaccagattcatattcccactactcagtaacaaactaatgcactcagcacataggttttgcagcagagaaagaatttaatgaatacagggtgaccaagcaagaagactgggcgaatcctcagagggatctccatttccagaggaaactccttttcccccaaggactcttgtgctgggatttttaagggagtcttggagggcaagggctagaaaactgaggttactgagtggtcagggtaagggggatgaagccatcaggatgtattctttggtgagccagctcactgtggggtcctgtagaccaactgacacagtagtttcacagataggcaggacctgaaagaataactcaaatagaaaacttaacgtttcacaatgcttaagttgttatctgcagagcagctaagggaaactgtaatcttttgacaaggtctacgtgattttgaggcagyaggcaacaaacaactatgagaaagcaggagagaataagctgacttcatgattagtgctggatgtgctgcaagcttggttattttcatttctccccctcccttcttctctgattaattttgtaaagtttatagggatggtttcaaggtggcaacatggttggtctgcgtttagggcatcattgttcttaatctggccctgcagtgaggcagcctaccttgctta

SEQ ID NO: 942101 - DNA, 669 bp, Homo sapiens
ctccagccctcagtgagcacattttctttttcttttttttgtttttaagttagtatttattaactgttgttttaataaaggaatgtttttttccctttaatcccaattcagttgcttaatgtaaaaccacagacaaattacttattattattattattattattattattattatttttgagtcggagtctcactctgttgcccaggctggagtgcagtggcatgatcttggctcmctgcaacctccgcctcctgggttcaagtgccctgactcagcttcccgagtagctgggattacaggcatgtgctacaacgcccttctaatgtttgtattttttgtagagacagcattttgccatgttggccaggctggtctcaaactcatgacctcaagtgatctgctcgcctcagcctcccaaagtgctgggattacaggcatgagccaccatgactggcctaatgagcacattttccactgagggattagaagcagcaagttgttgccagttcatcacaagtcaggtgggctgacttgggatgggagcttactgggccatcctattggtacaaggaagactcctagcacagccatcaagctgagcctccatgctactgctttctctgagaggccacctcatccagccttttctttccaaatttctctattag

SEQ ID NO: 942102 - DNA, 640 bp, Homo sapiens
attgaatcacataatatatggcctttagtggctggccttttcccttagcatgttttcaaggttcatccatgttgtggcaaatatcagtacagttggcctctttatccatgggtttcacatctatgaattcaatgaactgtggatcaaaaatagtcagggaccaggcactgtggctcatgcctgtaatcccagcactttgagaagctgaggcaggcagatgacttgagatcaggagttcgagaccagcctggccaacatggtgaaaccccatctctactaaaaatacaaaaattagcctggggtggtggtgggcacctgyaatcccagctacttgggaggctgaggcaggagaatcactcgaacccgggaggcggagattgcagtgagccgaaatcgcggcactgtactccagcctgggtgacagagcaagactctgtctaaaaaaaaaggaaaagaaaaaaaaactccggaaaagaaaatgaatggttgtatctatactgaacatgtacagatttttttttcttgtcattattcccaaaacaatacagtataacaactattcatgtggcatttatattttactaggtattgtaagtgatctagagataaagtgtatgaggggattgtgtaggttgtgtgc

SEQ ID NO: 942103 - DNA, 783 bp, Homo sapiens
taatctacctttgcctcagtttcttcatttggttgtttgtttgtttctttgagacagagtcttgctctgtcacccaggctggagtgcagtggtgcaatctcagctcactgcaacctgtgtccccctggttcaagcaattcttgtgcctcggcctccctagtatctgggattacaagcgcccgccaccacgccaagctaatttttgtatttttagtagagacagggtttcgccatgttggccaggctggtctcgagctcctgacctcaagtratccacctgcctcggcctcccaaagtgctgggattacaagcgtgagccaccaagcccagccagtttcttcatttgtaaactggggagaatgatggcattacctctcaggattgctttgaggaaaatttgagtgaaaacatgcaaggtgtagaataatacccaccccataggaatcactcaataaatgctgactacggctgttactgtggtgattgttatcatcggttatcattgctgttgtcattattagtgctggggaagccaccacctttcatcatgccaagtactgcctggcacctccatgaatgtcctcccccttaactaaccacagtaacacacggacagcgttgtcgtggcctgtgcaggactgagctggacttgaacccaggaccaaccccacagctcatcttccttccccagccccaggggccctggggactcacagtgggaacaacgcctaccttgcccacacctggagctgccctgcctcactgctaccccaggcgggtgtc

SEQ ID NO: 942104 - DNA, 751 bp, Homo sapiens
ctttctctccttgggcttttcttatttcctgagacacaaaaatcataaaattaggccaattaataattctacaattgcctctaaatgttcaagtgaaagaaagagttgcacgtttatttaaatcaaaagctagaaaagattaagcttagtgaggaaggcatgttgaaagccaagataaaccaacagttagacttcttgcaccaaacagatagccaaatggtgaatgcaaaggaaaagttcttgaagaaattgaaagtgctactccagtgaacacacaaatgacaaaaaagtaaaacagctttattgctgatgtacagaaagtttgagtagcctagagagaacatcaaaccagctcccrcattcccttaagctatagcctaatccagaccaagaccctaactctcttcaactccattaagcctaagagagattgacaggctgcagaagaatagttggaagctagcacaggttggttcatgaggtttaaggaaagaagccgtcaccataacataaaagtgcaaggtgacgcagcaagtgctgatgtagaggctgcagaaagttatccaacttatccagaagatctagctaaggtcattaatgaaggtggctacatgaaacaacagattttcaatataaatggaacagccttctattggaaggagatgccatctggactttcatagctagagaggagaagtagatgcctggcttcaaacgacaggctgactctcttgttaggggtgaatgcagc

SEQ ID NO: 942105 - DNA, 693 bp, Homo sapiens
ctgcctctttttatagggacaccagtcctagtggattagcaacccacccttatgacctcatttaaccttaattacctctttaagggccttgtttacaaatacagtcacattggaggaggttaggacttcaatatataaaggtgagggtggaggagacacaatttagtacctaacattttctttatgtttggggaccatcctttagctaaagactaaatctgctagcaacaaattcatagttttttccatctaaaaatgtcttatttcctcctcatttttgaaagatggcttgttagatgtagtattcattgttgatagttggggttttgatttggctgatttttactttttwatttttgttattttttttcatcacttgaaaaatatggccttgatggtttcagattaaaaatctaccatcattcaagttggtcttccactataggtaatgcatcgtttatctctagctgtttttaaaatttttttgtcttcagtttttcagaagtttatgatgtgtctctgtgtggatttcttggggtttatccagttccatttcactgagcttcttgattctgtagttttatgtctctttctaaatttgggaagttgtcagccattagttttttgagttcttcttagccccagtcccaccttattctcttttccttgtggaactctgtatgaatgttagat

SEQ ID NO: 942106 - DNA, 594 bp, Homo sapiens
ggtcccttttctccacaatcttgccagcatctgttatttttgactttttaataatagccattctgactggtgtgaggttgtaactcattgtggttttgatttgcatttctctaatgatcagtgatattgagctttttttcataggtttgttggctgtatgtatgtcttcttttgaaaaatgtttgttcatgtcctttgcccactttttagtgggtttctttgtttttctcttgtaaatttgtttaagttctttgtagactctggatattagacctttgtcagatgaagagattgcaataattttccccattctgtrggttgtctgtttcctctgttgatagttttttgcgtgtgtgtggtgcagaagctcttaagtttaattagatcccatttgtcaatatttgcttttgttgcaattgcttttggtgtctgtgtcatgaattctttgccagttcctatgtccaagatgatattgcctaggttgtcttccacagtttttatagttttgggttttccatttaagtctttaatccatcttgagttgactttcatatatggtgtaaggaaggggtccagcttcaatcttctgtatat

SEQ ID NO: 942107 - DNA, 655 bp, Homo sapiens
tgaacttttaacaaatggctaaaatcagagtgtgagctagtgtgagagcatagagccatagatatgagggagtttctaactatttgaagtttctttgtttttatttaatttttttgagatggagtctcatcctgtcgcccaggctggagttcagtggtgtgaacacagctcactgcaacctccacctcctgggttcaagcaattctgctgcctcagccccccgggtagttgggattacaggcgtgcgccaccatacccggctaatttttgtatttttagtagagacagggtttcaccatgttggtcaggctggtcttgaactcctgacctcgtgatccaccyaccttggactcccaaagtgctgggattacatgaaatctctttattaacctcatggggggttcattagaaagattgggagcagggcaactgatctcaaaaaaaaaaaaaaaactattgtattgcaggcttggggaaggggagcagccattgctgcaggaaagaggaaagacaacagagctctgcccaggtccttctcccccatggaaaagtaagcttatgtcactaggggatggctggcaaatactatcattctcaagtgaagacctattgaggctagaagaaaacagaaaaactgcctacccttagaggaaag

SEQ ID NO: 942108 - DNA, 655 bp, Homo sapiens
tgaacttttaacaaatggctaaaatcagagtgtgagctagtgtgagagcatagagccatagatatgagggagtttctaactatttgaagtttctttgtttttatttaatttttttgagatggagtctcatcctgtcgcccaggctggagttcagtggtgtgaacacagctcactgcaacctccacctcctgggttcaagcaattctgctgcctcagccccccgggtagttgggattacaggcgtgcgccaccatacccggctaatttttgtatttttagtagagacagggtttcaccatgttggtcaggctggtcttgaactcctgacctcgtgatccacccrccttggactcccaaagtgctgggattacatgaaatctctttattaacctcatggggggttcattagaaagattgggagcagggcaactgatctcaaaaaaaaaaaaaaaactattgtattgcaggcttggggaaggggagcagccattgctgcaggaaagaggaaagacaacagagctctgcccaggtccttctcccccatggaaaagtaagcttatgtcactaggggatggctggcaaatactatcattctcaagtgaagacctattgaggctagaagaaaacagaaaaactgcctacccttagaggaaag

SEQ ID NO: 942109 - DNA, 603 bp, Homo sapiens
ctggagttttcacagtcactatttcctctgcctgaaatgttttccacaaatattcatatggccgacaactttacctcctttaggtttttgttcagttgtctttttaatgaggcctactctgggaatgctattaatgttaaaaatttctacccatattccttggcttacactcctaattcccctttaccatctgcggtaagcagcctctatgatggcccccagttcaccttcaggtattcacagccttgtgcaatcctttctctttgagtaactcatttcaaactaacagaatatgacaaagttgagggatgtcacttccatgattaggttacatgagactttgacttctattttgctagcagattctgtctgttgccttctcaacttgcattctttgatgaagcaagttgccatgtgggagaagctcatgtctcaaggacctgagasgccctctggccagaagcctgataatcacaggctctcagtccaacaacccacaaggaactgttgactcagtgtcaacaatcactgaatgaaattcgtagtggatccttccatactggagctttcggatgagaccaaatcctgggctgacactctgat

SEQ ID NO: 942110 - DNA, 748 bp, Homo sapiens
gtttctgtcctggcctccccatacttgggctctcctatcttggattcataattatatttctagccactttttctttcttactcctttagctcttattttctttttttttttttttacagttatatttgtataattttgagaaggacaaatgcagttttgttacgtggctacattgcatagtggtgatgtttaggcttttagtgtatccatcacccaaatagtgtacattttacccattaagtaatttcttatccctcacccctcttccacccttccacccttctgtgtctccagtgattattccacattctatgtccatgtgaatgcattatttagctcccacttataaktgagaacatgcagtatttgactttttgtttctgagttgtttcacttaatggcctccaggtccattcattttgctgcaaaattcataattccattctttttatggctgaataatattccattgtgtatatatatcacatttcctttatccaatcattcattgatggacacttagtttgattccgtaactttactattatgaatagtgctgtgataaacgtgagtataggtgtcttttggctataattatttcttttcctttgggtagtttcccagtgggattgctggatcaaatatagttttattgttaattctttgaggcctttcattacggtggggtttttttgttctccctttcccctcaagtagcctctgaacattacatgcctaatcatcctct

SEQ ID NO: 942111 - DNA, 619 bp, Homo sapiens
ggtgcagaaccatctgtgaaccaggccctagtcttctcttcttctgtcaactgatcatagggaactccctatgtggccatcagtgcaggctggggaagagaaggcagagtggcaggagtgtagacaacgggcatttgagccacctcctcaagtaacttacttgtgccttcgggacctgcttgagcccaatcatgtatataccacttccatktgatgatggaattgctgctgtgcatgactcactttatggcttgatgggtcagaaagcacgcagttcataataggcagttcgggtcacatggtgacttgatgacccatagtcaaacgttcagtttccactaaaacccagtaacaggccaagagctgtctctcaaaaggagagtagttatctgcagaagatggcagggcctcgctccaaaatactagaggcctctgctgtgattcacctatggtggcctggcaaagtctccagacagcatccctatctgccactgacacctcaatcaccattggatctgctgggtcatgtgtcccaagtggcagagcagcttgcacagcagcctgggcctgttgcagagccttctcctgttctggaccccactcaaaattggtagccttt

SEQ ID NO: 942112 - DNA, 631 bp, Homo sapiens
ccaaaatactagaggcctctgctgtgattcacctatggtggcctggcaaagtctccagacagcatccctatctgccactgacacctcaatcaccattggatctgctgggtcatgtgtcccaagtggcagagcagcttgcacagcagcctgggcctgttgcagagccttctcctgttctggaccccactcaaaattggtagccttttgggtcacttaataaatgatccrgcataacacacccaaatgaggaatgtgttgcctccaaaatccaaataggctcactaagtgctgtgtcccttttttggttgtaggaggggccaaatgcagcaacttctctttcaccttagaaggaatatctcaacaggccccacaccattggactcctagaaattttattgaggtagaaggtccctgaattttagtcagatttatttcccatcctctggcatggaagtgtctcaccaacaagtccagtgagtttgctacttcttgctcactggatccaatcagcctaatgtcatcaatgtaatgggccagtgtgatatcctatgacagtgaacagtgatcaaggtctctctgaataagattatgacacaaagctagagagtttatataccactgaggtaggata

SEQ ID NO: 942113 - DNA, 791 bp, Homo sapiens
gtccattgttggtgtgtaggaatgcttgtgatttttgcacattggttttgtatcctgagacttggttgaagttgcttatcagcataaagagtttttgggctgagacgatggggttttctgaatatacaatcatgtcatctgcaaacagagacatattgacttcctctcttcctatttgaatacgctttatttctttctcttgcctgattgccctggccagaacctccaatactatgttgaataggagtcatgagagagggcatccttttcttgtgctggttatcaaagggaatgcttccagcttttgcacattcagtatgatattggctatgggtttgccataaatagcttttattattttgagatatgtwccatcaatgcttagtttattgagagtttttaacatgaagagatgttgaattttattgaaggccttttcttcatctattgagataatcatgtggttttcgtcattggttatgtttatgtgatggattatgtttattgatttgcatatgttgaaccagccttgcatcccagggatgaagccaacttgatcatggtgggtaagctttctgatgtgctgctggattcagtttgccagtattttattgaggattttaacattgatgttcatcagggatattggcctgaagttttcttttttgttgtgtctctgccaggttttggtatcaggatgatgctagcctcataaaatgagttaaagaggagtccgtctttttctattgcttggaatagtttcagaaggaatggtaccagctcctctttgt

SEQ ID NO: 942114 - DNA, 656 bp, Homo sapiens
caaacagtccaattacactctaagttattttaaaatgtacaattaagtcattattgactatagtcaccctattgtgctatcaaatactaggtcttattcattctttctgtttcttttgtactcattaactaacccaaccacttcctattcttcataaaatgaccttctaggtgtggaaaaccctactttccttaacttagctaggacaaagtggacattcttggagaggaatgtttactataagactcaaaaaaaacccagcaaattcaaaaaggtagatatgaaggcatttgagacttcaataactggagctaaaaaaaaattggttaccaatatggaaaaaattgggtcccacctcacaccatacagtaaaaaaaatctagatggatttaagactttaatgtcaaaaacaaaacttaaggcattcatattgtaagagaagaggttaagttgtctctgtttatagattacatgatcttatatakagaaaaccctaaagactccaccaaaaaatattaaaagtaataaatgggttcagccggcagcagtggctcatgcctgtaatcccagcactttggaaggctgaggtgggcagatcacaaggtcaaaagatagagaccatcctggccaacatggtgaaaccccgtctctggtaa

SEQ ID NO: 942115 - DNA, 558 bp, Homo sapiens
tttttgtttgtttatttatttattttgagatggagtctcacactgtcgcccgggctggagtgcagtggcgcgatgttggctcactgcaacctccgcctctctggttcaagcgattctcctgcttcagcctttcaagtagctgggattacagtcacctgccaccacgcccagctaattttttttttttttttttttttttttagtagagatggggtttcattatgttgatcaggctggtctcagactgctgacctcgtgatctgcccacctcagcctcccaaagtgctgggrttacaggcgtgagccaccacgcacggccatttttttgtatttttagtagagatggggtatcaccatgttggccaggctggtctcgaactcctgacctcaggtgatccacccgcctcagcctcccaaagtgctgggattacaggcgtgagcctctgctgtggccaaccttcttttcaaaattacattggtacatttccggctcgtggttattctcttctcagttaagatctctaggtgttctgctagatctgcgtagcctcccccctc

SEQ ID NO: 942116 - DNA, 594 bp, Homo sapiens
gaggcagcagaatggcgtgaacccaagaggcggagcttacagtgagccgagatcgtgccactgcactccagcctgggcgacagagcgagactccatctcaaaaaaaaaaaaagaaacctccaagtatatctgtgcggttttgcttaaaaatttttgaaacaaacttgataaaatactaatgtaagagaaaccagagtaatagatacatgaatattcattatactattttctacattattctgcatgcttgaaatatttagaaaagtatatgacatatttcagacaaatttctatcaaatgcatttgaaactgcccctaacatagcaagctgggagtatttcmtctctctaatctcctatagtggtttgtttctctcacctatggctcaaatcctcttgtgacttgtgaatcaggcagacctgtgtttaaatcccaactccacagcttactggttgtataaccatagacaaattaatttatctctttgaacctcagtcacctaatctgtaagatgtagataatagtatgtatctcacctgcttattgtaaagattgactatattaaatataataataatgtccagagagcctggc

SEQ ID NO: 942117 - DNA, 761 bp, Homo sapiens
aatttctgaaaataaacaaaaaaagctgcctgatattttgacagagattgcttgaatctgtagatcaatttaggaagtattgccatcttcacaatattgtctttcaattcatacatatgaactgtctttccatttatttggatcttctgaattttttcaacaatattttacagttttcagaagtcctggacttactttgttaaatttattcctaagcattttatcctttgttatgctgttgtaaatgaaattggttttggaatgtcattgttagtgtatagaaatacagtgcatttctgtaaattgatcttgtatgccacaaccttgttaaatttatgtattaattctaatcatgttatttaggatattctgtatacaaatgtcatatatctatttacaatgtcatctacaaatagagatagttttatttcttctttttcagtctggatgccttttacttactgttcttgcataattgcccaggcggaagcttccagwgcaatgttgaataaaagtggtgagaacagacatcttactctggtttctgatcttttctgatcttagaaggaaagcataagcatgatgttagctgtggattttttgtagatgctcgttatcaagttaaggaagttctcttctatccctggtttgttgaacatttttattaccactatctctttttgtataaagttttattggagcacagccatgttcatgcatttacatattgtctacagctacttttgcactgttagcagcag

SEQ ID NO: 942118 - DNA, 565 bp, Homo sapiens
ccatgctagtctgaaatccaacagaacagtcagtaaaacttaaagttccaaaacgatctcctttgactacatgtctcacatccaggtcacactgatgcaaaatgtgggctcccacagccttgggcagctctgcctctgtggttttgcagagtatagcccccctyctggttgttttcaaagtctggcattgaatgtctgtggtggttccagacacacagtgcaagctgttggtggatctacaattctgtggtctgaaggatggtggcattcttctcacagctcctctaggcagtgtccagtggggactttgtgtgggggctctgctagggcacttcccttctacactgccttagcagagtttctccatgcgggctccgcccatgcagcaaacttctgcctggacatccaagcgttttcatacatcttcggaaatccagacagaggtttctaaacctcaattcttgactcctatgaacccgcagcctcaacactatgtgcaagccaccaaggcttggggcttgcatcctctgaagcaagggactgagctgtacattggcccctttta

SEQ ID NO: 942119 - DNA, 611 bp, Homo sapiens
ctttaaatcaaaagctagaaatgattcaacttcatgaggaaggcatgttgaaagctgagataggccaaaagctaggcctcttctgccaaacagttagccaagttgtgaacacaaagaaaaggttattgaaagatattgaaagtgccaatccagtgaatacacaaatgataagaaagcaaaaccatcttattgctgatttggagaaagttttagtggtttgggtaaatgatcaaaacagacacaccattcccttaacccaaaacaaagccctaactttsttcaattctctgaaggctgagaggggtgagaaggtaaaaaagaaaagtgtgaagctaacagagtttggctcatgaagtttaagaaataagtcacctccataacataaaagttttaggtgaagcaacgagttcagatgtaaaagtcataacaacttatcctgaagatctagctaagatcattaaagaaggtggctacactaaacaacagatcttctatgtagacaaaatagttttgtattgaaaggcaataccatctaggactttcctagctagagtgcagaagtcaatgcctggcttcaaagctttagaggacaggttgaatctcttgttagg

SEQ ID NO: 942120 - DNA, 559 bp, Homo sapiens
tatatgtctacttttatgccagtaccatgctgttttggttactatggttttatatagtataatttgaagtcaggtaatgtgatgcctccaggtttcttattcttttctcaggattgctttggcgattctagatcttttttggtcgcctatgaattttargattgtttgttttatttccatgaagaaggtatttggtattttgttagggattgtattgaatgcaaggattgctttaagtagtatggacatttaaaaagtattgattatttcaatctgtgaacatggaatgtatttctacttcttctcttcttttacatttctttcatcagtgttttattttttatcatttagatatataacttttttgattaagtttatgttcagataattaattttagttgttattgcaaatgagattgctttcttggtttctttttcaggttgtatgctgtttgtaaatagaaacgctattcacttttttgtgttgattttgtatcctgcaactttactggatttctcagttctaatttttggtagatttttagttttcctaaatata

SEQ ID NO: 942121 - DNA, 628 bp, Homo sapiens
aagtgtgatgaatttattgatgtgcccattcgactagactgtagtcctcactaatgtaggtgttgccatgaaggtattttacagatataatcaaagcccctgatacggtttggctctgtgtccccacccaaatctcatgtggaatggtaatccccatgtgttgggggaggggcctagtgggaggtgattggatcatggggggaatttctcccatgctgttctcatgatagtgggtgagttctcacgagatctgatggtttaaaagtatgtggcacttccctcttgytctctctctctcctgccactatgtgaagaagatgcttgcttcccctttgccttctactatgattctaaatttcctgaggcctcccagtgatgcttcctgttaagcctgcagaactgtgagtcaattaaacctcttttcttcataaattacccagtctcaggtatttatagcactgtgaacatgggctaatacaggccctaatcagttgactttatataagggacaatatcctagataatctggatggacctgactgaatctgttgcaagaccttaaaagtagagcctaggtctcacacagaaagggcagaaattctacctgtgcaccacagctttagcccat

SEQ ID NO: 942122 - DNA, 614 bp, Homo sapiens
acaaacatatcaatagagatgatatacagatggtaaatcagcacatgaaaagatgctccacatcatacatcattaggggaattccaaattaagacaaaaaagatgtattgctatacacctactagaatgaataaaatcccaaacgctgacaacatcaaatgctggcaggatgtggaacagcaagaagtctctcattcattgctggtgggaatgcaaaatggtacagcactttggtagacagtttgagttycttacaaaattaatcatactgttaccatgcaacccatcagtcatgctccttgatatttacctggatgagttcaaaacttaagtccccacaaaaatctgcacacaaatgtttataggagacttttttcatgattgccaagatgtccttcagtagctgaatgaataaacatactgtggtacatccatacaaaagaatattccgttcagtgataaaatgagctatcaagctgcaaaaagacatgaaggaaattgaaaacatattgctaagtgaaagaaaccggtctgagagaggcgaaactatggagataggttaaagatcactggttcccaatggttggggagaggatgggatgaacaggcagaac

SEQ ID NO: 942123 - DNA, 568 bp, Homo sapiens
ctctgctgtggtgggctctgcccagttcaagcttccctggtcgctttgtttacctactcaagactcagcattggtggatgcccctgcccctgccaggctgctgcctcgcaggttggtctcaggctgctgcactagcagtaagcaaggctccttgggtttgggatctgccgagccaggtggagatataatctcctggtgtgccgtttgctaagaccattggaaaagtgcaatatttgggtgggagtgtcccgtttttccaggtactgtctgtcatggcttcccttggctaggaaagggaaataccccgactccttgtgcattctgggtgaggcgatgccccaccctkcttcggctcaccctccatgggctgcacccactgcccaaccagtcccaatgagatgaaccaggtacctcagttggaaatgcaaaaatcacccatcttctgtgtcaatcatgctgagagatgcagtccagagctgttcctattcggccatcttgtaatggaccctaaccagtctatgactgatggacatttaggttgattccatgtatttgctattgtgaatag

SEQ ID NO: 942124 - DNA, 593 bp, Homo sapiens
aagatcacttgaggccaggagtttgagactagcctgggcaacatagcaagaccccatctctaccaaaaatacaaaaattagctgggtgtggtggtacacgcctgtagtcccacctacttgggaggctgaggcagatgatctcttgagctcaggagtttgaggctgcagtcaaactataattgtgctgctgcactccagcctgggcaactgaggaggaccctgtctctaggaaaaaaaaaaattgcttatggaacagatctacatatataactacttgagttttgatttcttgtttgacctcgcgagtccattatgctggacttttctcagggttagggccatgtgaactataaacctaacacggatgtgaatgtggtcaagacagtaagaactgtgagtatttgtagaattctccaagcrtccagccattgtcgcagaatcagggcccagcacagagagagtggtcttctttggtcccagcctacaaagtgccagctatctactgagagggcctcccaggttccacagtggaaggccagggatgaggacgatggagacaagctctggccagtgaagtggcttagctagggcaa

SEQ ID NO: 942125 - DNA, 715 bp, Homo sapiens
ttatattttagtagagatggggcttcgccatgttgcccaggctggtctcaaactcctgacctcaggtgatccacccatcttggcctcccaaagtgctgggattacaggtatgagtcactgtgcccggtctgaaactttttttttttgagacrgagtttgcactgtcacccaggctggagtgcagtggtgctatctcggttctctgcaagctcggtctcccgggttcacgccattctcctgcctcagtctcctgagtagctgggactacaggcgcccaccaccaagcccggctgttttttgtatttttagtagaggtggggtttcaccgtgttagccaggatggtctccatctcctgacctcgtgatccgcccaccttggcctcccaaagtgctgggattacaggcgtgagccactgtgcacggctgaaacttttttttttaaaccaagctttgaacttggactaaggtggttccagaatggtgatgccccaaggcttggcagatacagctaaaaaaaaaaaaaaccccaaaaacaaaaaacaaaacaaaaaaatcccaacatgtatttaaagataaaaccatatcagaaaactgcactcttggggatcaagatcaaatcttcatatcagcatctactgtgcagaagatcctgtttccctttgttagtttctaaacctggttgttagattaatacaatcattcttacttcatttta

SEQ ID NO: 942126 - DNA, 715 bp, Homo sapiens
ttatattttagtagagatggggcttcgccatgttgcccaggctggtctcaaactcctgacctcaggtgatccacccatcttggcctcccaaagtgctgggattacaggtatgagtcactgtgcccggtctgaaactttttttttttgagacagagtttgcactgtcacccaggctggagtgcagtggtgctatctcggttctctgcaagctcsgtctcccgggttcacgccattctcctgcctcagtctcctgagtagctgggactacaggcgcccaccaccaagcccggctgttttttgtatttttagtagaggtggggtttcaccgtgttagccaggatggtctccatctcctgacctcgtgatccgcccaccttggcctcccaaagtgctgggattacaggcgtgagccactgtgcacggctgaaacttttttttttaaaccaagctttgaacttggactaaggtggttccagaatggtgatgccccaaggcttggcagatacagctaaaaaaaaaaaaaaccccaaaaacaaaaaacaaaacaaaaaaatcccaacatgtatttaaagataaaaccatatcagaaaactgcactcttggggatcaagatcaaatcttcatatcagcatctactgtgcagaagatcctgtttccctttgttagtttctaaacctggttgttagattaatacaatcattcttacttcatttta

SEQ ID NO: 942127 - DNA, 715 bp, Homo sapiens
ttatattttagtagagatggggcttcgccatgttgcccaggctggtctcaaactcctgacctcaggtgatccacccatcttggcctcccaaagtgctgggattacaggtatgagtcactgtgcccggtctgaaactttttttttttgagacagagtttgcactgtcacccaggctggagtgcagtggtgctatctcggttctctgcaagctcggyctcccgggttcacgccattctcctgcctcagtctcctgagtagctgggactacaggcgcccaccaccaagcccggctgttttttgtatttttagtagaggtggggtttcaccgtgttagccaggatggtctccatctcctgacctcgtgatccgcccaccttggcctcccaaagtgctgggattacaggcgtgagccactgtgcacggctgaaacttttttttttaaaccaagctttgaacttggactaaggtggttccagaatggtgatgccccaaggcttggcagatacagctaaaaaaaaaaaaaaccccaaaaacaaaaaacaaaacaaaaaaatcccaacatgtatttaaagataaaaccatatcagaaaactgcactcttggggatcaagatcaaatcttcatatcagcatctactgtgcagaagatcctgtttccctttgttagtttctaaacctggttgttagattaatacaatcattcttacttcatttta

SEQ ID NO: 942128 - DNA, 583 bp, Homo sapiens
caactgtatatggagtgtggtgtaggaggaagggaatgaggagttaggtctggaatctataaagtctcaggtgattattaaagttactacattgttagttgtacatggaattttggagttcagaggaaggtggatgaagtttaggctgagcataaaastttatcagtatatagatggtatttttaaaaaaggctccgtgaacagctcttctcaaagggtggtcccaggaatagcagcattgatttgttagacaaattcttgggcctaacctccgacctactgaattagaagcttcagggatggggtcctacaatccgtgtttaacaagccatctatgtgatgtgaaacatgctggaatctgtgaaccttgctctggtgattatgcatagagagagaagattgttgttccaactaaggagccctgggacctgctgaggcactgagggcaagacatggagataagaaggaaaccagccaaagagactgaaaagaagagcaagcaaagtaataccaggaaggtgggaaatctccccagataaagcacagatttaatgcaatcctaaacaaaatctcagaagttaac

SEQ ID NO: 942129 - DNA, 484 bp, Homo sapiens
gaaccaaaaatcaggttagcaatcatagtacctggttttgacatcaaattaaggaaagaggcactgaagaggagcataaaggtagtcttgaattgcctataccacccctccctgattcccctacagtggctgcatggcacagagccaagttcaatctgcgaacttggggaagggagagtatatgattgtaggactttgcattggagcccagtgtggacctgtcacagcggraagcaataccaggcagaacttagccagcatatacagaggaagaatttagaccagccctagccagaggcaaatcatccatcccagctattggaacctgagttctgtcaagccctgctactgtgagctaaaattccccggggtcataataaacttaaagaccagcctagtccacaaggactgcaattcctgggcaagttctggtgttgtgctggctcagagacagaggacttttggaacacacgacctagtgaga

SEQ ID NO: 942130 - DNA, 565 bp, Homo sapiens
ccttgtccaaatcacttcacttccttgagcactgggtttctcatctataagacctacaatacccacctttccaggtcgtttggattagagataaagaatggacagtacctggtgcatgggaggtgtttgctagtggcgtgccccctggtgatgtatgaagtacaagggtcaggggtggtgcgcaggcaaacagtccagcacagcagcacaggtaggacaacatcaaagggtgctgtgtactagrcaaaggcaggttaggttttcatcatgtaggcaatggagagccagcaaagaattgtaagccgaggggaatttataaagagatttgcactgagaaagtataatagcgtggaagacaaattaggggaaactaagtctagaaatgggaagacctgtagggagacgatcataattgtccaagctggtcaggcatggtggctcacgcctgtaatcctaagcactttgggaggctgaggtggacttgaggtcaggagttcgagaccagcctggccaatgtggcgaaaccctgactctaccaaaaaaccccactaaaattagctgggtg

SEQ ID NO: 942131 - DNA, 575 bp, Homo sapiens
ttttgggccccctctcacaaagggggctactcacttcaagtccccttttgtcaagagcttttctgtctctcaataaaattcttctttgcctagctcaatctccagtgtctgtgtacctcattcctcttggtcacaggacaagaacctggaaccagccaaagagtcagtgcaaaaagagctgtaacatgttccttgttaccaagctatgagagtgaaaaaaactgctggatgccacacaccyccatttgccaagctgtgtgtggtgggaacaaacaaaagctgtaacacctactgggggttcagacttcgggactccctgagctaaagctgtaacaccctcagggctctacggttgctggcatctttgagtttttgggccctgccatgtacccttcatccagatgccagggcccaaggtggaagccagttacagtgtgcctggatcaaccacaggctgagcctagagccacagcaggcacaggatctgggctggtagcataagctgatcaaagcctgccaggccaagtgggtggaattagcccagccagccccagtgaagcctgagcagaggtgcc

SEQ ID NO: 942132 - DNA, 565 bp, Homo sapiens
tgacatacaaatgaccaacatatatgtgaaaaaatgctcaacattattaatccttatggaagtgcatattaaaaccacaataagatatcatcttacacctgtcagaattattgttatccaaaagacaaaatataaaaattgttagctagaatgtggataaaaggaaaccctgaacactattgttgggaatgtaaactaatacagtcgttatagaaaaatgtacagagatttctgaaacactaaaaatagaattatcataygatccagcaatcctacttgtaaatatttacctaaaacaattaaagtcaatttgtgaaagagatgtgtgcacttccatgttcattgcaccactattcacaagtcacgttatggagtcaacttatgtatccatcaattgatgaacacttaaagaaaaggtggtaaaggtacataatggaatactaggcagccttaaaaaagaagaaattctgtcatttgcaaccccgtatatgaaattttagagtattatgctaagtgaaacaagccaggcaaagaaagacaaatacctcatgttttcattataggt

SEQ ID NO: 942133 - DNA, 554 bp, Homo sapiens
actgctacatcagtgatcgtaactaatccgataagcagaggtccatgggtggttatgcaccctggaaaagaataagcattaggcccttagaggacgctctaggactactgctcatcagaaaatgactaggggtgctggcatacctatgttctttcttcagatgggaaatgttcccccaaccccaaggcaaaaacacccctaagatgtattctggagaattaggaccaatttgaccctcagatgcttggaaataaatgacttatatttttctacattaccacctggccacgatatcctcttcaagggggagaaacctggcttccwgagggaagtataaattataacaccatcttacagctagacctcttccgtagaaaggagggcaaatggagtgaagtgccatatgtgcaaactttcttttcattaaaagataactcgcaattatgtaaaaagtgtgatttatgtcctacaggaagccctcagactacctccctaccccagcgtcccccagactcttccccaactaataaggaccccccttcaacccaaacgat

SEQ ID NO: 942134 - DNA, 554 bp, Homo sapiens
actgctacatcagtgatcgtaactaatccgataagcagaggtccatgggtggttatgcaccctggaaaagaataagcattaggcccttagaggacgctctaggactactgctcatcagaaaatgactaggggtgctggcatacctatgttctttcttcagatgggaaatgttcccccaaccccaaggcaaaaacacccctaagatgtattctggagaattaggaccaatttgaccctcagatgcttggaaataaatgacttatatttttctacattaccacctggccacgatatcctcttcaagggggagaaacctggcttcctragggaagtataaattataacaccatcttacagctagacctcttccgtagaaaggagggcaaatggagtgaagtgccatatgtgcaaactttcttttcattaaaagataactcgcaattatgtaaaaagtgtgatttatgtcctacaggaagccctcagactacctccctaccccagcgtcccccagactcttccccaactaataaggaccccccttcaacccaaacgat

SEQ ID NO: 942135 - DNA, 599 bp, Homo sapiens
gggccgggcagaggcacttctcacttcgtagacatggctgcggctgggcagaggcactcctcacttcgcagacaggacggcggcaaggcagagacgctccttacttcccagatggggcagcggctgggcagaggtgctcttcacttcccataccatgaggtggccaggcagaggtgttcgtcacttcccagatkgggtggaggccgggcagaggcagtgctcctcctcaattcccagatggttggcggctgggcagaggtgctcctcacttcccagacagggcagtggccaggcagaagtgctcctcacttcccacggtgtaagggggccaggcagaggcactcctcgcttcgcagacaggacggcagccgggcagaggcactcctcacttcccagacagggcggcagcctggcagaggcactcctcactgcccagacggggcagggcccaggcagaggcgcccctcacttcccagactgtgaggcggctgggcagaggtgctcgtcacttcccagatagggtgggggcccggcagaggcactcctcactgcccagacggtgtggtggccaggcagaggcgctcctcacttcccagacg

SEQ ID NO: 942136 - DNA, 827 bp, Homo sapiens
attgttctttggagaaattctcaggggatggggagggcatcacctgggactgtgagatcacagcaagcccagtagtctgtttttatgttacaatcccttgacctcaaagcaagcttggtcttgggcattctgttcttcctgtaacctttttcctatagagcagcggtccccaacgtttttggtaccattttggtaccagtttcatgcaagacaatttttccatggaggggagggggatggtttcaggatgaaactgttctatctcagaacatcaggctttagttcgatcctttttccttttgtttgtttttgagatggagtcttgctctgtcacccagactggagtgcagtggcacaatcttggctcactgcaacctctgcctcccaggttcaagtgattctcctgcctcagcctccggagtagctgggattacaggcacatgtcaccacacatggctaattttgtatttttagtagaaacagggtttcaccatgtccgccaggctggtctcaaactcctgacctcaggtgatccacccrcctcagcctcccaaagtgctgggattacaggcatgagctaccacacccggccatcaggcattagatttgcataaggagcatgcaacctaggtcccttgcatgtgcaattcacaatagggttcacgctcctatgagaatctgatgctgctgctgatctgactggaggtggagctgaggcagtaatgttcgtttgcctgtcgctcacctcctgctgtgcgtcccagttcctaactggctacagactggtaccggtcggcagccggggggttggagacccctagtataga

SEQ ID NO: 942137 - DNA, 572 bp, Homo sapiens
tcatttttggacgtctagctcccagaactgtgagacaataaatttctgttgattaagccacccagactgtggtattaccaagaagtactaaggtagtgctgtaaaaatactttaaaatgtggaatttggaatttggttggcagagactggaagagatttgaagtgcttggtaggaaaggtctagattgcctccaggagactattgttagacttatgaatgttaaagatgtttctgatgaagtttcagacagaaataaggaacatcttcttggaaactggaggaacggtgatccttattataaaatagaaaagaacgtggcctacttgtgttctagtttctttgtgaaaaatagaacttataggtgatgaacttggatatttagctgaggagctttctaagcaaagggtcgyaaacacatcctggtttctccttactgtttatagtaaactgtgaagggacagactacattgaagaaggagttgttaagcaaaacgtaaccagagtgtgaagactggaaaaattctcagcctatctacattgcaagaaatgagaaaacgtgttctggagagag

SEQ ID NO: 942138 - DNA, 766 bp, Homo sapiens
gcaaaagcagactttctctgatgttctcaaaagatccagtcttcaggttctagatgtgaaggggatgattatcctcagtaaaccatgaaaagctttctttgcctggtgaaaatacactgtggcataagaagctgctgtaaaaaaaaaaaatcaacccctttgcatgggaaaccttttctacaacagaaaacatgcatttgagacagcaaggtggatgagggtccttgggaaaactccaagtagcccatacactggggtaggaccttgggaaatttgcaccatttgcaatggggaggagcctggcccctcctcttcctgtgtgaaacctgggattcaagctgccagcgggaaggactaagcagggactgtggcctaaaggagtccctgtttcccctttttcttccttttcacccagtaaatccctgtcttactcaccattcaaattgtctgcragcctcaattttcatggctgtgggacaaagaaccccatttttaagtgaactaagggaaagtcctgcagtatttttggcacacaatgtgggaactcaagaagtggtgagtgaaatggggactcaaaacctctcactgttgcttctaagccttttcatcctcagatttctgagggtggggaaaaccatgcccccaccttcccatcgctcctgtgccttgtcatggctttttcttttctttttcgggagggaccagcgagcagcagctaccctccaccccccactccctgctgggcctgggacacatggtccaaggg

SEQ ID NO: 942139 - DNA, 844 bp, Homo sapiens
agatatggagacagtttggcttttagagttgccattattcttgtgctggttctttctcatttgtgtgggctgatcctttaactgtgatgtaatttgagtacagtcagttgacttcatttctggatgttttcagagggccaaagtggtgtgcaaggtctttatttgtggctaagtttccatccatggttttacgggggagtatactaacaaagtatttttgattttaaagtttgggctgcaaactcacagatggctcttaaatggcctgtgagtgggctcttgctcagccacatggctcctctgtatttcctcgcatttggagccatgctccctctcagtaccctgagaatgccagctcctctcccacttgagtgctggctgcagatctcagcttagcactcttgggctgtgcaccgcagccctggggcaagctcaggctttgtgttcgctccacagcttgggggcggcaggggcaggaactttgtcagtggcaatgggagtgggagtggacattttgcctgtcccttggggctccactccagagaaacttagagctactgccaattggaagaatcagcccagggtgtggtggctgtgttgtgagcccaagccagcgggccctgcctggtgaggagtggggcatcaggggcatgyggggaagatacactggcctgttttccatagggtggctggggcatgctggcgtgtgaataaagcactcacgatctttattccttccccagtccacagacagcaagggcagtatcactgcagtggcagtcgcagatggactttcagtcgcctctaggagctccaccccacagaaacacagacagcagccagt

SEQ ID NO: 942140 - DNA, 605 bp, Homo sapiens
atcacaaaacaccacacacggcagttgaggtggtagggttggggtttagacacagacatttatttctcgcggttttggaagctggaagtccaagaacaaggtgtcagcagatgcggtgtctgatgcaatctctttctttgcttttagacagcccaactcctcgctgcaccctcacatggcatctcctcggcttctgcgaggagggaaagggacggggtgtgtgagtgtatgtgtgtagattgctgtcttcctcttccgttacgggcactaatcccatcatrggaaccacaccctcatgagctgatctaaccctcatcacctccaaaggccctgcctccaaatactagcacatcgtgagtcagggcttcagcgtatgaattttggggggacaaaaacgttcagcccataacatcagggactgcaaactcagtcaccttcaggggccaggcaggtacaatgaattcttgatgagagaaggaaagttaatatttcaaacacagtcgtttgtcattgtcactccagccagtcacacaaaaccaagttcactgtccctctctcctctaagtcccctctcctcccgcacccagattcagcccagggcagct

SEQ ID NO: 942141 - DNA, 601 bp, Homo sapiens
gctgacactctgcttcatataaagctagcagaaccctgagccagttaaaaaactcttttatgtataagttatgcagccccagatatttctttatagcaatgcgaaaatggcctaacatggaaaattggttccaaggagcggagcatgcatggctataaagattcctgaagatgtggacgtggctttggagcttggtaatgggcagaggtcggaagagtttagagggctcaggagaatacaggaaaacaaggaaaagtggaatatcttagagacttgttaagtggttgtgaccaaaatccttgcagaaatatacacaatgaagttstggctgatgagatctcatatggaaatgaggaagagattgaaaactggatcaaaggtcacctgtgttacaccttagtaaagagcttggctgcaaaatgcccaagtcctagggatctgtgaaagtttaaacttaagagtgattacctagggtatctgggagaagaaatttctaagcagaaatttgtttaaaaatctgtgtggttgcttctaacagcctacaataagacataggagcaataagatataggagcaaaagaatgatgtaaatttggaactt

SEQ ID NO: 942142 - DNA, 620 bp, Homo sapiens
agggagttgcgtccagaggtgagtgctctgtggagctggtgggagccgggaacagggatctcagtgggagctctgtgccctactcagttgccagggcaggagcccatgttccagggtgcaggtgcaacccacccagccacagctccagtcccaggaatccctgtgctctcaggggctyagcaagcccctgcccttgcagactcagaagtacctgctcaaactccctggccttttcctgcttctggaagctggggagttgtagctaagcccacgtgctgtcgcaacctggccaggtgtgtgtgcactcggggtggcacttacacatcagcccccactgctgcctcggtcctttccagactttgggtgccaaaaagtgcaggagggaggtggtggggcacaggctgagggtggctcagcacgggcctgcagagtttccttggtgcagacagcctgggtactgtgaatggcatgttgatggtggctggaggcagacaggttcctaggtgggaaggggcatatccccagttaaaacccaccttcaagccagagacaacctgaagcctgggggttgggctgccagttccacatggagtcgacaaccaggaatgagaactttatta

SEQ ID NO: 942143 - DNA, 620 bp, Homo sapiens
agggagttgcgtccagaggtgagtgctctgtggagctggtgggagccgggaacagggatctcagtgggagctctgtgccctactcagttgccagggcaggagcccatgttccagggtgcaggtgcaacccacccagccacagctccagtcccaggaatccctgtgctctcaggggctcagcaagcccctgcccttgcagactcagaagtacctgctcaaactccctggccttttcctgcttctggaagctggggagttgtagctaagcccacgtgctgtygcaacctggccaggtgtgtgtgcactcggggtggcacttacacatcagcccccactgctgcctcggtcctttccagactttgggtgccaaaaagtgcaggagggaggtggtggggcacaggctgagggtggctcagcacgggcctgcagagtttccttggtgcagacagcctgggtactgtgaatggcatgttgatggtggctggaggcagacaggttcctaggtgggaaggggcatatccccagttaaaacccaccttcaagccagagacaacctgaagcctgggggttgggctgccagttccacatggagtcgacaaccaggaatgagaactttatta

SEQ ID NO: 942144 - DNA, 644 bp, Homo sapiens
ttggtgcagacagcctgggtactgtgaatggcatgttgatggtggctggaggcagacaggttcctaggtgggaaggggcatatccccagttaaaacccaccttcaagccagagacaacctgaagcctgggggttgggctgccagttccacatggagtcgacaaccaggaatgagaactttattaatgccttctggacaactggatggtgctctttccaggcctgcccatggttgcccrtggagcaatcagcatgcatttcctccattgtgagcacttaaaaccccagaatcagccagaatcacacacttgctgggacaacctgcctgcagaaagaagccactgacttcaggtctcctgagagctgttctgtctctcactaaagctcatcactgccttgattaccctctggttgtctgtgtaacctcattcttcctggatgtgggacaagaactcaggacccactgaacagccggagtgaaaggagatgtaacaggaaacggttcctggctcacttgcttagctgcgggcagtgacgtgctccaagactgtgggagtgaagagcggtgacccttctgggggctcagatctcggggttccttaagccagagatgttggaacactatagccctcccaccctttgctg

SEQ ID NO: 942145 - DNA, 597 bp, Homo sapiens
gtagagacaaggtttcaccatcttggccaggctggccttgaaatcctgaacttgtgatccacctgccttggcctccgaaagtgctgggattaaaggcgtgagccactgcacccaaccgatttttaaattcttatgtgtaatagagagcatttgcctgatttattaaaaaagttgtacctatgtggaattggctttcaacaagttttacaaatacactctcccaatacacctggctttaacttttaggatttatttttaatrtatgatttttttttaaataaagctctgtgtaaccctgtggaatgtaaacttttattgcaatactttataattcaatctaaaacttatgaaaaagcttcaagaaaagaacaaggtttgtttcctcaaccattagaaaggagcctgccaatctgatattataatagatttaaaaactttgaatgtatttcctaaaaacaggaacattccctgcataaccacaatactgtgacaggtaaaataacactgatacgtttctaccacctattatgccccattcaagtttcagcattttcccaataaagttctttttagcagaaagatctaattcagattcaa

SEQ ID NO: 942146 - DNA, 597 bp, Homo sapiens
gtagagacaaggtttcaccatcttggccaggctggccttgaaatcctgaacttgtgatccacctgccttggcctccgaaagtgctgggattaaaggcgtgagccactgcacccaaccgatttttaaattcttatgtgtaatagagagcatttgcctgatttattaaaaaagttgtacctatgtggaattggctttcaacaagttttacaaatacactctcccaatacacctggctttaacttttaggatttatttttaatgtatgattttttttwaaataaagctctgtgtaaccctgtggaatgtaaacttttattgcaatactttataattcaatctaaaacttatgaaaaagcttcaagaaaagaacaaggtttgtttcctcaaccattagaaaggagcctgccaatctgatattataatagatttaaaaactttgaatgtatttcctaaaaacaggaacattccctgcataaccacaatactgtgacaggtaaaataacactgatacgtttctaccacctattatgccccattcaagtttcagcattttcccaataaagttctttttagcagaaagatctaattcagattcaa

SEQ ID NO: 942147 - DNA, 588 bp, Homo sapiens
gatggaacatttgtacaattaagttaggtccatttgatctaggttttactttatatctgggtttctttattgattttctgtctgtatgatctgtccattactacatgtagggtgttgaagtcttctgtcttctactattatcctattgcagtttatctctctcttcagagctattaacatttgtttatatatttaagtgttctgatgttgggtgcatatatatttacaattgttatatcctcttgctgggttgatcccattatcattatacaatgatcttctttgtttctttgtaaagtttttgacttaaaatgtattttattggccaggcacggtggctcatgcctgtaatcctagcactttgagagactgagctgggcrgatcaactgaggtcaggggtttgagaccagcctggccaatatggtgaaatcctgtctctactaaaaatacaaaaaaactagctggatgtgttggcttatgcctgtaatcccacctgcttgggaggctgaggcaggagaattgcttgaacccaggaggcagaggttgcagtgagctgagatcatgccactgcactccagcctgggcaa

SEQ ID NO: 942148 - DNA, 557 bp, Homo sapiens
tagtggcttgtgctgtggtcccagctacttgggaggctgaagggggaggattgcttgaacccaggaggtggaggtgacagtgagctgagatcactgtactccagcctgggccacagagaaaaaaaaattaccacaatgctaaatagcttaaaatarcatatattatctcatctctcagtttctgtgagtcaggaatttaaaggaacttagttgggtggttctgcctcgctgactcttatgaggttggacaatgctgcagtcatccagggtgggaggatccacttccaaaacgtctcactcacatgactattggcagaaagcctcagttccttgaaaatgtggacttctctgcaggccttctggagtgtcctcctgacagcaactggcctttcccagagagagtgatccaacagagagagcaagtaggatatagctgcacctttcatgacagcctcagaaaaaaaaaatcaccgtgtctgctatgttttattcatcagaagtgagtcgctgagtccaaccatattcacagggaggcaaagtaagctctacctcttaaa

SEQ ID NO: 942149 - DNA, 615 bp, Homo sapiens
tggcagacctacaactttacaaattacctgtgttccacctagagagggtgccagccctctcagcattatgcagtgcccctcctctgtctgcatccccaggaccaccatgggtggggaggacagagattggggagcacctatagaggctctaatgctctaaggtgacagtgatgaggacctgggtgcacccatgagtggagaagctaggcctgtccagagaagtaagacaaacacacacatatgtgcgcacacacaggcacayatgcatacacaaacacattgcatgcacacatgtcagttcaggggatagaggacactgactctgggccctgttgacccaagcaggcttccattgtggtgggttgtgtcacccaacaatgtcactgttgctgagttcccatcgcctctgtgttgtggagcagttagagacacacagcagtgtctgtgagtggctctgtgtgaaggaccgttttctagatgagaggcacatctcaacacagctcactgactcaggtgagtgggacctgctctcttctcttcctcctggcttggggacagtcactatgaggtgggtggttttggcctctgggcagctactgaggggaatccctgaac

SEQ ID NO: 942150 - DNA, 615 bp, Homo sapiens
tggcagacctacaactttacaaattacctgtgttccacctagagagggtgccagccctctcagcattatgcagtgcccctcctctgtctgcatccccaggaccaccatgggtggggaggacagagattggggagcacctatagaggctctaatgctctaaggtgacagtgatgaggacctgggtgcacccatgagtggagaagctaggcctgtccagagaagtaagacaaacacacacatatgtgcgcacacacaggcacacatgcatacacaaacacattgcatgcacacatgtcagttcaggggatagaggacactgactctgggccctgttgacccaagcaggcttccatkgtggtgggttgtgtcacccaacaatgtcactgttgctgagttcccatcgcctctgtgttgtggagcagttagagacacacagcagtgtctgtgagtggctctgtgtgaaggaccgttttctagatgagaggcacatctcaacacagctcactgactcaggtgagtgggacctgctctcttctcttcctcctggcttggggacagtcactatgaggtgggtggttttggcctctgggcagctactgaggggaatccctgaac

SEQ ID NO: 942151 - DNA, 737 bp, Homo sapiens
cccccaacaagagagtcatcctgttctttgaagctttgaagccagacattgacttctctctagctatgaaagttctggatggcatattcttctaatataaggctgtcttgtttaatttgaaaatctgttgtttaaggtaaccaccttcatcagttatcttagatcttctgcataacttgttgcagtttgtatatcagtacttggcttcctcaccttgcacttttgtgttatggagacagcttctactcttaaccctcatgaaccagttttctgcttyaaacttttcttctgcagcttcctcacgtctctcacatcatagaattgaaaagagttggaatttgctctggattaggctttggcttaaggaaatgttgcaactagtttgatcttctatccagaccattaaaacttcctctgtatcagcaataaggctgttttgcatttttatctgttatggatattcactggagtagcacttttaatttcctttatgaacttttcctttacattcaccacttagctaactgtctggtaccataggcctagcttttggcctgttgtagctgtttataggcctttctcactaagcttaatcatttctagctttggatttaaaatgagagatgtgtgactcttcctttcagttgaacactaagaggccattttttgcctaatttaaatattataatgtttctagaagtaagaagtcctgagaagaaggagaaagataggggaga

SEQ ID NO: 942152 - DNA, 633 bp, Homo sapiens
tatgttacccagggcaggcactctggggtctcaggcaatgggcggggctatggagcctccaaatatccctgtccattgtgttatgctaccagggctcataaagtggcaaagcctggtgaggactggaccaggcaagtcctcactcaggctctccaggtacaagcacaagcagtgtccccagtggggatcagagaacagctttctggccactggggtaatgttccaraggggagcagagctgcctctggtgcacagaagaatccacacagggagtgggagcaggagggagtagtagaaggcagtaaggcccactcagctcccatgcacttggcacagcaagtcccataccctcagtattctgctaacagcaactagctgtgttccaggcagtctacacttagaacacaaaactgccccaagcagtaagccttcctgccagcgatagaaaccaggctttcaggccatgcccctccctatccacctgcgaagcaggggcgcccaacttctgcactatagcacacttcatgccagccccctggttctggccgacagggttagtctccacttaaaatcatattgcgaatctcaggagctcttttcaacctgttactacagcctgagttactgagcaga

SEQ ID NO: 942153 - DNA, 721 bp, Homo sapiens
agattactaaaattgacagaagtgagaacttgatttagaacagttaccatagaggtattacaaaaataagtaaaagtgtacaactgataaaattaccaacaggttcacagatagattactgcaaatgggttcacagttgatttagaaaaagacagctagttccacttacttatactatacccactattgaaaaagaaagttctgagaaagagactacaaaagcaaaataaaacatttaggccaattttgcttattactacagatgtaaaaatttgaaataaaatgttaaatgaattttaccattgtatcaaaagaataatactttatgattaaacagagtatattccagcacagaaagaataatccattgcatcagcaaattcatggagaatagcttcatgaacacattaacgtatcagatgcaacagcaattagtgttgaacacttaagattttatcgctttcttcatatgagtttgttaccttgtgaatgaaatatgttcccccaccgttcatctctagcaagaaaagaaattgattcatttgaagaaaactataaaatcttggaacatggaagcatcrtaccttaagtaagacaagctcattaaaatagcaatttttatgattaacatattaatcaaatgtagttcagttatagtctcctttttttcctgataatttgcaggggttgttggagggaggaagtgtggtacaggacttta

SEQ ID NO: 942154 - DNA, 705 bp, Homo sapiens
ttgggtataaaaattgcctcctaatacatcagtgtagcattttgcaatggtggggtctgctagacccattagctagtgggtgatgtcttaatactagtaatagagtgttatactacaataataaccacataaaaataaatgagccaatgaatcagttagtatacacactctgcagaagcatcaggtaagtccagaaaagttgacttgctagagcaaaaagtaggagagacagaatctgaacccatgtttgttattccaatctagggtccaccacatgtgatgaaagttacctttcctcattcttgagttttgctgggcatagtggctcacgcctgtaatcccactttgggaggctataatcgcagcacttttggggctgaggcgggtggattscttgagtccaggagttcaagactgctctggacaccatggcaaaaccctttctctactaaaatacaaaaaactaactgagcatggtggcatgcctgtagacccagctacttgggaggctgaggtgggaggatcatctgaggtcgggaggttgaggctgcagtgagccaagattgcaccactgcactccagcctgggcaacagagtgagaccctgtctcaaaaaaaaaaaaaattactgagttatttttttctttaaaaaaaaaaaagccttaagtttttatttgaattcacatgtattcaaatagatataatt

SEQ ID NO: 942155 - DNA, 666 bp, Homo sapiens
gactgatgttgagtgcctgtggcttttctcggtacagggtgcaagctgccagtggatcttctggggcctagaggacagtggccctcttcttacagctccactaggcagtgccccagtggggactctgtggggggggctccaacyccacattttccctctgcgctgccttagcagaggttctccatgagggctctgcccctgcagcaggcttctgcctggacacccaggcttttccatacatactctaaagtctaggcctcaactcttgtactctgaacacccacagccttactacaatatggaagccaccaaggcgtacagtttgcaccctctgaagcagcagcctgagctgcacctgggcccctttgagccatggctagagctagagtgactgagatgcggggagcagtgtcccaaggctgcacagggcagcggggccctaggcctggcccatgaaaccattcttccttcctaggcctctgggcctgtgatgggaggagctgctgtgaaggtctctgaagtggcttccaggtcttttccccattgtcttggctattagcacttagctcctttttacttatgcaaatttctgcagcctacttgaattcctcccctgaaaatgggcttttcttttctaccaaatggccaggctgcaaagtttccact

SEQ ID NO: 942156 - DNA, 666 bp, Homo sapiens
gactgatgttgagtgcctgtggcttttctcggtacagggtgcaagctgccagtggatcttctggggcctagaggacagtggccctcttcttacagctccactaggcagtgccccagtggggactctgtggggggggctccaaccccacattttccctctgcgctgccttagcagaggttctccatgagggctctgcccctgcagcaggcttctgcctggacacccaggcttttccatacatactctaaagtctaggcctcaactcttgtactctgaacacccacagccttactacaatatggaagccaccaaggcrtacagtttgcaccctctgaagcagcagcctgagctgcacctgggcccctttgagccatggctagagctagagtgactgagatgcggggagcagtgtcccaaggctgcacagggcagcggggccctaggcctggcccatgaaaccattcttccttcctaggcctctgggcctgtgatgggaggagctgctgtgaaggtctctgaagtggcttccaggtcttttccccattgtcttggctattagcacttagctcctttttacttatgcaaatttctgcagcctacttgaattcctcccctgaaaatgggcttttcttttctaccaaatggccaggctgcaaagtttccact

SEQ ID NO: 942157 - DNA, 666 bp, Homo sapiens
gactgatgttgagtgcctgtggcttttctcggtacagggtgcaagctgccagtggatcttctggggcctagaggacagtggccctcttcttacagctccactaggcagtgccccagtggggactctgtggggggggctccaaccccacattttccctctgcgctgccttagcagaggttctccatgagggctctgcccctgcagcaggcttctgcctggacacccaggcttttccatacatactctaaagtctaggcctcaactcttgtactctgaacacccacagccttactacaatatggaagccaccaaggcgtacagtttgcaccctctgaagcagcagcctgagctgcacctgggcccctttgagccatggctagagctagagtgactgagatgcggggagcagtgtcccaaggctgcacagggcagcrgggccctaggcctggcccatgaaaccattcttccttcctaggcctctgggcctgtgatgggaggagctgctgtgaaggtctctgaagtggcttccaggtcttttccccattgtcttggctattagcacttagctcctttttacttatgcaaatttctgcagcctacttgaattcctcccctgaaaatgggcttttcttttctaccaaatggccaggctgcaaagtttccact

SEQ ID NO: 942158 - DNA, 567 bp, Homo sapiens
aacaaaagaatcagtctgtcctttggagctatgaagccaggcattgaattctcctctctagctatgaaagtcctatggcatcttcttccaatagaaggctgcggtgtctccattgaaaatctgttgtttagtgtggccaccttcatcaatgatcttagctagatctggataacttgctgtagcttctcccttagcacttgcttcttcatcttgtacttttatgttataaagatggcttctttccttaaacctcatgaaccaacctctactagcttcaccattttcttctgcagcttcctgacttctctcagccttcccagaaatgaagagagttagggcttgctctggattaggctttggcktaaagggaatgttgtggctggtttgatcttctatccagaccattcaaactttctccatatcagcaatatggccgctttactttcttatcgttggtatgttcattggaatagcacttttaatttcattcaagaagttttcctttgcattcacaacttggataacagtttggcacaagaggcctagcttgcagcttgccttcctcac

SEQ ID NO: 942159 - DNA, 589 bp, Homo sapiens
tgctgagggcaaaggggatatggattgggtcatggaaaaaggtagttataaacaccagctatgaccatgtgatcaattaaagaaaaagaagactgtaattgccataagtatttcttccttgttttgctattaatatgtgtgtatacatataaaagcaacaatccatatgcaaatttcagaaaatatcattttcttccttctcttatcaccttatctgataacataagatatactsactctgcatcatagtatttaagtactgctaacattacatcatagtgtttaagttaaggaatatcgacgagagtaaacatcacccaaggatttggcatcttcttttgaggatagggttggtgcatttttggttgtatgcaagatagtttattgtgttaggtggaagtatggatcttgttattgcctttattcaaagattaagtatgatttgaggagattcatatgggtggtgtcatagtccattcagtttgctatgacaaaaataccatagactaggtagcttatgaacaacagaaattgatttctcatagttttgtaggccaggaagttcaaggtcaagctgccagcagattct

SEQ ID NO: 942160 - DNA, 786 bp, Homo sapiens
tagtccttggtggttcaggcctccttgggagttgccttagcagaagaaaactgcctcatccagggtcacacctcattccaggggtggctcacatccagtgactgatcactatggaggaacaaagccccatccctttgtcctcatctcaggagcactatgaagagctatctcagctccagagtttcacagagggtcatctgaggcctttggtgtgagtgcattgcagcctgactcccccactacctaatactgcttccttccacaggagttgatcccaacagcactccctaatcaacagcttgcatgctaatttcacagtctacttcctgggcactcaacctgtgccaccaccttaatcgagtggttaagttaacatcatcagtaatgggatctgtaaaagttatgtgcaaccaggtaggaggcaccaagaagaacacagcatcatttctgcaatcttcctgtgaaagataygtgacttgattttaacatcaagtgaggaaacatcagtcaaacccaaatggaggggcattctaaaaattactgccttgtaatgttcaaaagtgtcaaatcatgaaagtcaaagcaagattatgaatctgttccaaattaaagaaaactaaagacatgagacatgacatctaaatataacatgtgatcctggactagcttctgttgctataaggtacattactgaacaagtagaaaaactcaaatgtgttctaaagattagactaccatcaaatatcagtgttaatttccttattttgatggttgcacagaagaatg

SEQ ID NO: 942161 - DNA, 601 bp, Homo sapiens
tccgcagtgtttgtgtccctgggtacttgagattagggagtggtgatgactcttaacgagcatgctgccttcaagcatctgtttaacaaagtacatcttgcaccacccttaatccatttaaccctgagttgacacaacacatgtttcagaaagcacagggttgggggtaaggtcatagattaacagcatcccaaggcagaagaatttttcttagtacagaacaaaatggagtctcctatgtctacttctttctacacagacacagtaataatctgatctctctttcttttccccacacttcccccttttcttttcaacaaaaccgccatygtcatcatggcccattctcgatggttgctgtctcttcggagctgttgggtacacctgcagaaaggctgttgcttcacacttggaagattgcacagcggccaggcagaggtgctcctcacttcccagatggggtggcagccgggcagaggcactcctcacatcccagatgatgggcggctgggcagaggcgctcctcacctcccagacggggtggccgggcagaggcgctcctcacttcccagacggggtggccaggcagaggtgctcctca

SEQ ID NO: 942162 - DNA, 534 bp, Homo sapiens
aaactcaagtcgcaaaacatgtttctccttgaaaagtaagaaatgatgtaatgcatacctcaattgaataactggctttgtttctcacttctgtagtatgcttccctctgcagagatctcccccmaccccactaaatgcttaaaaggtaacttaactctttgttcagggctcagtcctttggatgttaatccgacggctggtgcacctaaataattaatgaatatcctcctgaaccccaatggtctctctgattccttaaaaatcccactacatttcttgggggtggggggcttgcctggggttggagatgacagatttactgtctcctttgcctgtgagactagagctctggggctaggagagacccagcatccaaggcacaccacaggggagcttcaactggatagaaaccagctctccccatattctgacaccctgcctggcagtgcaatggaactgggaatggggctgcaggatgataccagcacttcaggaactgcagtaaagagcaagtgcccaaggcagcaaagccc

SEQ ID NO: 942163 - DNA, 457 bp, Homo sapiens
gcaaggtcactagacagacaaactcaagtcgcaaaacatgtttctccttgaaaagtaagaaatgatgtaatgcatacctcaattgaataactggctttgtttctcacttctgtagtatgcttccctctgcagagatctccccccaccccactaaatgcttaaaaggtaacttaactctttgttcagggctcagtcctttggatgttaatccgacggctggtgcacctaaatamttaatgaatatcctcctgaaccccaatggtctctctgattccttaaaaatcccactacatttcttgggggtggggggcttgcctggggttggagatgacagatttactgtctcctttgcctgtgagactagagctctggggctaggagagacccagcatccaaggcacaccacaggggagcttcaactggatagaaaccagctctccccatattctgacaccct

SEQ ID NO: 942164 - DNA, 457 bp, Homo sapiens
gcaaggtcactagacagacaaactcaagtcgcaaaacatgtttctccttgaaaagtaagaaatgatgtaatgcatacctcaattgaataactggctttgtttctcacttctgtagtatgcttccctctgcagagatctccccccaccccactaaatgcttaaaaggtaacttaactctttgttcagggctcagtcctttggatgttaatccgacggctggtgcacctaaataattaatgaatatcctcctgaaccccaatggtctctctgattccttaaaaatcccactacatttcttgggggtggggggcttgcctgkggttggagatgacagatttactgtctcctttgcctgtgagactagagctctggggctaggagagacccagcatccaaggcacaccacaggggagcttcaactggatagaaaccagctctccccatattctgacaccct

SEQ ID NO: 942165 - DNA, 534 bp, Homo sapiens
aaactcaagtcgcaaaacatgtttctccttgaaaagtaagaaatgatgtaatgcatacctcaattgaataactggctttgtttctcacttctgtagtatgcttccctctgcagagatctccccccaccccactaaatgcttaaaaggtaacttaactctttgttcagggctcagtcctttggatgttaatccgacggctggtgcacctaaataattaatgaatatcctcctgaaccccaatggtctctctgattccttaaaaatcccactacatttcttgggggtggggggcttgcctgggrttggagatgacagatttactgtctcctttgcctgtgagactagagctctggggctaggagagacccagcatccaaggcacaccacaggggagcttcaactggatagaaaccagctctccccatattctgacaccctgcctggcagtgcaatggaactgggaatggggctgcaggatgataccagcacttcaggaactgcagtaaagagcaagtgcccaaggcagcaaagccc

SEQ ID NO: 942166 - DNA, 697 bp, Homo sapiens
gatttactgtctcctttgcctgtgagactagagctctggggctaggagagacccagcatccaaggcacaccacaggggagcttcaactggatagaaaccagctctccccatattctgacaccctgcctggcagtgcaatggaactgggaatggggctgcaggatgataccagcacttcaggaactgcagtaaagagcaagtgcccaaggcagcaaagcccatcccatgaggatgaaggggagcttgatcacctcccggagaatgaacactaatccaacccagagtggctgggggcatcaggagtggcttgccaatttggatgcacctcaagtccmcactaacactggaactggaaaaaaatgaggaaatgggccaatagagcagcaagtgcagcaaggtagagcttgctggcagggtggcaagagtggcttgccaccccaactgggagtgttgagggtgcacgtgaacatacccaggacatgagagaggctcacccaggacatgagacaggctagtttcatccaatgaggaatcttggggcaggggaggtgtgtgaaagtgtgtgaaagagatggtctcaggagaggccagtgcggggagtgacatggggaggcagagatcccttagcatgggctgtgtgctctgacatgagtgcaggggacatcagacctaggatgctgcatacggctgaaaggac

SEQ ID NO: 942167 - DNA, 697 bp, Homo sapiens
gatttactgtctcctttgcctgtgagactagagctctggggctaggagagacccagcatccaaggcacaccacaggggagcttcaactggatagaaaccagctctccccatattctgacaccctgcctggcagtgcaatggaactgggaatggggctgcaggatgataccagcacttcaggaactgcagtaaagagcaagtgcccaaggcagcaaagcccatcccatgaggatgaaggggagcttgatcacctcccggagaatgaacactaatccaacccagagtggctgggggcatcaggagtggcttgccaatttggatgcacctcaagtccccactaacactggaactggaaaaaaatgaggaaatgggccaatagagcagcaagtgcagcaaggtagagcttgctggcagggtggcaagagtggcttgccaccccaactgggagtgktgagggtgcacgtgaacatacccaggacatgagagaggctcacccaggacatgagacaggctagtttcatccaatgaggaatcttggggcaggggaggtgtgtgaaagtgtgtgaaagagatggtctcaggagaggccagtgcggggagtgacatggggaggcagagatcccttagcatgggctgtgtgctctgacatgagtgcaggggacatcagacctaggatgctgcatacggctgaaaggac

SEQ ID NO: 942168 - DNA, 608 bp, Homo sapiens
cagttaggaatagactgcatcctttttacatcactcacattagggctcgctcatacacctcttccaggacctttgactaaagggaatcagatagctgattgcctagttgctaatgcaatatctaatgctagacattttcacaatttaacccatgctaatgcctctggtctcaaacgcagatacagcattacctggaaagaagctaaaactattatccagtgatgcccaacttgccaaatggtacattcctcttcttttacaggaggagttaatccttgaggattggaacctatagctctttggcaartggatgtcacacatgttccctcgtttgggagactagcttatgtacatgtatgtgtggacatcttttctcactttgtctgggctacatgccaaacaggagagtcttctgcctgtgttaaacatcatcttttgcagtgttttgtggtgatgggcattccagcttctattaaaacagataatgccccagactatactagccaagctctacctacatttttctctatgtggaatattaaacacattactggtatctcatacaattctcagggacaagccatagtggaaagaatgaatctctccct

SEQ ID NO: 942169 - DNA, 580 bp, Homo sapiens
agaaccctgttttccacagtcctttatcttaacccaaacactcctttctattgattccaggtcttcagataaccaattgccaatcagaaaatctttgaatccacctatgacccgaaagccctcccactttgagttgcctgcctttccaaactaatgaacaccttatatgtattgattgatgtctgtctgtaacttctgtccctctaaaatgtttaaaatcaaactgtaaaacaaccactttggggacatgttttcagracctcctggggctgtgtcacaagccttggtcactcatatttggctcagaataaacctccttaaatagtttatagcatttgactcctacgttgacaggggtaactggttaaacagtctatgtgaaacaagtgctttggtgtccaaagcctatagagccaccagtcaggaacaaaacctggactagaagtgggagaaatccaggataaactggagcctcggaggacccactaggattcaggggcacaagctggaacgtgcataggcctttcactgcctctgagcgtccaacttcaatgtctcaagtgagctgctggtgctcttg

SEQ ID NO: 942170 - DNA, 592 bp, Homo sapiens
gtttatggctgtcagacaactgcctacttagatactaggcactactccttgagggactggtgcttcaaatatgcatgtgcatgcccctcaacactgccactttttcccagaggatggggaaccaattgagcatgactgccaacaaattatagtctagatttatgccgtctgagatgatctcttagaagtcccctcaactaatcctgaccttaacctatatacagttggmagttcatttgtggagaatgggatacgaaggacaggttatgccacagagatgtaaccatatttgaaagtaagcctcttcccccagggaccagtgcccagttagcagaactagtggcacttacccaagccctagaactgggaaagggaaaaagaataaatgtgtatacagatagcaagtatgcttatctaatcctgcgtgcccatgctgcaatgtggaaagaaagggagttcctaacctctgggggaacccccattaaataccataaggaaattatagagttattgcatgcagtgcaaaaacccaaggaggtgggagtcttacactgtcaaatccatcaaaatgggaagaagaggggagaacagc

SEQ ID NO: 942171 - DNA, 566 bp, Homo sapiens
agatacttttctgttcatccaactctattataactttcacaaaagaatttaaagtctgttgtttaactgtaggccttacagtaaaatttgctatagagcatataatgggggtacatttctattcattgcttctctactctaaaccatggaaaaagcacttaacaaatgatgcccttctaaaagagtgaaggcctcctggcaatgttctctttaacccatgatgtggattaagaggagtgaatcattgtttgtttgtttgtttgtttgtttttgaatgattrttaggcaacatatgtaccattaaagtttcttaagtacattgggcctttgtcctttatctaacaaagtataagtttatccacttataaggctggctgcaaattccttaaacaaaagtacaccccataagtgcacataacagatcccttttccatttctattgttcagagaggcataagcaagaaaaaataataaaagataagaatttcatgacagtagaagtgttaatctgttaacttgggaaaagatattcacatcaaggatgccatcttcattttgggagaaat

SEQ ID NO: 942172 - DNA, 669 bp, Homo sapiens
taatgacatgtaccaccattgtaatatcacagagtagtttcacctccacaaatatcctttgtgctctgcctattgatccctctctccccctaaccctggcaactaccaatcaattattttactgtctccatcttttgtcttttccagcatgtctaatagttgtagtcacatagtatatatcctttcagattggcttcttttacttagtaatgtgcatttaagtttcctctagatgttttcatggcttgatggcttctttctttctttttwaagcactgaataatatttcactgtcctgatgtaccaagtttatccattcacctactgaaggacatcttggttgttctatgttttggcaagtatgaataaagctgctataaatgtttatgtgccagtttttgtgtggacataaattttcagtttattagggtaaacaccaaggagtgtgatcgctggagagtatggtcaaagtatgcttagtttggtaagtggctgtaccattttacatccccatgagcaatggataaaatttcttggtgctctacattttccacagcatgttctggattttgaccactctaattggtaggtagtggtatctcgttgttttaactcacatttccctggtgacatatgatgtagaagagaatctttttggtagtttatttc

SEQ ID NO: 942173 - DNA, 545 bp, Homo sapiens
tgccaatgcagacaaattatacatatatatatatatatattttttttttttttttgagacagggtctcactctgttgcccaagctggtgtgcagtggcacgatcttggcccactgcaacctctgcctcccaggttcaagcaattctcctgyctcagcctcccgagtagctgggactacaggcacacatcaccacgcccggctaatttttgtatttttagtagagacggggtttcaccatgttggccaggctggtcttgaactcctgacctcatgatccacccgccccagcctcccaaagtgctgggattacaggtatgagccaccgcacctggccgacaaattatacatttttaaactggagtttttgttgttgctgtattgcatggccaatccactcatcttaattttctgccaaatgcattgggctgaatcgaaaaaataaaccttattggtaacaccttaaaattcacttttagaagccttgactgagcctaattccaaatctgtcgttgtggtttggggattccattagatgttagagatt

SEQ ID NO: 942174 - DNA, 585 bp, Homo sapiens
aggagtttgagactagcctggccaatgtggcgaaaccctgtctctacttgggaggctgaggcaggagaatcgctagaacctgggaggcagaggttgcagtgagctgagatcacaccactgcactccagcctgggcaacagagtgagactccatctcaataaataaataataaaataaaamgtagtgagaagggagatgtggctaatgaaagagaattaatagtataactgtaaaatattgagcccaggcataagtggaatgatgcttttgacagaaatagtaacctttaatccatttcaggattacctacctgtattgaagtaagaaatttttgttttgaaattgcttgaaacatgaattaaacaggcatctatttaagaagtggaagagagtgtgcaccagatcctaagtaaagcattttgtcaaaaccagtcatcaaggtggagttctgggaaggtgagaggagtggtccaggtcagttcacctaatcttgggctggctcagcttggtcctacttaactcttcgtctacccccatttcctgtcttcatttgccttcatattttatttctaatcttgaacttat

SEQ ID NO: 942175 - DNA, 585 bp, Homo sapiens
aggagtttgagactagcctggccaatgtggcgaaaccctgtctctacttgggaggctgaggcaggagaatcgctagaacctgggaggcagaggttgcagtgagctgagatcacaccactgcactccagcctgggcaacagagtgagactccatctcaataaataaataataaaataaaaagtagtgagaagggagatgtggctaatgaaagagaattaatagtataactgtaaaatattgagcccaggcataagtggaatgatgcttttgacagaaatagkaacctttaatccatttcaggattacctacctgtattgaagtaagaaatttttgttttgaaattgcttgaaacatgaattaaacaggcatctatttaagaagtggaagagagtgtgcaccagatcctaagtaaagcattttgtcaaaaccagtcatcaaggtggagttctgggaaggtgagaggagtggtccaggtcagttcacctaatcttgggctggctcagcttggtcctacttaactcttcgtctacccccatttcctgtcttcatttgccttcatattttatttctaatcttgaacttat

SEQ ID NO: 942176 - DNA, 765 bp, Homo sapiens
cagaatctctgctcatggtatctattttctgtaacactcccatagtgagctgatcaaatcctactagtgagtgagttctcgtgagatctggtcatttgaaagtgtgcggtacttccccactcattctcctgctcttgcttacatgtgacaggcttctctccctttgccttctgccatgattggaagcttcctgcggcctctccagaagcagatgtcgctatgcttcctgtagagcctgcagaastgtgaaccagttaaacttcttttctcataaattacccagtgtcaggtatttctttaaagcaatgcaagaaggaactaatccactgctccagaaaagatatcatatatgacacagcatctacaattaaggcataaatttacttgagttacagtagctcactttcacgctcaaagatccatctgacttttttatgttggtgaataaatggcgatatcatcgggactacctcccatggatccttaggtctttaataatggcactaactgtggctatttttccagaataagatattattttggatttactctcttgactgtagagtacaagggtaatttcagaggcttccatttggcatttctttttacaatatcccctacctcacaggccaaggaaccagagtgggattgtttccaataataaggtgtgcttactttaattatataccaaggaccaagaaaatgatcatccatggccctagtagacccacggtgagctggacctgttccagaacctgcacttat

SEQ ID NO: 942177 - DNA, 571 bp, Homo sapiens
ggtcctgtctgttagaaggaaaactaacaaacagaaaggacatccgcaccaaaaacccatctgtacatcaccatcatcaaagaccaaaagcagataaaaccacatagatggggaaaaaacagagcagaaaaactggaaactctaaaaagcagagtgcctctcctcctccaaaggaacgcagttccttaccagcaacagaacaaagctggacggagaatgactttcacgagttgagagaagaatgcttcagacgatcaaactactccgagctacaggagaaaattcaaaccaaaggcaaagaagttaaaaactttgaaaaaaatttagacaaatgtataactagaataaccaatcagagaagtgcttaaaggagctgatggagccgaaagccaaggcttgagaactacatgaagaatgcagaagcctcaggagcygatgcgatcaactggaagaaagggtatcagtgatggaagatgaaatgaatgaaatgaagcgagaaggaaagtttagagaaaaaagaataaaaagaaacaaacaaagcctccaagaaatatgggactacatgaaaaga

SEQ ID NO: 942178 - DNA, 593 bp, Homo sapiens
atgatggtaaacccatgctaatattttataatatataaattaaacactttaggctttaaaagaaacaaaaataaataaatatagacaatatattcatatttatatagacaatatatatagacaatgtatttattgtctatatttcaaaggcagattaaagtttcaayaattctaggataaatactatcaatattatgtcatgggaattcaatgattgtgtattacattatacaaagttttctgttttttactcacagccaagaaaatgaattttctcaccataattcagtagtgggtataatgttcattatgccaaattagaatctattatgaactaaagagaaataacaaaaagttaaatgcaataaacaaaaacaactaagaatcatgacattatttttcaagattcaacataactccttttgctttgaaaaatgttttctatgagtttcaagacaaagatttacatttgtgcatgtatatgagagctgaatatgttaatttatcgtactttttctgtaactggttacttagaaaatacaagaactcttttaatatggttgaaaaagcggacctaaatcagagaaatgatg

SEQ ID NO: 942179 - DNA, 580 bp, Homo sapiens
gcccaaaccacagctgcagacccaggcctccctctccacagaatggggggggcaccctcctgggtgtagctatagccacccaaatcatccctgcagtcttgggtgcccaggaaggcccctctgcctccacaggctcagaagtgtctgttcctatggcctggtttctccctgctgtcagtgcccactccaattttagagcaaagtcagggccaagcccaggcgctgttacatcctgctgagacacacacacacgtggcrcagtgctgacacaccagccccctcccacctcagtcccctctagattttgggtaccaatgagcataggagggaaaccaagggggtactaagggaagttcagcactgggctgcaggttccccttggcacctacagactgggctccatgaaaggaagcaggaagcagacaagttcctggggagaagggagcaggtccctggcgaggcctcaacttcaggccagagagggccttaaggctggtgtgtgggctgctactcccatggacctgagtgtgaacttgtggtgccttttctgggcttgcctatggctgcccatggaccaatt

SEQ ID NO: 942180 - DNA, 593 bp, Homo sapiens
cggattcactcacacacccctctttgttccatacttgactctcccttggcaggtgtgagactgaggcctctagggtgagctgagcatagcttgataagctgagtgggcaaaacaagccttgcagatccaaggcaaaatgcagccaaaggcgcccctggcttcagaggcacctttctggccagaaaaactataccccaaggatcatgtaacactgtgactttattcctctcttttaatattatgttggctactctgtatttttttccttcccatataaattttgaatccgtttgtcaatgtacattaaataatttgctgggttttaattgagatttcattgaaactatagctcattttggaaataactgacatttttaacctttaaaactcaactataggaaaataaataataagaaaaagatcaaaccaattacactcaacaataagaaaatgaacaagttgaataaaaaatggrcaaaagacataaatgaaaaccttaccaaaaatggtatgtggcaaataagcacatgaaaacatgctctacatcatatatcattaaggatttgtaaattaaaacaacagttattagaatc

SEQ ID NO: 942181 - DNA, 825 bp, Homo sapiens
aaaagtacagcacatacaattaggtacaatatataatgtttgaaaataataaacaactatgttatcagtttatgtatttactatactttttatcattattttagagtgtacttcttacacttattaaaagagttaactataaaacagcctcaggcaggtccttcaggagatgttctagaaaaagacactgctctcataggagatgacacctccacgtacgttattgttgctgaagactttccagtgggacaggatatggaggtggaagacatccacagtgatgctgaaaatcctgaccctgaccctgaattaggcctaggctaatgtgtgtgtttgcaccttctttttttgagaaggagtcttgctctgtcatccaggctggagtgcagtggtgccatctcggctcactgcaagctccacctcccgggttcacgccattctcctgcctcagcctcctgagcagcttggactacaggcacccgccaccamggccagctaatttttttttttttgtatttttagtagaaacggggtttcaccgtgttagccaggatggtctcgatctcctgacctcgttatctgccctcctcggcctcccaaagtgctgggattacaggcatgagccaccgcgcccggcctgcatcttcatttttagcaataagcttgaaaagtaaaaaaataaaataaaattagaaaaagtttatagaataagggtataaaaatatagttttatatagttgtacgatgtgtgtgtgttttaagctaagtagtgttacaaaagggtcagcaagttaaaaaataaaagtgtataaagtaaagttacag

SEQ ID NO: 942182 - DNA, 439 bp, Homo sapiens
aaagaatcaactgctggctggagaccaaccagcaaacttatcaaaaatacagccaaggaccctcacagagtccacttcactcccctgctccctccaccacagcatgtgctggtatccatggctgagagacctgaagacagatcataccacaagactctttgcagacactctccggtaccagccagtaccagagcacagtagcttcgctgggtggttagatgtggaagagaaataacaatctctgcactttgtttctcaggaacccccatccctagaagaaggggtagagcaccacatcaagggagcamcccatgggacaaaagaatctcaacagcagccctttagccccagaacttccctctcacatagtctacccaaatgagaaaaatccaggaaaaccattctgaaaatatgacaaaacaagattttctgacacccc

SEQ ID NO: 942183 - DNA, 755 bp, Homo sapiens
atgttgaaaccccgtctctactaaaaatacaaaaaactagccaggcatggtggcacacacctgtagtcccagctactcaggaggctgaggcacaagaatcacctgaatctgggaggcagaggttgcggtgagccgagatcacaccactgcgctccagcctgggcaacagagcaagattccatctcaaaaaaaaaaagtgcagggaaaaaaggatgtgataacagtattcagataatgaggaagagaaatcagacattaggctscaaggcagaggactaagttcactggagttaggcttcattttcaacagagacgcacttcacagtagccgaagttgtccaatgatggatgggctgcttcatgaggaagtatgtctcactttgaaaaagtttgaatatttggtgcaatgtttccaaagagattcaaacgttggatatgttcttaaacaagacggcaatcataaccatttatggttgatactaatgctaaaacaataggaataacattaattgggcacttactattgatatgtggtgctcagtgttttctgtacattatcttatttaaacctttaccgtaacactggggtagttacattactaccatcttaggggtgaagagtgaagcctttttggtgagtgcaagtaaaaatctgacaggtcgagagacctgataattgcattatggacattggagggatagagtagaatggcatggtttttttccattatggctgcaaacaagggcaggtgctt

SEQ ID NO: 942184 - DNA, 479 bp, Homo sapiens
acttagctaagcagcatgtcagctgagaccaaatgtgaaacaagttaaaatcttttaaatactcaagctgcctgcctccagcaggatttgcagaagcactccaacttcatggttgcagtccatgtttgattgctggtttgttttaaattatttgtctaactgttgacctgttggggtactcatttgtaactgacccattttcttcccatggacagcttttgatttcttctctttttctgtttgtggggaatacaggacttttgggccttcatgcacaagtgcttggctgagaagttgagatcttagaaaatatggccagacagaaatgtgrgttgtattttatttgcagctagcaagacttagagctgtcttttaagtggttctggattgtcaggcctctgagcccaagctaagccatcatatcccctgtgacctgcacatatacatccagatggcctgaagcaacagaagatccacaa

SEQ ID NO: 942185 - DNA, 589 bp, Homo sapiens
ttcatggaataccacttttacctgaaagaaaaacatgacagaaaaatataattattcacacttagatatttggaagatagtttcccataattgaatgtggtaagtttttgtttgtttgtttgtttgtttgtttgtttgagatggagtcttgctctgtcacccaggctggagagcagtggcacgatctcagctcactgcaagctccacctcccaggttcatgccattcttcttcctcaagcctcctgagtagctgggactataggcattcaccaacaygcctggctaatttttttgtatttttagtagagaccggatttcaccatgttagccaggatgatctcgagctgctgacctcgtgatcctcccaccttggcctcccaaagtgctgggattacaggtgtgagccgccatgcctggccagtaaatgcagtaggtctttaacttcaaagtaaataactgatagtcttgttgctaattataaaatttgagctttcaaccaaaaagtagaatgtaggaaaaggtgtatcttccacaatgagcttgattgtttcttagtatttaaaattttccttactgaagagatgttta

SEQ ID NO: 942186 - DNA, 730 bp, Homo sapiens
acttttacctgaaagaaaaacatgacagaaaaatataattattcacacttagatatttggaagatagtttcccataattgaatgtggtaagtttttgtttgtttgtttgtttgtttgtttgtttgagatggagtcttgctctgtcacccaggctggagagcagtggcacgatctcagctcactgcaagctccacctcccaggttcatgccattcttcttcctcaagcctcctgagtagctgggactataggcattcaccaacatgcctggctaatttttttgtatttttagtagagaccggatttcaccatgttagccaggatgatctcgagctgctgacctcgtgatcctcccaccttggcctcccaaagtgctgggattacaggtgtgagccgccatgcctggccagtraatgcagtaggtctttaacttcaaagtaaataactgatagtcttgttgctaattataaaatttgagctttcaaccaaaaagtagaatgtaggaaaaggtgtatcttccacaatgagcttgattgtttcttagtatttaaaattttccttactgaagagatgtttaaaggtattagtgaatgtgacatattggtattgtataatgatatgtctcagcattttaaattatacataactaatggaataaatattttccaaatgaccaatgaatgatgttacaaaatcgtgtatggatacaaaatctattcaatgttcaatat

SEQ ID NO: 942187 - DNA, 589 bp, Homo sapiens
ttcatggaataccacttttacctgaaagaaaaacatgacagaaaaatataattattcacacttagatatttggaagatagtttcccataattgaatgtggtaagtttttgtttgtttgtttgtttgtttgtttgtttgagatggagtcttgctctgtcacccaggctggagagcagtggcacgatctcagctcactgcaagctccacctcccaggttcatgccattcttcttcctcaagcctcctgagtagctgggactataggcattcaccaacatgcctggctaatttttttgtatttttagtagagaccggatttcaccatgttagccaggatgatctcgagctgctgacctcgtgatcctcccaccttggcctcccaaagtgctgggattacaggtgtgagccgccatgcctggccagtaaatgcagtrggtctttaacttcaaagtaaataactgatagtcttgttgctaattataaaatttgagctttcaaccaaaaagtagaatgtaggaaaaggtgtatcttccacaatgagcttgattgtttcttagtatttaaaattttccttactgaagagatgttta

SEQ ID NO: 942188 - DNA, 467 bp, Homo sapiens
acctaagaattcatgacattttcaaatccttaggggcaatgcatgctctgaatgatctgttttctgatttcccctactcttactaagccactcattcttctatagtgcagagttgtcatgatcaataactacagctattccagacctcatttcaatcgctcctcttcacatctagcatgtcctgttgttttaacccattctctctactctccctagttttctgtctccaacagttcctctgctccacaggaagctrtgctctgttgctcctactctgttttcactgctgattatccttcttcacctcttttcctcctgattttgatgccatgatttatcggtataactatgaccttgtatatatactcgactcacttgtccctccctccttccagcacattcatctagcaaaatccaactctgcttcaaccaaaacaactctacttcaacccaaatcttttcctgct

SEQ ID NO: 942189 - DNA, 581 bp, Homo sapiens
ttcactattatcttatagatggaaaaacaaaggtccaaaaaagttaaatgacttgttcaaggtcattttggcagaacctcatggagaccacagacatggcttacaactttgtgatcatttcagaacagttttgggaataagtctttgggctcagaatgtctttccataatccttaaattgcacctaacagactatttggccataataaaactatcagggaaatatttatctcaaatgtatacatgtgtataggccttcaaaaatagattaggtaggctgggcatggtggctcatgcctgtaatctcagcactttgggaggctgacatgggcagatcacaaggtcaggagatcgagaccattctggctaacatgatgaaaccccatctctactaaaagatacaaaaatttagccgggygtggtggagggtgcctgtagtcccagctacttgtgaggctgaggcaggagaatggcatgaacccaggaggcagtgcagtgagctgagatcgcaccactgcactccagcctgggtgacaaagcgagactccgtctcaaagaaaaaagaaaaagaaaaaagaaaaa

SEQ ID NO: 942190 - DNA, 677 bp, Homo sapiens
gtaatagcaagatagctgtcaccggacctagaaaggggagaagccatgtcacccatctctagagtttggcataagagtttgagaggaattgtctgatttcagaagccttttgctataaatgccaggtggtgtctcttactatccctgattggttagtgtaaaagcaacactcttcccctaagaaggtgcaaagtcctcctttctcagcagtgaggaggtctaggccttggcagttttggagagtcactgctgccaaagagtctatttrggattctagagtaaggatagattttgttatttctcacaaactgtctgagaaatcctttgagagtgtgtggtagtaggatagtgaaatgaacaaaccagctattctagttaatgtagcaatggccattcctaaccatataagtaggggtattagttgtatggccctgtgctgatggacttgagctttgaggggcactgatagggtctgatttcctggggcaatgtcaatgttgggacttaggaagactaaggtccgggtgcctgtccagttggtggggaggaagatataggttgaagttccacataagaatatgccttggctggatagacagaactggttgtgtatgttaaaaaggtgtgtgagtttgttgttttcattttcccatactcctagaatacttgcaaggtag

SEQ ID NO: 942191 - DNA, 605 bp, Homo sapiens
aagagtttgagaggaattgtctgatttcagaagccttttgctataaatgccaggtggtgtctcttactatccctgattggttagtgtaaaagcaacactcttcccctaagaaggtgcaaagtcctcctttctcagcagtgaggaggtctaggccttggcagttttggagagtcactgctgccaaagagtctatttgggattctagagtaaggatagattttgttatttctcacaaactgtctgagaaatcctttgagagtgtgtggtagtaggatagtgaaatgaacaaaccagctattctagttaatgtagcartggccattcctaaccatataagtaggggtattagttgtatggccctgtgctgatggacttgagctttgaggggcactgatagggtctgatttcctggggcaatgtcaatgttgggacttaggaagactaaggtccgggtgcctgtccagttggtggggaggaagatataggttgaagttccacataagaatatgccttggctggatagacagaactggttgtgtatgttaaaaaggtgtgtgagtttgttgttttcattttcccatactcctagaatacttgcaaggtag

SEQ ID NO: 942192 - DNA, 769 bp, Homo sapiens
atagttaaatgtaccccaggttctgtgagggtgacagcatgagctggtccttgccctgagcaccctcagtcctattgttgaatcatcttgttgggggcttctggcccagagaacctttgtcctctggggcagtgtgctttccaatgattgccttggtgtagtggacatgggcgagggagcagctagtttttctttggacaatctttttttaaggtgtccttgcaaaccagactgataacaagccctaccaggtgattggcctgtcccattttctgtactctcttaaccaccaagatttgtttgtctgagggccatgactaaggctgtggcctttctcctatctcacttttcctttttgacctgtttctcctggttcctattatagaacaccaaggttgccaggtttaatratgcctccagatgttgttcagggcccagggctagcttttggagctttctcctgatatctgtggctgattgggtactaaacttatcttttaggatcaattgacccttgagagagtcaagtgacaggggagtatatttacttaacgcctcccatagctgctcaaggaaggtggagggattttcttcctttccctgagttacggtggacatcattgaataattcatgggctttttcctaattctccttagtccttctagaacacaggtcagcagatgtttacaactccagtccccatgatctgagttgaggtctcagtggggatccatactgggcacggcttgctgaccagtagggaatttg

SEQ ID NO: 942193 - DNA, 612 bp, Homo sapiens
aaacattagagtaatgacatggccaaatgaatataaacatgactgattcaacttcataagtatgaagaaacagactggtcacctgtggaatcatcaggggtccatggatgacttcgagttggcttttctgaggttggtcctgaggtagtaatcattctgacactgggactggatgacctactgctcacctacaggaagaagtcacaggaraaacaaaatgtgattttttgattaaaaaaaatgacgagaacgtttccattaaaaggcaagaagagacttagagatccccccaaaactcttgtaaacaacaaaataaatcctctcttatatatatgtaaaaatttatattcactcacgcatgatacctattaaaaactgatgagcttgcaagaaactaagaaatactctgagattagaaacaaaacaatatcaggaaactagtaagtgcttaagctgacagccctcggaatttcaactaaacaccaatggcctagagctactgttttcacaggctgctgcactcagaggaatggaccataaagccttgggcctttgtaggatggaagtaagactggagaaacctctgcttaaagctaaaactcagcaaaggct

SEQ ID NO: 942194 - DNA, 632 bp, Homo sapiens
ttatacatttaacttgtcataggtatgtatgtacagaaaaaaccccagtgtatatacagttcagtattatccatggtttcaagcatccactagggatgttggaatgtatctccatgagtaagagggggctctgtatttttatggatagttgtacggaagtatgtctggaggacaaaaggctacggtctaatggtaatagactgcgggagtggggggtggaatttagcaaggcctgtttgttcagtcttctcttgtcttctttcctttcttccgggtatagggagggcccttctgaaatgagagttttacgaccgattttcaggggaaggtcagtgaggtttaatggcccatttcaggggaaagagggtgagggaagatcagagcgtgaccttctgyttttacggttttctcaatttccttcaagtctaaaatatatagtatgacaagatgacgtattctggggtagcgtgttctgaactccgtcagtatcctcatttgtaaactggggataataatgttacctaactcagaaagatcttgtgatcacgaagttcatacttgtaatacactcagaacagtggctggtaattgcatcagcaagaaatcccatctgaggaaggggaaacaacagg

SEQ ID NO: 942195 - DNA, 613 bp, Homo sapiens
catgcaaataatttcccccctttacacatattttctttaaattagccagttcacaacccctgctggaaagccttaagaggtaatgcctgtggaccttaataaaggcagagttccacagattcactcttatctgtgattaacaaaatgctgcttttatttcatgtgttttgttttgctgcctctgtgtctcacctgactgacatacacatacctaactttcctcccagtcagcactcctggagagtggctatcttggcaggaataaactggacacaggtyggacaagaaccacgagggcatctgctagtataaacaagtttcctgtgagacatacacttggccacaggtcaggcaagaaggcattgtcccattcaccaagataaagaagtatcctcttttgatttactgtaaacatcagtgaccacctcctctagagccttgtcggggcagagctagagttcctggccactctccagagagagacccgaagaccaagttagaagaaaacaaaatcttttaatatgctgaatttggtttattagtatttcattgaggatatttgcatcagtattgcaagggatattgatctgtaattttcttatagtgtcttcat

SEQ ID NO: 942196 - DNA, 809 bp, Homo sapiens
ctcccaaagttctgggattacaggtgtgagccatgagcccagcctttttctttctttctttctttcttttttttttttttttttttaaagagacagggtcttgctctgttacccaggctggaatgcagcagtacaatcacagctccctgtagccttgaactcctgggctcaagtgatactcccacctcagcctcccaagtagctgygacttgggagtggtgcaccaccactcccagctactttaaaaattttttgtagggatggagtctccctacgttgcccaggctggtcttgaactcctgggctcaagcgatccttctgcctttgcctcccaaagcactaggattacaggcatgagccgccatgtctggcccctgatactttttgatgaaaccaataaaacttgcaccctagctgggcgcagtggctcacacctgtaatcctagcacttcaggagtggtcacgacttcgagaccagcctggccaacatggtgaaaccccatctctactaaaaatacaaaaaactggctaggcgcagtggcttatacctgtaatcccaacactatgggaggctgaggtgggtggatcacaaggtcaggagttcgagaccagcctggccaacatggtgaaacctcctctactaaaaatacaaaaattagccgggaatggtcgtacatgcctgttatcccagctactggggaggctgaggcacaagaatcgcttgatcttgggaggtggaggttgctgcgagccgagatcacgccactgcacttcagcctgggcgacagagcaagactccgtactccccc

SEQ ID NO: 942197 - DNA, 526 bp, Homo sapiens
gttctgaagtgtagtattaagccctccttagaatcatctctcacagttgcaatgctgtttggcatttggccccaacattgtttggaatctggagttcactgttgaatgggaaagtagaatagtgttgcatgtatccaggcttttgtgctgcagttctaagcagggggcctggttaacatgtgatgacctcctttggtatggtttggccccagtgttctttggagtctggggaggtttggcctttaaaaagcgaactgcagagattgctggcaagatggccaaataggaasagctcccatctgcagctcccagcgagagcgacgcagaaggtgggtgatttctgcatttccaactgaggtacctagttcatctcactgggactggttggacagtgggtgcagcccatggagggcaagccgaagcagggaggggtgttgcgccacccaggaagctcaaggggtcagggaatcccctcccctagccaagggaagccgtgagggactgtgccgtgaagagccatgcactc

SEQ ID NO: 942198 - DNA, 610 bp, Homo sapiens
tgaatttctttcttctacttgttcaattctattgctgagactttccagagcattttgcatttctaaaagtgtgtctgaagtttcctgaattttttattgttttttctttaagctatctatttcattgactatttctcccttcacttcttgtatcattttttggatttccttgcattgggctttgcctttctctggtccctccctgattagcttaataactaacctcctgaattctttttcaggtaaatcagggatttcttcttggtttggatccattgctggtgaactagtgtgattytgcgggggtgttgaagagccttgttttgtcgtattaccagggttggttttctggttccttctcatttgggtaggctctgtctgagggaaggtccagggctgaaggctgttgttcatattcttttgtcccacaagctgttcccttgatgtagtactctccctcttttcctatggatgtggcatcctgtgagctgaactgcagtgatttttgtctctcttctgggtctagccacccagcaagtctacccaactctggactggtactgggggttgtctgcagagtcttgtgatgtgaaccgtctatgggtttctc

SEQ ID NO: 942199 - DNA, 677 bp, Homo sapiens
acctgcgggggaggagtggatggggggagaatacatcaaatgaagattatagaaattcagtggtaggggactgatgaagaaactgcttagtcaaatgagtaaactctttatctagctcattctttgctctatttgatttttggaggtttggtttatggggaccttgggtaaggagggtactccaaactcttggtattatccttccaataggtataatagttgtcttcctggtgtgctgtattctctcaattttaaatgctttcatgcagccatttctagaatgtcatatgttctctcttcaactgacataacaagaactggaagaaatgtgcaatcatgaggacactgtaacctataagtgatgtgctgagaccagaagcccaaaatgatggtaactgagagtggcacraaggccctaagttttggtcatgctctcacctaagtgagccaaaaagagggaattttttaaacaaaattctaggaggccattgttttggactgaactcatgcaccaggccccagcaaaccaaaccgaaatggagtccctcgtgctaagactttaaggaaacacatagattctagaacagaccaggttttgttttgttttttctcctgcaaatctctataacaaacatttctaacagcataggtagccaccccttgaagttctcattaaa

SEQ ID NO: 942200 - DNA, 665 bp, Homo sapiens
taacctcacatcctaccactctctccctttgtagttcaatacaacatactggccttatgctgtttctcacctgtgcctggctctccaaggccccacccatctgcaaggctcaactctcattttccttagatagttgtcaaatatcatcttctacgaaagttcttcctctacccaatgtacttacaattgcaatctctataggactttctattctctttgactcatttacttttcttcataaaacttagcaccttctaatatctaatatcttacatataatgtattagtcagggtgctctggagagacagaattaacaggatatgtgagtatatgaaggggagtttattaagaagtattgactcacatgatctyaagtggaagtctcataataagctgtctgcaagctgaggagaaagaaagccagtccaagccccaaaacctcaaaagcaggtaagcaaacagtgcagtcttccatctgtggccaggcagaggcctgagagcccctggcaaaccattggtgaaagtccaagagtccaaaagctgaagaacttggagcaaaatgtgcaagagcaggaagcatccagcacaggggaaagatgaaggccagaagactcagcaaatctgctctttccagcttcttctacctgctttactctagccacac

SEQ ID NO: 942201 - DNA, 659 bp, Homo sapiens
cattcatacaatacaatgttagtcaatgagtaaaggagtgtactaccaagtcacaaaaacacatagaggaaacttaaatatacattgcttattgaaagaagcctgtttgaaagtggtcatatgacattctggaagaggcaacactatagagacaataaaaaaatcagtggttgatcagtggttgggttttgttggtaggggtggtgggagagagcaggatgtgtaggtggagcacaggagatggctgaaatataccaatgattcattcttgatctgcatcttctttgacaaattaacagtatttgacacaatacaccgttccatagtttcttaatctgtttccagaacaaaacaattatttggttttccttttacatctctggttggctgcttcttagtcatcttttctcatttattttcatcatcttgaatttttaaagctgaaattctctaaggtycaatacttatcctttatatttatatctacactcaacttcttcagggtctcatttattttcatgatttccaatataatctacagattacttccaaatttacatcttcaggctggtgcttttccccagaccttctagagtccataccacttactaatcaacaacttcacttggaagcataatagccatcctaattttagtatg

SEQ ID NO: 942202 - DNA, 569 bp, Homo sapiens
aaggcagcatggaagctggtctagaaaggtagaatcttattatatggctttaggtgatactattctctttgcctcagttccatatatgtaaaatgagataatggaaattgaagcccggtgtggtaagctacactggtgactcacatctattatttgatgtgttcagcactccacttttctgggaacaggcactaactcgctgttttagtcagggttctttcaagggacagaactaatagggtagatgtatatgaaggggagtgtattaaggagtattaactcacaggatcacaagctgaagtcccacaataggctgtctgcttggctgagacgcaaggaagccagtccgagtcccaaaacttcaaaagccgacagtggagccttcagtctgtggccagagatctgagaacacctggaaaaccacyggtgtaagcccaagagcccaaaagccaaagaacatagagtctgatatttgagggcaggaggcatccagcacaggagaaagatgaagtctggaagactcagcaagtctgctcttccatcttctcctgcctgctttattctagctg

SEQ ID NO: 942203 - DNA, 724 bp, Homo sapiens
gttttccttgagttcgcttttaggcaaaaaatatttctccctgtggtgtagagtgagaaaagctgtgtagagagaatggcccctgaggaaaaccaacatttacaaggcagtcagagaaaggaggaaagacaagaaccattgttgaagtcwggagagtacaatgtttaggagagggtcaacaggatccaatgccaagaagtctagtaagataaggacctaaatgtccaccaaaaaatagaattaaaaagccctgaaacagacatacatctaaatggaaacttgatatattataaggtagccttatgaatcagtgggggaaatgttgagttattcaataaatgatttttgggcagtcagttacccatattgatccctacctcatagcatttataaaaaatcaactccagccaggcaccatggctcatgcctgcaatcccagcactttgggaggccaaggcaggcagatcacctgaggtcaggagttcaagaccagcctgaccaacatggtgaaaccccatctctactaaaaatacaaaaattagccaggcatggtgacgtgtgcctataatcccagctatccaggaggctgaggcaggagaatcactggaacccgggaggtggaggctgcagtgagccgagattgcaccaccgcactccagcctgggcgacagagcaagactctgtctcaaaaaaacccaaaaaattaactccatgtcaaggactt

SEQ ID NO: 942204 - DNA, 751 bp, Homo sapiens
atgtgtctgtagtcctagctactcaggaggctgaggcaggagcatcactagagcccaggagttcaaggttgcagtgagctatgatcgcagcactctagcttgggtaacagagggaaaccctatctcaaaatcaaaaaaagaaagaaagaagaaagaaagaaagagagagaggaaggaaggaaggagagaaagaaagaaagaaagaaagaaagaaagaaagaaagaaagaaagaaagaaagaaaaagaaagaaagaaaagaaaagaaaaaggaaattgtaaactttgtgaaaacacttcaaaatgttttttataaaatactgaaaagggaaacaacaaaaatgaccaatatgttaggggttaaacatatgacattttctagaagaytggggctgatgaaatatttactttgctaatctgcaatgtatatgggaatgctatgggaaaatagcattagaatcaacaacacaaataattattaaagtattagtgccatagtgcatagttacctgtttttaccttaagaccacatctcgataaatgtgagcattcctttctctaaatttgctacttatgatgtgaaagcagctcttttccaaatgatctagagtataatttttaagaaatcagaagaattgtgttgttagctattagctactattgaagctatttcacttgcaaaggaaggaaagcaaacccacaaatgttgagcaaatgccaaaatgccaaaaaggtcttacaaaatggtacaga

SEQ ID NO: 942205 - DNA, 751 bp, Homo sapiens
atgtgtctgtagtcctagctactcaggaggctgaggcaggagcatcactagagcccaggagttcaaggttgcagtgagctatgatcgcagcactctagcttgggtaacagagggaaaccctatctcaaaatcaaaaaaagaaagaaagaagaaagaaagaaagagagagaggaaggaaggaaggagagaaagaaagaaagaaagaaagaaagaaagaaagaaagaaagaaagaaagaaagaaaaagaaagaaagaaaagaaaagaaaaaggaaattgtaaactttgtgaaaacacttcaaaatgttttttataaaatactgaaaagggaaacaacaaaaatgaccaatatgttaggggttaaacatatgacattttctagaagactggggctgatgaaatatttactttgctaatctgcaatgtatatgggaatgctatgggaaaatagcattagaatcaacaacacaaataattattaaagtattagtgccatagtgcatagttacctgtttttaccttaagaccacatctcgataaatgtgagcattcctttctctaaatttgctacttaygatgtgaaagcagctcttttccaaatgatctagagtataatttttaagaaatcagaagaattgtgttgttagctattagctactattgaagctatttcacttgcaaaggaaggaaagcaaacccacaaatgttgagcaaatgccaaaatgccaaaaaggtcttacaaaatggtacaga

SEQ ID NO: 942206 - DNA, 717 bp, Homo sapiens
aggcgtgcaccaccgcacccagctaatttttgtatttttttgtagatatggggtttcgccatgttacccaggctggtctcgaactactgaactcaagtgatccacctgcctgagcctcccaaagtgctgggattacaggtgtgagccactgcacacagcacttgttttcataaataaagttttcgtggaaccagccaaccccactcctctatgtactatctatggcagctttcacagagcccccaaaagcccctgtctggcccttgatggaaaaaagcttggtggcccctgctctggactataagtttcttaaggcaggaccctttctgtttagttgcccttgcaaattcagcccttgcygggtgcctgcacagaacgggcacttaagaggtatgtgtctttgataagtcatttctaccctgtcaacattgtattgacttaagtcattattaaaactgcacactccatcaggaatagatgtcccttgtgagattccaagaccattttctagcaagcagttcaatacgatagcaatatcccaatgcaggcgggcatgtccagggtctcagagtagctactggctaatgaggccaccacacatctatgtgtgcagcgccatccatgtgtgcagactggaaacatacatggaaagaggcgcaaactcacacgcaagagattataaattgagcagatttatggaaacacatcatgagatgt

SEQ ID NO: 942207 - DNA, 612 bp, Homo sapiens
ctacctgtactacctacacgggttgttatcattacgtgtcaagtggatgtagatgaaaaataagtacatggcaagtgctcagataggcttgacatcactgtaagctctaaatgtaagtcatcagtagtcttccttgtgtgaaacagttcttcctaatttgtgaattacactcttcccytacctaaagatcccaatccatatattcgagctggtttcagctctctctcagctcgggcatattttgctgccgctaccattttcatagacttggtaattttctggatgtttttgatggactttagtctcctggtgactgaaaaatagaagtactgtgttaagacaaaggaattacagtataacttccttgtgaatttattgacatatttttctaaagtgcaaggcagaataatgagcgcttagataaacaataaacagcacgatgctaaaccagtcttaatattagaactagtactaatagccgggcgcggtggctcacgcctgtaatcccagcactttgggaggctgaggtgggcggatcatgaggtcaggagatcaagaccatcttggctaacacggtgaaaccccgtctccactaaaaatacaaaaaattag

SEQ ID NO: 942208 - DNA, 766 bp, Homo sapiens
catcgaggagctcaggtccaggctgggaggctgccaaacttggggggagggggggctggggcggggggagaaaccctaggcaggacactggcaaaagcggactatggggaaaccatcagacactactctcttgcggcacttcttgcgtttgaactcttatggatgcattaggtaagaccagagagtagtttctttactttggtagaacatcagaatcaaatgagggcttaaaatacagatgaccaggccccatcctaaaccaccttaggaatgtgcttttacaaaggcacctgaggggactctgaagcacagccagggctgagacagtaaacccaaacttgactcagataagcccctgctcttgttttctggcctcatctctttgccttcagtctccaaaggagcaaaagccatcttttttttttttttttttttgagacacagttttgctcttgtcgcccrggctggagtgcaatggcacgatttcagctcactgaaacctccacctcccagattcaagtgattctcctgcctcagcctcccgagtagctgggattacaggtgtgcaccaccacacccagctaatttttgtatttttagtagagacaggtttcgccatattggccaggctggtctcaaactcctgacctcaggtgatctgcccacctccgcctcccaacctgctgggattacaggcatgagccaccatgcctggccgcaaaaggcatctttaagcactgaaatctgagtaagatctatcaaatcc

SEQ ID NO: 942209 - DNA, 720 bp, Homo sapiens
tcactgaaacctccacctcccagattcaagtgattctcctgcctcagcctcccgagtagctgggattacaggtgtgcaccaccacacccagctaatttttgtatttttagtagagacaggtttcgccatattggccaggctggtctcaaactcctgacctcaggtgatctgcccacctccgcctcccaacctgctgggattacaggcatgagccaccatgcctggccgmaaaaggcatctttaagcactgaaatctgagtaagatctatcaaatcctggggaagagaacattagaggtgacaggtgatggaagaagtgggtctttctcattatctatccagtatcacccttctaatgccttcacatatattcagggccaataaagccatcactgctctgttttagagcagtgcctctaaatgatagagaaactatacctgcctctagggcacagtctcagtggggacagaaagattcagtcctagttagagaagagactagaaaaccctcagagggagactgcagacttgcagctacagatggaagagttaaccagaaggtatttatcaacctaagggctgccatgtatgatgtgcatacacagcacagtctctgcagcgggtggcccctggagtcaccctgtgcagcctgcacagcaatatgtgatagccctgcttaaaggggcctacaatgaaagcaccgcctgttaataacaaagtt

SEQ ID NO: 942210 - DNA, 703 bp, Homo sapiens
gacaactcaagttcaacatacatcacccttccctttgtttttaaaattgctcataaaattatattaaaagtattggctgggtgtccaccaggtggcaacatttctttaaaaaaaagcccagatttagaagccataccttcttagctacatcaaagtggattcttgagggccacacaaccagagtctagtcaaaatcactgaaagtgcagcccaccctgctgagttcttctcttaatatgmataggtggaggcagttttatgagcaagatccttctgtggcctcttacaagaaggctcatgtgtgtcagtgtgtacctatgtgcatgtactatctaggacttatatcatatcatgaaaagccctttaatcctaaaggtacttagtgcaagcaactgagtaacattggaagccttagataacctctctgagcctctttcttcatctgtagaatgttgtatacgtattagtaccaacttctttggggtgtgagtgtgaacttagataatgcatgcctataatgtatctagcacagtcctgggacaaagtaagcacttaatacatggtagctcttattattatttccacagtgacccttatccccactttccctgctccaagactctattctttgccagccttagttgtgggcagcctgccaggcatgatctaatcagtgaagcacatgagtcatgagaggatgact

SEQ ID NO: 942211 - DNA, 764 bp, Homo sapiens
gggatgagatgaacagaggatgagggcctgagcagctcagtttccagacagcatggagggctggcagttctgactgctttatgcatatgcacttaatttgcttccctggtccttctaagtggcaactcattaacacctccaggctgagggctcacattttatactctagttgaatatgcagtagcataatggaatgtctactatggctgcctctctggaaaagctgccctatttattcagccaccctggagaaaagtggcagattttttcttgcagtggcaagaaatacccgtatgctgcttttaaacaccttggaggtttaactttttaaatgttattcatttatgctactttgtaacattatatgttatattaatgttacatatgtaatgatacatgatattgggaggacagatattattattgtcctcacttggcaaatgagaaaaccaagatatagagatgtacaaatgatttgcctgcagtcacacagctcaacaaggatgaggcagggaagtctaccttgactgtaaaccttgagttctctctaccacatcacataattatgaatttacaattatatttgcttgyttccatgtgagtctaacccagtttagaaccagcagaggaacagaaagatggtatggcattgctgagagtctgtgaaagaagccattaaggtacggaaaaattgagatgtatgaccaatgacattgaaaacattaaaaatttcctagagtgagattcttctccagtaagaagct

SEQ ID NO: 942212 - DNA, 634 bp, Homo sapiens
aatgaaataaaactaggctaaaacaagtatttacagtatagtcttgcagatctggctggcataccaccccaaaggaagtgcttttgtgaattaaaaatagctaaggccgggcatggtggctcatgcctgtaatcccagtactttgggaggccgaggtgggtggatcacaaggtcaagagatcgagaccaccctggccaacatggtgaaaccctgtctctactaataatacaaaaattagctgggcatggtggcatacgcctgtaatcccagctactcgggaggctgaggcaggagaattgcttgaacccgggaggcggaggttgcagtgagccgagattgcacygctgcactccagcctggcgacagagtgagactctgtcaaaaaaaaaaaagaacagttcaagctttgcgaaagcaagtctgtggattgctctagggaagaattcccaggaggaaggtgtgctgtaaagtggccagaggtgaggctgctggcctcattagaaaagtctgagtcttcaagctctcacccttcacccaaccctttaccctgccacattgccagtatgttcccaatgccgcctatgtccagtaggaacactgcagtcagtgatggcaggtttggctgctcccttc

SEQ ID NO: 942213 - DNA, 607 bp, Homo sapiens
tagagtgcaactcactggcgcatttgccttgtgaaggtcccactagtgacgctgaatgagtaaatgacctgggatgaaagaaacgtttctctggttaaaatgaaattattactagattaagcccagagttcatgcacattctcatttctagtttccccttctaatatgatttgaccaacatggcacaagctttgctattgtgtcaggtttaaaagatgtcctggctcagaggaaagaggagcaaagtctggtaaatagattctgcttttctttggggggggttttttttttgagacagagtctcgttctgtcgcccaggctggagtgcagtggtgcgatctcggctcactgcaagctackcctcccaggttcacgccattctcctgcctcagcctcccaagtagctgggactacaggtgacccccaccatgctcggctaattttttgtatttttagtagagacggggtttcaccatgttagccaggatggtctcgatctcctgacctcgtgatccgcccgcctcggcctcccaaagtgctgggattacaggcatgagccattgcgcccagcagattctgcttttctgtgtagtatgtaagaagagac

SEQ ID NO: 942214 - DNA, 602 bp, Homo sapiens
tcttctctaaactgtttattctagttagcaactcctctaacctttttccaaggctcttagcttccttgcattgggttagaacatgctcctttagctcagaggagtttgtttttacacaccttctgaagcctacttcagaactcattctcygtccagttttgttcccttgctggcgaggagttgtggtcctttagaggagaagaggagttctatttttgcattttcagcctctttgcactggcttttcctcatcttcatggatttatctacctttggtctttgatgttggtgacctttgaaaggggtttctgtgtggacatcctttttgttgatgttgatactattcctttctgtttgttagttttccttctaacagtcaggcccctctgctgcaggtctgctggagtttgctggaggtccactccagaccctgtttgcctgggtatcaccagcagaggctgcagaacagcaaagattcctgcctgttccttcctctggaagcttcgtcccagaggggcacccacccgatgccaggctgagctctcttgtatgaggtgtctgtcaacccctgctgagaggtgtctcccagtcagaagtcacag

SEQ ID NO: 942215 - DNA, 602 bp, Homo sapiens
tcttctctaaactgtttattctagttagcaactcctctaacctttttccaaggctcttagcttccttgcattgggttagaacatgctcctttagctcagaggagtttgtttttacacaccttctgaagcctacttcagaactcattctccgtccagttttgttcccttgctggcgaggagttgtggtcctttagaggagaagaggagttctatttttgcattttcagcctctttgcactggcttttcctcatcttcatggatttatctacctttggtctttgatgttggtgacctttgaaaggggtttctgtgtggacatcctttttgttgatgttgatactattcctttctgtttgttagttttccttctaacagtcaggcccctctgctgcaggtctgctggagtttgctggaggtccactccagaccctgtttgcctgggtatcaccagcagaggctgcagaacagcaaagattmctgcctgttccttcctctggaagcttcgtcccagaggggcacccacccgatgccaggctgagctctcttgtatgaggtgtctgtcaacccctgctgagaggtgtctcccagtcagaagtcacag

SEQ ID NO: 942216 - DNA, 655 bp, Homo sapiens
tcagccttcttgaactagaacttgatgtcacaatgtttacaaaataattttactttgtataatatttggaatgaaatatactataaaatatttaactattttttcttctttccatctaggttttctgcatgctctttttaatatcatttgaatgtcattctcattcctgaatacatctagattcacatgctcaaaatctaaaagattcataaggataaaccctggaaagactctctccctctcggataccagccgtgacctacatgctgtttaaattagtctctagtcttcagccctcaccagtgcacaartgagctggcaacatctctcacccttattcctcctcctgtggcatgatccaggctttcctaaatcagggcactggaaagattgccttcaggagccactagtgttgatctcaactctatactttaatgctctactattgctcttgttgctatagctaacgttgctaaagggtaaccttgaggagaccttcgttttagctgttacgtcagcatcatgcctgttaccatgggtattctagtgggtggtgttgctgctgtagtgtaactgcccagtgggttcttcttgtctgctctccagatacagtcaatttatcaagggaggggaattgcaataaactctttaattt

SEQ ID NO: 942217 - DNA, 432 bp, Homo sapiens
tcccagcgtcagggatctctgctctgttggtcccctggagtggccctggggccaccacataacacttttgtaagaataagagttattttttatggcacaatcgcccctgccctgggtttgtgaatttgggggattctttttttttttttttttttttttgagacagagtcttgctctgtcgcccaggctggagtgcagtggtgtgatctcggctcactgtaagctccgcctcccgggttcatgccattctcctgcctcagcctcctgaatagctgggactacaggcacccaccacyaccatgcccagctaatttttttgtatttttagtagagacggggtttcactgtgttagccaggatggtctcaatctcctgacctcgtgatctgcccacctcggcctcccaaagtgctgggattacaggtgttggggg

SEQ ID NO: 942218 - DNA, 660 bp, Homo sapiens
aggtctctgtgcagctcccaaggtgacaatatcaccgggagtcatacaacattcaagaatggctgtaggccgggcgtggtggctcacgcctgtaatcccggcactttgggaggccgaggcgggcggatcacaaggtcaggagatcgagaccatcctggctaacacggtgaaaccctgtctctactaaaaaatacaaaaaattagccaggcgtggtggcgggcacctgtagtcccagctactcgggaggctgaggcaggagaatggcgtgaacccgggaggcggagcttgcagtgagctgagattgtgccacggcactccagcctgggcgacagagcgagactccgtctcaaaaaaaaaaaaaaaaaaaaaaaaaaagaatggctgtaatcctggccctatggtgccgctgttgggattttccyggggtttcagggcagtccgagctcaggtgcatcctggctgcaggtgcagggggtgggcaggaggaaagccccatatgctccccacatgagaaccccacttgggttctgtcccagctcagcatatggatttcttgttctctttctccaagttcccctttgtcaggctgagtctattgagccagaaaatcagccgtgttctggggatggccaagtcacagggacctggcttcccatggt

SEQ ID NO: 942219 - DNA, 660 bp, Homo sapiens
aggtctctgtgcagctcccaaggtgacaatatcaccgggagtcatacaacattcaagaatggctgtaggccgggcgtggtggctcacgcctgtaatcccggcactttgggaggccgaggcgggcggatcacaaggtcaggagatcgagaccatcctggctaacacggtgaaaccctgtctctactaaaaaatacaaaaaattagccaggcgtggtggcgggcacctgtagtcccagctactcgggaggctgaggcaggagaatggcgtgaacccgggaggcggagcttgcagtgagctgagattgtgccacggcactccagcctgggcgacagagcgagactccgtctcaaaaaaaaaaaaaaaaaaaaaaaaaaagaatggctgtaatcctggccctatggtgccgctgttgggattttcctggggtttcagggcagtccgagctcaggtgcatcctggctgcaggtgcagggggtgggcaggaggaaagccccatatgctccccacrtgagaaccccacttgggttctgtcccagctcagcatatggatttcttgttctctttctccaagttcccctttgtcaggctgagtctattgagccagaaaatcagccgtgttctggggatggccaagtcacagggacctggcttcccatggt

SEQ ID NO: 942220 - DNA, 611 bp, Homo sapiens
ctaactaagcctatttaataaagggttgaatatctcatataatttattaaatactgtgctggaagtgagaaatagaatgactgtatggtgtttgaagtatggtttctactgaatgggttttgcttttacaccatcttaaagtcgaaawattgtaagttgaatcatcgtaagtcagggaccatctgtacttcatctaataaaagcagaatacacatttttctcaagctcatatgggatacttaccaagatagattccattctgggtactgaaacagattgaacaaatttttaaaaataaaattcataaaaagtatgctcttggaccataatgaaattagctagaaatcaataatggaaagatagctggaaaagaaccaaatatttggagattaagcaacatacttgcaaataacacgtgagtcaaaagagaaatctcaagagaaattagaaatatttttaattaaatgaaaataaagatacaacttatcaaaatttggggaatacatcaaaaggaatggttagagagaaatttatagcattgaatgcatatatgcatatattagaatagaaggaggacctgaaatcaatagaggaaataggaaaataaagca

SEQ ID NO: 942221 - DNA, 579 bp, Homo sapiens
acccctctgagatgaagcttccagaggaacaatcaggcagcaacatttgctgttcagcaatattcgctcttctgcagcctccgctgctgataaccaggcaaacagggtcagagtggacctccagcaaactccaacagacctgcaggtgagggtcttgactgttagaaggaaaacaaacacaaaggacatccacaccaaaaccccatctgtatgtcaccatcatcaaagaccaaagttagataaaaccacaaagatgggggaaaaacagagcagaatagctgaaaattctaaaactcagagcgcctctcttcctccaaaggaacgcagctccttaccagcaatgaaatgaagctggayggagaatgactttgatgagttgagagaagaaggcttcagactatcaaacttctctgagctaaaggaggaagtttgaactcatcgtaaagaagctaaaaccttgaaaaaagaatagacaaacggctaactagaataaccagtgtagagaagtccttaaatgacctgatggagctgaaaactgtggcatgagaaccacatgatgaatgcacaaccttcagtagc

SEQ ID NO: 942222 - DNA, 596 bp, Homo sapiens
gtgctcacacatttgtggatgaatgaatgaatgactctatctactcaatgctcagcaagtcccaatcatgggatttggcctgatttattcccagggatccagctcttatttcaatttccctgaaccccaaaagtctatgagaataagacttccattttccaggaagatggagtagacatacttttccctattcctactaagtataactaaaagccctaggcattatatataaaacaaatataagaagactctgaaaggtacagagaagaaggcagaasagccagagaccatgggacttaaggaataacatgacaatgagtttcttattgcctcatatatcccaagattaggtatttggaaagtcagcaacctggaactgctaattagtgtagacaaaaaaaaaaaaaaaaaaaaatgccagctctttctagccaaagaaccaggaaaggaaaaacctagcaagacagaaaacttttaggaataaaatgcctactccagccaaacacagaaaaactgtggctccacctccacttgcacaagtcaaggctgagcagggagactagacttctgcccttactgtgttgttatgtggcatc

SEQ ID NO: 942223 - DNA, 612 bp, Homo sapiens
gtgccaccatgcccggctaatttttgtcaaatactgaattctttagctcctgtgacaacgattgatttgcttttcaccaaaccatgttcctctttttctcaggcacatggatgaagtacgtttctcaaaaggtagagcccatgagattgacttccagacaaagggatgtgggcagaaatgatgtgtgtggtttccatgaaggaacaatctgcaaatggcccaccatgcccttcccctcccaccttcttgatgaagatgggtacgaccaccatgaaagccctgatttgacacggcagagccacagggtggaaaaakgagcctgggtcccaaatcactacttaagaggcttcctattaggaatattcatttcagacttcatgtgtacaagaaacaaacttctatcctgtttgagctgttatatagttttgggctttttgttatagtagttcatgctaccttaactgccatagtccctgagaatcttaagaaaaccgtcaggcagcacaacatggtggaaaggtcatgcactttggagcacaacagaatcgggttggagccatggctttggtatttattgctgagtgacctctgacacgttacttaactattctg

SEQ ID NO: 942224 - DNA, 601 bp, Homo sapiens
aaaattttagggcaagtggtaggtagtgataacattttcccttcaggccattctgaaccattgatatattttgcacatgtggctccagtcttcatgttttcccatctaaacttaggccagctcatgaaagggcaacactctacagtgggaagagaaccaactttacagtcagacattcctggactcgagttgctgccgctccactatttaaaagttgcaagtccttggacaaatcacttcacctttctgatttgaactttccccatctgtccaatggggatgactcaacaccaccccgttacctattaggctctcggtaaacaccagtattcatgctctcacttcctccacacctaaacctcttccaaaaaaacacagatatctctttgagtctgttatttcataygataccttctttttttaaactttcccgtggtttccaaaaccaaatgtatgtgataatacatagtacatattactactatgtaataaccggtaacagtgtttgctcgccctggtaggttgagtcccacattggctgcttccaattggttatctgtggaaacactttatccttttataagggtgaatctagagtgca

SEQ ID NO: 942225 - DNA, 602 bp, Homo sapiens
aggcggaggttgcagtgagctgagatcaagccactgaactccagcctgggcaacaagagtgaaactccatctcaaaaaaaaaaaaaaaaaaaaaaaaaaagaaggagaaagagaagaagaagaggaagaggaagaggaagaggaccctgtcatttgtgacagcatgggtgaacttggtagatattatgctacctgaaataagccagcacccccccaaaaaaatactgcatgatatcagttatatgtggtaaggtaaaggctgacatcatagaagcagagaayagaatgatggttgtctggggctgggagtgggggaattgggagattttggtcaaaggttaaaaagtttcagttattcatgatgaataaattctggaactctaatatacagtatgttgaaataaaattaataatagtgtatggtgtacttaaaatttgctaagagaatagatcctaaatgttctcattacaaaaacaaacaagcaaaaaatggtagctatgtgtggtgataaatatattaattagctttatttcaataatcattttacaagagatgtgtatatcaaagcatcacgttgtacactgcatatgtattttttatt

SEQ ID NO: 942226 - DNA, 660 bp, Homo sapiens
  misc_feature 169, 170, 171, 172, 173, 174, 175, 176, 177, 178, 179, 180,181, 182, 183, 184, 185, 186, 187, 188, 189, 190, 191, 192,193, 194, 195, 196, 197, 198, 199, 200, 201, 202, 203, 204,205, 206, 207, 208, 209, 210, 211, 212, 213, 214, 215: n = A,T,C or G
  misc_feature 216, 217, 218, 219, 220, 221, 222, 223, 224, 225, 226, 227,228, 229, 230, 231, 232, 233, 234, 235, 236, 237, 238, 239,240, 241, 242, 243, 244, 245, 246, 247, 248, 249, 250, 251,252, 253, 254, 255, 256, 257, 258, 259, 260, 261, 262: n = A,T,C or G
  misc_feature 263, 264, 265, 266, 267, 268: n = A,T,C or G
ttagtacactgcagctgctaaaaccaaaaggatataaatctgctttgttcctttctttttctcattagaaggtatttatatgtccttatttttggtcctttgatgtttcataataaagaacccaaatatgagactatttttagtcatatttctctttccagcacacatnnnnnnnnnnnnnnnnnnnnnnnnnnnnnnnnnnnnnnnnnnnnnnnnnnnnnnnnnnnnnnnnnnnnnnnnnnnnnnnnnnnnnnnnnnnnnnnnnnnntccatgcattggtcatgtaccctgtgtttgtctttgtgtgtttgaattgtttttcacagatatcttccgtttccttccagacctgttatttaaatagtattttagtaattttattcataatgtctaagattttttactccctttcatttttttwatctttcattttagtttcaggaggtacacgtgcagatttgttacatgggtaaattttgtatccctgtggtttggtttacaaataatttcatcactagatattgagcataatatctagtaggtcattttttgatcttcaccctcctcccatcctccacctgcaggtagtatccagtgtctactcttctcttctttgtgtcatgtttactcaatgtttagctcccacttataagtgaaat

SEQ ID NO: 942227 - DNA, 600 bp, Homo sapiens
ttgttaaccttctgtctcattgatctgtctaatattgacagcagggtgttaaagtctcccattattattgtgtgggagtctaagtctctttgtaggtctctaaggacttgccttatgaatctggatgctcctgtattgggtgcatatatatttaagatagttagctcttcttgttgaattgatccctttaccattatgtaatggccttctttgcctctgtcgtctcttttgatgtttgttggtttaaagtctgttttatcagagactaggattgcaacccctgcttttttttttttttttttttttttttttttttgctttccatttgcttggtagatcttcctccatccctttattttgagcctatgtgtgtctctgcacatgagatgggtctcctgaatatagcacactgataggtcttgactctttatccmatttgccagtctgtgtcttttaattggagcatttagcccatttacatttaagtttaatattgttatgtgtgaatttgatcctgtcattatgatgttagctggttattttgctcgttagttgatgcagtttcttcctagcatcaatggtctttacaatttggcatgt

SEQ ID NO: 942228 - DNA, 597 bp, Homo sapiens
tatttttagtaaagagggggtttcaccatgttggccaggctagtctcgaactcctgacctcaggtgatctgcccgcctcagcctcccagagtgctggcattacaggcatgagccaccgcaccaggccccgttgcttattttctttgttcacagcttcctagtacatgtatggtaggttactcctggccagaagccacttgggcttcctgttatatttgagtttctgcttctctgaagggtgactgcaaagctctttaagaacctcaaaagtaaaattgaacttccagagtcaaatggaggcacatcacataactttyattttttaatttttaatttgtatcattattattatttttttgagacagagtctcgctctgatgcccaggctggagtgcaatggcatgatctctatcttcactgcaacctccacctcctgagttcaagtgactctcctgcctcagcctcctgagtagctagggttacaggtgcccgccaccacacctagctaacttttgtatttttgtatttttagtagagacagggtttcaccaggtttcaccatgttggccaggctggtcacaaactcccgacctcagg

SEQ ID NO: 942229 - DNA, 597 bp, Homo sapiens
tatttttagtaaagagggggtttcaccatgttggccaggctagtctcgaactcctgacctcaggtgatctgcccgcctcagcctcccagagtgctggcattacaggcatgagccaccgcaccaggccccgttgcttattttctttgttcacagcttcctagtacatgtatggtaggttactcctggccagaagccacttgggcttcctgttatatttgagtttctgcttctctgaagggtgactgcaaagctctttaagaacctcaaaagtaaaattgaacttccagagtcaaatggaggcacatcacataactttcattttttaatttttaatttgtatcattattattatttttttgagacagagtctcgctctgatgcccaggctggagtgcaatggcatratctctatcttcactgcaacctccacctcctgagttcaagtgactctcctgcctcagcctcctgagtagctagggttacaggtgcccgccaccacacctagctaacttttgtatttttgtatttttagtagagacagggtttcaccaggtttcaccatgttggccaggctggtcacaaactcccgacctcagg

SEQ ID NO: 942230 - DNA, 594 bp, Homo sapiens
cgggggtgacatcacatatcggtaggaccatgatgcccgcttgagtctcagaccagcaagtttttattaagggtttcaaaaggggaaggggtgtaagaacagtgagtaggtacaaagatcacatgtttcaaagggcaaaaagcagaactactagtaagggtctaacaaagatcacatgcttctgagggaacaggacaaagggcaaaaacagaactactgataagggtccaacaaagatcacaaggcaaagggcaaaaacagaaccactgataagggtctatgttcagcagtgcacacattgtcttgacaaacatcttaaacaacagaaaacagggttygagagcagagaactggtctgaccacaaatttaccagggcggagtttttccccaccctagtaagcctgaaggtactgcagaagaccagggcgtatctcagtccttatctcaactgcataaaacagacattcccagagcagccatttatagacctccccccaggaatgcattcctttcccagggtattaatattaatattccttgctaggaaaagaatttagggatatctctcctacttgcacgtccacttataggct

SEQ ID NO: 942231 - DNA, 548 bp, Homo sapiens
ccagggtcatttcatctcatgattcttaaactaatcacatctgcaaaatctttttagccatgacaggtttttacagatttctagaattaggatgtggatttttttttgagggggggaagggggtgcttactctgtcaaccacatggggattaggatgtagacatccttggggccattatcctgtctgctacctagtattaggacatggacatctttgggaccattatwctctgtatcacatgaggattaggacatgggtatctttgggaccattattctgtctcccacatggggattaggatgtggacatctttggggccattattctgtctgccatgtggggataaggatgtgtacatctttgaggcattattctgtctaccacatggggattagtatgtggacatctttggggtcattattctgtctaccacatggggattaggacgtggacatctttggggccattattctgtctgccacgtggggattaggatgtgtacatctttggggccattattctgtctatcacatggggattaggacgt

SEQ ID NO: 942232 - DNA, 571 bp, Homo sapiens
caggtgtctgccagcactcctggctaacttttgtattttcagtagagacgggacttcaccatattggtcaggctggtctagaactcctgtcctcaaatgatctgccctcctcggcctcccagagtgctgggattacaggcatgagccactgtgccyggctggtaacgctctttcatgatagaatctttatttttaaatttatttatttattttgagactgagtcccactctgccactcaggctggagtacagtggcacgatctcggctcactgcaaccttcaccacccgggttcaagtgagtcttctgcctcagtgccccccgagtgtctaggattacaggcatgcgccaccatgccgagctaatttttgtatttttaggagaaatgaggtttcatcatgttggccaggctggtctctaactcctgaccttaagtgatccacccaccttggcctcccaatgtgatggaattacaagtgtgagccaccacacccggctggctcccacttttaaatgaaaacgtgtggtatttagttttctgttcctgcattggtttgctaagcataccatag

SEQ ID NO: 942233 - DNA, 606 bp, Homo sapiens; identical to SEQ ID NO: 939274

SEQ ID NO: 942234 - DNA, 472 bp, Homo sapiens
gttgacagaagtaggcttcagaaggttggtaataacaaacttctccaagctaaaggaggatgttcgaccccattgcaaggaagctaaaaaccttgaaaaaagattagatgaatggctaactggaataaacggcgtagagaagaccttaaatgaccaaatggaggtgaaaacaatggcacaagaactacgtgacgcatgcacaagccgatttgatcaagtggaagaaaggggatcagtgattgaaggtcaaatgaatgaaatgaagtgagaagagatgtttagagaaaaaaragtaaaaagaaatggacaaagcctccaagaaatatggggctatgtgaaaagaccaaatctacttgtgattgctgtacctgaaattgatggggagaatggaactaagttggaaaacactcttcagaatattatccaggaaaacttccacaacttagcaaggcaggccaacattcaaattcgg

SEQ ID NO: 942235 - DNA, 837 bp, Homo sapiens; identical to SEQ ID NO: 939275

SEQ ID NO: 942236 - DNA, 578 bp, Homo sapiens
aagataaacatcttaagatttcacatgagtggtatcatgcagtgtttgtctttctaggcctagctcatcacatttaacataatgttttccaggttcatctgggttgctctaaatgacactgtttgattattctgatagccgaagaatattccccagtgtrtgtatatgagagtttcttgatctctttatctgtgggtgaacaggtaggttgaatgtatagccagtagtgggactgctagatggtatggtatttcctttttttttttctattgtttgcaggacccccaactgttttttatagtgttaataccaatttacatttccacaaacagtccccctttctggaaattcatactaggaattttctttttaaatattttaatctttttgtgatgttcattctagttggagtgagataagatctgagagtggttttgatctacatttttctcatgagtagtaatgttaaccacgtttttataaatgttgaatctgttttctgtcttctttgcacaaatatctactcaggttatttgcccaattttggtctggttatttctctgttgttttgttttttt

SEQ ID NO: 942237 - DNA, 578 bp, Homo sapiens
aagataaacatcttaagatttcacatgagtggtatcatgcagtgtttgtctttctaggcctagctcatcacatttaacataatgttttccaggttcatctgggttgctctaaatgacactgtttgattattctgatagccgaagaatattccccagtgtatgtatatgagagtttcttgatctctttatctgtgggtgaacaggtaggttgaatgtatagccagtagtgggactgctagatggtatgktatttcctttttttttttctattgtttgcaggacccccaactgttttttatagtgttaataccaatttacatttccacaaacagtccccctttctggaaattcatactaggaattttctttttaaatattttaatctttttgtgatgttcattctagttggagtgagataagatctgagagtggttttgatctacatttttctcatgagtagtaatgttaaccacgtttttataaatgttgaatctgttttctgtcttctttgcacaaatatctactcaggttatttgcccaattttggtctggttatttctctgttgttttgttttttt

SEQ ID NO: 942238 - DNA, 578 bp, Homo sapiens
aagataaacatcttaagatttcacatgagtggtatcatgcagtgtttgtctttctaggcctagctcatcacatttaacataatgttttccaggttcatctgggttgctctaaatgacactgtttgattattctgatagccgaagaatattccccagtgtatgtatatgagagtttcttgatctctttatctgtgggtgaacaggtaggttgaatgtatagccagtagtgggactgctagatggtatggtatttcctttttttttttctattgtttgcaggacycccaactgttttttatagtgttaataccaatttacatttccacaaacagtccccctttctggaaattcatactaggaattttctttttaaatattttaatctttttgtgatgttcattctagttggagtgagataagatctgagagtggttttgatctacatttttctcatgagtagtaatgttaaccacgtttttataaatgttgaatctgttttctgtcttctttgcacaaatatctactcaggttatttgcccaattttggtctggttatttctctgttgttttgttttttt

SEQ ID NO: 942239 - DNA, 728 bp, Homo sapiens
tgtgtttataagagctttatggttgcaagttttgtgaataatctttaatccttttgagttaaagtgttttttttggtaccacaagagtcctgtattatttagtaccacaagagtcctgtattattcttttgcatatggatatctagttttggaaaccttccccattgtgttgttttggtggtgttttgaaaaatgtgttcactctgtgtaartttgtgtttattattgagcgctctcattttgctcactggtctgtgtttctctgtgtatgccagtaacatatggattggttaactagggattttcgtttaattcgaactcagggaatgtgatgcagcccatatggtttgtatttctcaggattgctttagaaattcagggtgtttcgtatttccacataaattttggcattgtttctttgtatttcttaaaacactatttgccatacactaagtgtatataagtagagggtacaaggaagatttcgatacatgtatatgttgagtaatgaaaaaatcaagttatttagcatctcttcacctcatagttactactttttgagtggtaacaacattcagaatctttccttctagctactttgaaatatatgatacatttgtattaaggctagtcaccctgctgtagaatagaagaccagaattgattactgtcatctaagagtaactttgtacccattactgattccttccccgaccctctccacctcc

SEQ ID NO: 942240 - DNA, 728 bp, Homo sapiens
tgtgtttataagagctttatggttgcaagttttgtgaataatctttaatccttttgagttaaagtgttttttttggtaccacaagagtcctgtattatttagtaccacaagagtcctgtattattcttttgcatatggatatctagttttggaaaccttccccattgtgttgttttggtggtgttttgaaaaatgtgttcactctgtgtaaatttgtgtttattattgagcgctctcattttgctcactggtctgtgtttctctgtgtatgccagtaacatatggattggttaactagggattttcgtttaattmgaactcagggaatgtgatgcagcccatatggtttgtatttctcaggattgctttagaaattcagggtgtttcgtatttccacataaattttggcattgtttctttgtatttcttaaaacactatttgccatacactaagtgtatataagtagagggtacaaggaagatttcgatacatgtatatgttgagtaatgaaaaaatcaagttatttagcatctcttcacctcatagttactactttttgagtggtaacaacattcagaatctttccttctagctactttgaaatatatgatacatttgtattaaggctagtcaccctgctgtagaatagaagaccagaattgattactgtcatctaagagtaactttgtacccattactgattccttccccgaccctctccacctcc

SEQ ID NO: 942241 - DNA, 728 bp, Homo sapiens
tgtgtttataagagctttatggttgcaagttttgtgaataatctttaatccttttgagttaaagtgttttttttggtaccacaagagtcctgtattatttagtaccacaagagtcctgtattattcttttgcatatggatatctagttttggaaaccttccccattgtgttgttttggtggtgttttgaaaaatgtgttcactctgtgtaaatttgtgtttattattgagcgctctcattttgctcactggtctgtgtttctctgtgtatgccagtaacatatggattggttaactagggattttcgtttaattcgaactcagggaatgtgatgcagcccatatggtttgtatttctcaggattgctttagaaattcagggtgtttcgtatttccacataaattttggcattgtttctttgtatttcttaaaacactatttgccatacactaagtgtatataagtagagggtacaaggaagatttcgatacatgtatatgttgagtaatgaaaaaatcaagttatttagcatctcttcacctcatagttactactttttgagtgrtaacaacattcagaatctttccttctagctactttgaaatatatgatacatttgtattaaggctagtcaccctgctgtagaatagaagaccagaattgattactgtcatctaagagtaactttgtacccattactgattccttccccgaccctctccacctcc

SEQ ID NO: 942242 - DNA, 708 bp, Homo sapiens
gctgaatacagtaggccagtagtccccaacacccaagccatggaccagcaccggttcgtgtcctgttaggaactgggcacaaagcaggagatgagtggctggccagctgagcattacttcctgagctccacctcctgtcagatcagcagcagcattagaccttcacaggagcgcaaaccctattgtgaactgcacatacaagggatstaggttgtgtgctccttataagaatctaactaggctgggtgctgtggctcatgcctgtaatcccaacactctgggaggccgaggcaggtggatcacaaggtcaagacactgctggccaacatggaaaccccgtctctactaagaatacaaaaattagctgggtgtggtggcgcatgcctgtagtcccagctactcggggggctgaggcaggagaatcacttgaacccaggaggcagaggttgcagtgagccgagattgtgccactgcactccagcctggcgacagtgggagactcagtctaaaaaaaaaaaaaaagaaaaaatagaatctaatgcctgatgatctgatgatctgaagtggaacagtttcagcccaaagccatccccactccgcggaaaaattatctttcacaaaaccagtccttggtgtcaaaactttggggaccactgctgtaggcagttatatcacaatagtaatatctaaacatggaaaagatacagt

SEQ ID NO: 942243 - DNA, 729 bp, Homo sapiens; identical to SEQ ID NO: 939276

SEQ ID NO: 942244 - DNA, 708 bp, Homo sapiens
gctgaatacagtaggccagtagtccccaacacccaagccatggaccagcaccggttcgtgtcctgttaggaactgggcacaaagcaggagatgagtggctggccagctgagcattacttcctgagctccacctcctgtcagatcagcagcagcattagaccttcacaggagcgcaaaccctattgtgaactgcacatacaagggatctaggttgtgtgctccttataagaatctaactaggctgggtgctgtggctcatgcctgtaatcccaacactctgggaggccgaggcaggtggatcacaaggtcaagacactgctggccaacatggaaaccccgtctctactaagaatacaaaaattagctgggtgtggtggcgcatgcctgtagtcccagctactcggggggctgaggcaggagaatcacttgaacccaggaggcagaggttgcagtgagccgagattgtgccactgcactccagcctggcgacagtgggagactcagtctaaaaaaaaaaaaaaagaaaaaatagaatctaatgcctgaygatctgatgatctgaagtggaacagtttcagcccaaagccatccccactccgcggaaaaattatctttcacaaaaccagtccttggtgtcaaaactttggggaccactgctgtaggcagttatatcacaatagtaatatctaaacatggaaaagatacagt
